United States Patent Application Publication US 2015/0315605 A1 - sequence listing, part 14

SEQ ID NO: 22014 - DNA, 2635 bp, Zea Mays
cccggtttccttctctcgccttctcttttctgtaacgcgcagtatacggcgccgttgtttctccccacggcggcatctcctgcgtggcgccgccttccggcgagagctgcgacggcggcgcactaggcgagttactggacacgagagcgatgggggacggcgccagcggccgcggcggcggaggcggggccgggcggcgggtgggggagtacgagctgctgcgaccgatcgggtcgggggcgtactcgcaggtgtggctggggaggcaccgggcgcggggcacggaggtggcggtgaaggagatcgccatggagcgtctcagcaacaagctccgcgagagcctcctctccgaggtcgacatcctccgtcgcatcagacacgataacgtcattgcactccacgaatccatcaaggaccatgggagcatatatctcatattggagtattgtcgaggtggtgacttacatgcataccttcaacgtcataaaagagtttctgaaaaggttgctaggcatttcatccgtcagttagcatctggtctgcaaatgcttcgcgataataacgtggttcaccgagacctaaaacctcagaacattcttcttgttgaaaataatgaaaattctctgttgaagatcgctgactttggatttgcaaaatttttgcaaccttttgccctagctgaaactctttgtggttcgccactttacatggctccagaagtcatgcaagctcagaagtatgatgcaaaggcagatctgtggagtgtcggtgtcattctatatcaacttgttactggaagaccaccttttaatgggggcaatcagatccagttgcttaaaaatatactcaggacatgtgaaatacgcttcccatctgattgtgacttgagccatggctgcattgacttgtgcagaaagttgctgcggctcaattcagtggagcggcttacagttgaagaatttgtgcaccacccatttctttctgaacatgctccagagaagactttgagccttacacaatctgacataagagatggctttccaagaaataatagcagtccaacaaggcattcaaaccatagttcacaagaagattgtatgccttttcctttagatgatgagtcaagtggacaggacgagggtccagttcctgacagtaagagtctgatgaaatcttatggatttcccatgggtaaaagattggataaaacttcaggccagaagagtccaccgaaacataacagtttgttctccaggtatgtcttgggcaataatcatgcacctagtagccaacaccatggccattctggtaaagtgaccaaggaaagcaagattcatgaagtacaaggtcaaaaggttgtttatccagaagattcccctatcattgattcattagagtttgtagatcaggaatacgtcttcgtgtctggaccacacctggagggatcatcatcttcaacaaatgcctctcagcagcttaatgtaccagcaaaatatgataattcgtctgtttcaccaccaaagttaactttcatgagtgcaccaatgccgataaatggtttgccgattaatagacaacaacttgctgggactggtagctttgacagccactgttctcctgcatctggcacttcacagggatctgcagatataagtgatgccatggatcagcccccatctgattatctgacgaggattagattgttggagcaatatgcatcagccatagcagggttggtcagagatgagatcaaaggtggcagacacttggaagcgttctctattcagctaattgttcttgcaacctggaagcaagcaattcatataggaaatacctttgtagcttcacctgcaagggagagtccctcacaggatatccctatgaaggggcatattgctggtgcttcccatttgcctgcgaactcaaagctagctgatgatgcctgcatgcagatagagaaacagtttctctctgaagttgaatatgctgaagaactagccagcattgtgggacagatagctgatggtacagagatgccagatgcaattgaaatgatatttcagtcggctttactcataggaaggcgaggcggtgttgatgaaatgtttgggaaagccgcggatgccatgactgggtatatgagggcggtatccatgctgcggtttctcctggtcgaggcaccatcactcgccctcaacccccctttgactctaacgagatccgatcggaatcgactgcgcacatacattgacgctctcaacaccaggctctgtcagatgcagagccagaggcattgactgctgccatgcgccctcaaatcttgtccaggtgttgtacaatattctttcatttgtaaatatatttgttggcccaaactagggcatatgtaacatgtcagaactgtggaactaggcagagcagcgaaaatctattgtaaatatatttgtagtgtggaattaggcagagtgtacgtggtaggttcattctgtgtcgattcaggcagaagcttgaaaaccgaataaccaataatagtcacgtgtggaaatgtaaacagctcggcctctacttcgtagattctttattatatattagtaaattagctcgataaaaaaaattatgcacctaatatcatctc

SEQ ID NO: 22015 - DNA, 4493 bp, Zea Mays
aaggtatcctaaatgagaaatataagatgtacacttctctttctcaaacaacagaagatacaaaaatggttcagtcacttgtagcagtttgggaggaacttgaacgattaagactgttggaggaaacaaaatatgctgatctgggtagacctttaagggaagaagttcttaaagattttcttcatggtattaagtatgagagtgccctttctgtgttgttttcacaagaggggccacatcacaaagtttccaccatagaagagtctgaaaggctagaaaggtgcttaaaatcgttgactgatattattgggactgttacattctcacaggataactactgtggtaatattgatgttggtaattctgctgatgtgcaaaacgacaaacccgatgcaagtctttgctcagggtcattagaacaaaacatgcagattatatctccagagagaaacagtgaatatcctgtgtcttcatctgtacaccaaagaacactatctcagttatctgataaaggtgaaaagcatctggatgctgaggctcttggacttttaagctggctggcctcttcacaagctgcagaggaatcaactgatgatgaattaactaatgaagtcatcctcagccctttgtttgccaataagtccattgaagttgctgtggagtctgctcaattggattttgatagcgcttctcagcaggagtgtcaggatattcttgattcagttgaccccattagggcagtagaagaaccaaacatacatacatcttacctcgattctgtgaagtccaattctgctgcttctctgggcaattctattcctcagcttgatgggtcatctgatgagaacccaaaagtctcccaggaatatgatagaagtaaggtcactaggaaatcagtagtatcggcaagttacacatctactaagaagccttcaaaatcagccagtaagtattcaggaactgaacatctctggggttctttgcctctttcttccagaaaaaagaggcaacatggagatgctgatgattcatgcagtgcaatgtcaccgcagaaggatttaagtgcatctaagaagagtacaattgataaggactatcatgataccataggcagcactgattcagaatcttctagttttttaggtgtacatgattcagtttgtcattctgtgagggatttgatgaggcggaggagatcttttcggcgtgaacagttggagtttggttgttctggagctgcaacatgcaccatggataaagagagcgaaactgtgaattctgggggattggaatttcatgatttcacaagtgacatcccaaacttagcactgacacggatggcttttgttcagaagcctccattgaaggatgatgcatgttctggtttggagagcccttcagattgtgagcaacgtggataatatggaggagaataagcagaatgaatcatttcaagatatggaaagcacaggggatgtattgggtgtcccaactcattttcaaaatgatggatcagccctatatttgctgacacatgcactttcgccaccatctgcaggagctgtgggccattggctaacccaacaatctagttccagtattttctcgggttacaccaactatgatggagtcgcagctgataaggaagaggcacacagttctactttatcacggaattctcctaccagatttaccaaggagaattctgcaaataaaatgcatggagatgttttaacagaaagcagaggagagctgcgtcctgatccacggtttgatgccattaatgctgtgtctttggccatcgaagatgatgctgacaatactgttgatgttcatgtgtttatacgtggcaacaatgtcaaatcacataggagaaatctggatggtattgctggctgtaatataaatgtcttccctgaagaaaaggacgttttgaacaatcttattagtgcaatatgttcaattgatcctgatatcctagtcggatgggagattcagttaggatctttaggatttcttgccgaaagagctgcttatctgggtataggcttactgaaaagaatttcaagaacaccacatgagttgaatcatccacctaagatcccagttgataactctagtcaggtgctttctgaaacatcttctgcggatgatattattgatgatgtcagtgagaatgattggagccatactcatgcgagcggtatacatgttggtggaagaattgtgcttaatttatggcgtctcatgcgtgcagaagttaagcttaataattactcccttgaagctgtagctgatgaagtactgaggcgaaagataccactgataccaagcaggatattgaaccgatggtttgcaacaggtcctggacgaggaagacaccgatgcatagaatacattagcaatagagctagaatcaaccttgaaataatgaatcaaatggacctggtgaatcgaacatctgaacttgctcgtgtatttggtattgattttttttctgttctttctcgggggtctcagtatcgtgttgaatctatgctcctgagattggctcatacacagaactaccttgcaatttctcctggaaatcaacaggttgcttctcagccagccatggagtgtttgccgcttgtaatggaaccagagtcggccttctaccctgatccagttgttgtgttggattttcagtccctctatccttcgatgataatagcatataacctttgttattctacatgcttgggaaaagttttcccatcaaagtcagatgtacttggtgtcagctcatattcagcagatccacatacacttgtagatctgaaaaatcagctgctgcttactccaaatggggtcctgtatgttcaacctgagataagaaaaggtgtacttcctcgccttctagaggagatattgtcaacaagaattatggtgaaacaagcaatgaaaaagttgagtccatcacagcaagttcttcacaggatattcaatgcacggcagcttgctttgaagctgatagctaatgtcacgtatggttacacagctgctggattcagtggtcgaatgccttgtgcagagcttgcagacagcattgttcagtgtggccgtagaacactcgaaacagcaatatcatttgtcaaccagcatcctttgtggaaagctagggttgtgtatggtgatactgacagtatgtttgttctcctaaaagggcgttctagggaagaagcattcaggatagggaaggagatcgcctcatcaataactgcaatgaatcctgatccagtcacattaaagtttgagaaagtgtaccagccatgcttccttcttacaaagaagagatatgttggctatagctacgagagtcctgaacagaatgagcctgtctttgatgcgaaggggatagaaacagttcggagggacacatgcccagcagttgcaaagattttggaacggtctatcagaataatgtttgaagaacaggatttgaccaaagtcaggacatatttggagcgtcagtggacacacatattatcaggaaaagtctctattctagatttcatttttgcgaaggaggtccgtttaggcacttatagtgcaagggcttccacgctgccccctgcagcaattgttgcaacaaaagctatgttgtctgacccaagggcagagcctcggtatgcagagagagtgccatatgttgtaatccatggggaaccaggagctcgtcttgccgacatggttattgatccttatggtctgctagaagttggctccccttatagattaaatgaacaatattacataaccaagcagattattcctgcattgcagcgtgtttttggacttcttggtgctgacctgaacaagtggtttaatgagatgcctcgccccatacgatcaactcttgcgaaacgccaatttgctgctgctcatggttcattctctcgtgatggcagtttcatccgattaggattgaataataaaacctcagccaaaggaggcagaatagatacatactacatgtcaagccactgctcaatttgtggtgatatgattcaaggatcagagtccttctgcaacaattgcttgaaaagcgaagctgttgttgccacagtagtcgctggcagaacttcaaagttggagcgagaaatccaacatcttgctgctatatgtggccattgtggcggtgcagactggattgttgaaagtggagtcaagtgtatttcccttgcatgcccagtcttctatgaacggaggaaagttcagagggagctggtagtcgtctcagagtcggcaggagaagcagggtattaccctttctgctgcgctgaactcttttgagaacatttttttggggctgcgtttctctgtccataccgtgtaaattgtggaatctgtaacctttacatcacacgtgtgtatagttgttgtatgtaacactgaagaacatgtactggtgaaagaatacatacaatgtataccgtgtcgctcgctgttca

SEQ ID NO: 22016 - DNA, 1494 bp, Zea Mays
gccccggcccaaagcaccagcaccggcgcggcggtccaaagccagaagcagaacagaaaacaactgagacagctagagcagagcccccttcacaccaaaaatttcctctttgcgtcgcgccccgtcagctgagtccccgcggatgggctcggtctcgcggggctagggtttggtcggtcgtctcgtcggcgtcgagggcgccggcgctgctagctagtagtagctcgctcgcgctagggttctcaggagccatggtgatgcagcgcttctcgtggccgtacggaggccggagcgcctccttgtgcggcagcttcaccgggtggagggagtatcccatggggctggtcggggccgagttccaggtcgtcttcgatctgcctcccggggtttaccagtaccggtttttggttgatggtgtctggaggtgtgatgagacgaaaccctttgtatgtgatgaatatggactgatcagcaatgaagtgcttgtggaaaacaatgtgcaacctgttgtgcagccagagccttctatcagaggaactaatttggatgagggtaccgttttgacaacaatgcccccggagtcatcatctcagaacccaggcgtgcaaatagcagttttccgccatgtggtctctggaatattattacacaataccatatatgaagttgttcctctttctagcaagttagcagttttggacactcagctacctgttaaacaggcatttaaaataatgcatgacgagggtcttgctctggttcctctttgggatgaccatcagggaaccataacaggcatgctcactgcattagattttgtattaatgttgagaaagttgcagagaaatattcgagttactggcaatgaagagcttgaaatgcatcccatttctgcttggaaagaagcaaagctacagttttatggtgggcctgatggtgctgccatgcagagaaggccattaatccatgttaaggattccgatagtttggcggatgtggcactgactataatcagaaatgaaatatcttcagttcctatctttaagtgcatgccagattcatcaggagtgcctttccttaatcttgcaaccctccaggggattttgaaatttctttgctcgaagctacaagaacaggctggaggctgttcccttctgcacaatcagcttctcagcattcctattggtacatggtctccacatacggggaggtcaagtagcaggcatctcagaactttgctactgagttctcctttaaatacctgcctggattttctgcttgaagatagagtaagctcaattcctatagttgatgacaagggagcgctccatgatgtttactcactcagctactgtttgtttttttggaaggggtgtgtattgtgagattcttgagatgataactagggagcaaatgccacaagctctggatcattgggtcgactcaaaacttgctgaaacgaactagaatgtcatgctagaaaatgaacaagct

SEQ ID NO: 22017 - DNA, 513 bp, Zea Mays
gatcgagaaggaggaggaggcgggtctacgctgcaagacgccgccgcaatgatggctaggaacaacaacgacgcttgtagcgacgaagaggatcacccaactgcccgctaaggagcaacttcaggtgcctgataattcatcagatcacgaaaaccagataacttgtgggcataatgaattgcagtcaaatagttcaaatagtttcggtcagctttgtacatatggttttctattcatccttatgccgcccatagatgtcattgataaacggaaaaaggatccttattttttttgttggaaacccgttgtgtaggtattttgggcgtgtaatcagttcgtatctgtattcaggataatctgtgcggttgctgtttctcaccgacacaaaggcgtttggtccaggtgatgcttgcagcgcatgaatgccgagtctcttgctccctcggtttacaaaaacttgttttagacaggattttgagttaacttttaaaacttcgataacaaataactttt

SEQ ID NO: 22018 - DNA, 1034 bp, Zea Mays
tgcacctactttttttccctctcgtctctgttgcccggttgcccctcgctgtgacgactgacgagcaaccaatccacccaaatcccagaccgagctccaatcctcagcgccgccagtcgcgccgcctccgatggccgcgcggcgcgggccccacgtcatcaagctccacgatcccaacccgcccctcctcggccgggcgccggggaccgcaccggccgccatccccgcgccgtcgcgcgatgagggcatcctcgcgcagcaccctcgcgccgccccctcgagcgcatccgcctcgcacccggccttcgcccttatcgaggagcgcctcgtagcccgggaccaggacatccaggagctcctcgtcgacaaccagcggttcgccgccacgcacgtcgcgcttcagcagcagcttatcgcggcgcagcacgagctccgggcggtctccgtcgctgccaccagggcgcgcgccgagcgggaggtcgaggtgcgagcgctggccgaccaggcggcccacatagaggccgaggcgcgggccgtcgccgctgcgcgcgcggaggtcgaccaggttcacgccgacgtccaggtgctcgtcgcggcgcgcactgaccttgtcaaccggctccagggcctacgggagaagctcgcgcacaagaaggctgaggcgagtaagaccgattccgtccgtgcccagattgaaaccatgcgccgggagatccagaagggcagagctgcggttgattttgaaaagaaggcacactctgataaccttgaacaaagtaaagcaatggagaaaaatatgattgctgtggctagtgagattgagaggcttcgaggagagcttgcaaatgctgaaaaaggggccaccgctgtcaacccagcagcagctgttggtaactctgggtatgttgcggcttatggcaattctgagccaacatatactgcaatgtatggcaatcctgatgcaacatatactgcacaggcctatcctgatgcttataacactaatcagataatggaacaatcaagcttttgac

SEQ ID NO: 22019 - DNA, 1579 bp, Zea Mays
acatttgatttcattcgctgcaagcgcaagcgcggcagtcgagctcgccgagctcgcgatcaccggcagctcgctcgctcgccaatcgccatggacccctgcgcgttcgtgcgcgtcaccgtggaccagctcctcctcaagctccccgccgtgccgcgccccagctccagcgccggggtgtacccttccaactcgccctgcttctgcacgctcaccctccaggaccacccctcctcgctctcccgcaccgcgctgctcccgctcgcgtgcgcctcgggccccgccgcgctggtcgtgtccgtgcacgcgggcccgacggggaccacctgcggcatgggcgcctcccgcgcgctgggccgggtgcgcgtcgccgtcgacgtggcgcgcgccgcggccggggagaccgtcgtcgcccgggacggctgggttgacgtggggaagcccgcgtcgggtccgtcggcgcccccccgcgcctccgcgcgcgcgcagatccacatggtcgtgcgggcggagcccgacccgcggtacgtgttccagttcggcggcgagccggagtgcgggcccgtcgtgtaccaggtgcccggtggagccgcccgcggagggcagcggcagccggtcttcacctgccggttcagcgccggccggagggcagccaggagcagatcgctgacgccgcagtcgtccatgagccggagcaccagccgcaggctgcggtcctggctgagcagcaccctccacggcgaaggccgcgacggcgcgcactcgcgacgcgagcagcggaagggctggacggtgacgatccacgacctgtcggggtcccccgtggcggcggcgtcgatggtgacgccgttcgtgccgtccccgggctccggccgcgtctcccgcgccaacccgggcgcctggctcatcctccaggccacgggcgcggggccgtccagctggaagccgtgggcgcggctggaggcctggcgcgagcgcggccccgtcgacgcgctcggttaccgcctggagctggtcttcgactcgggcgcccacgagtgcgccgtccccatcgccgagtcgtccatcagcaccaagcgcggcgggcagttcgtcatcgacccggccacgttccccgaggcggccgcgggcgctgcctggccgctcgccggcggcttcgtcatgggctccactgtcgagggcgagcggcgcgcgagccggcccaccgtgcaggtcggcgtgcagcacgtggcgtgcatgggcgacgtcgcggtgttcgtggcgctgtccgcggccgtcgatctctgcatggacgcctgcaggctcttctcgcagcggctcaggaaagagctgtgccaggaccaggacgagtgagagagagagaccggcccgagcgacgtgtattagaagagctcctgggtttgcttgcctttttgtgctgtgagttgtgtgattaattctagccggtttagttgctatgtcttgtggaggtgatggccctgtggctgtttttagtgtaggctgggtcggatcacaggaacgggacgggggtttgtagtacgttcgttgcctcattcaattctttcgattcttttacaca

SEQ ID NO: 22020 - DNA, 1681 bp, Zea Mays
cagaaaagaaagaaaaagagattgagcaggtcgtgcggtagaatggtcccttgctaattggcccccaaatggagggtgatccatgtgaagaggcccagcccagctgacaacaccagcccctgagaagcagcgcaggcgcagggcattccagaacgttcggcgccggcgaggccacacgcccaccatcagtcagccgccccgccaaagccatgcgcctccccgccggcgcacgcctcgcgctcctgctcgcccgccgctccctctcctcctccccccgcatcccgcgggcgcacacagggatatggagcgaggcgccctcccggagctctcccttctctccgccgagcagcgcccgcaggtccttccacgggaccaggccggtggcggcaagggactactacgatgtgctcggcgtcagcaagagcgccagccaggcggagataaaaaaggcctattatgggcttgcaaagaagctccacccagacacaaataaaggtgatgcggatgcagaacgcaagtttcaagaggttcaacgagcttatgagactttaaaggatgaacaaaaaagatcattatatgatcaggttggccctgatcagtatgagaaaactgcttctggcggaggcggaactggcttcgagggtggttttggaaatccatttgaggatatttttggtggtggcggtggcggtggtggaatgaatgatttctttaggaacattttcggggatagggactttggaggacgagatgttaaggttgcactcgaactatcatttgtggaagcagttcaagggtgcagcaaaacggtcaccttccaaacgtctgtaacatgtgaaatctgtggtggagccggtgtgcctcctggaaccacacctgaaacatgtctatcttgcaggggttcaggatttatattcatgcaaaccgggccattcaggatgcaatcaacctgcacaaaatgtggtggttctgggaaaactgtgaaggaattctgcaaggcatgcagaggaaacaaagttgtgcctggaaggaaatcagtccgccttgacatactgcctggttcggataatgaggacaccataaaggtggttcgatcaggtggagaagacccagatggccgtccaggtgatctttatgtgaccctcgaggttcgtgaggatcctgttttccgaagagagaaaggtgatattcatgttgatgctgtcctgaatgtgactcaggcaattttgggagggacagttcaagtcccaactctcagtggagacgttgttctaaagatcaagcccggtactcaacctggtcagaaggtagttctgagaggaaaagggatcaagacaagaaactcaccgtaccacggagatcaatatgtccatttcaatgtcaacatccccgaaaatttgacgtctagacagcgggagctgatcgaggaattcgcgaaggaggagcaaggcgaagacgagaaggacgccaaggcagcagctggagcatcggggggatagccggttttaggagccacagtagtgccttttagctggtatttataccgtgaccgtagacctgtctcaaattcgcagcggaaagatttatagataggtctttgtttcggattttgtagctggaataaatgaataatacgtctagaactgattttctgtctttttcgtaaaaaataaaaacaaat

SEQ ID NO: 22021 - DNA, 666 bp, Zea Mays
aataggtcggctgccttctgtcactctcccctctgctcaaaatttcccccaaaacttctcctcttgaggaaggcagcccaagcgagcgcgctgcaatggcggactcgtcggcgccgacgagagtgatgatggcggtgaacgagtcgtcgctcaaggggtacccgcacccctccatcagctgtcgcaccgccttcgactggacgctctccaagctcgtccgctccaaccctgggggcttccacttcctcttcgtccacgttcaggtccccgacgaggacggatttgatgacatggatagcatctatgcttcgccggaggactttcaccaaatgaagcagagagacaagataagagggcttcatttgctcgagtactttgtaaaccaatgccatcagttagggataaaatgcgaggcatggatcagacatggagatccaaaggaggttatctgcagcgaagtgaagagagtccagcctgaccttctagttgtgggaagtaggggtcttgggccatttcagaggacaaacctcgtgcagtggcgagagctatctcgctaagtcaccgggtcggcagactctttgtatttgtggggtaaagacttgcctcggtttatccctcctcgtacaccactcgtgtgagcctccggcactcggattacctttcatc

SEQ ID NO: 22022 - DNA, 1254 bp, Zea Mays
ccagcccaaaccacaaccaagaactaccgcccaccgggcaccggccgcagttccccttctcctcgcccccaccacgctaaaccctcctctttccttctcccacccgaacaacagcaggagaccggtattccgcatccctacccagcaatggtggacgcggggcaagcggcgaagcgggggaaggccacggatgagaaggggcagccgtcggcggccgcgcggacgcctcgccaacacacgccggatcacccaccctattgctggatgatcggcgaggcaattgacgagctggctgaggacggcggctcggaggaggactccatctcggccttcatccgcgccaggcaccctggcgtgccccccgcgcacgataggttcctccggcactacctcggcaagcacgtcgccgagggattcttcctgcgaaacgctgcggggcggttcgagcgcaaccccgaggagaacgcagccgaggagctcccggtggagcagactgaggccggctcgtgcaacccggcttccgttgggtctttggtggtagatgccaagcatggccggggcaggccgccgaaggatggctatccttcgacaccgcctgaaggcaggaaggatggcggcgcgggtgctcagtggatgacaccacatgcagacaaggacgaaagccgagcaccatccttgaagcccaagcgccgtcgccggcttcgcaggcaggggatggccacgaccgctgacagctccggcgaagcactcgtcgcaggcaagaaagatagcagggaggagcatgagccaccgcgtgagctggcactggtgatcctcgatgatagctccaacacaccaaccatggacaaggcatgcaccaaggtccctccaaccacgcgacctgtggatggtgggcagcctctcgatctgtcagctacacccaagggacgtcgccggcaacgcaaatcagtcgcggtggctactggtggccgctctgctcttacacctggcaagaagctaggttgtaaggtctcatctgcatcgcccaagtttgcaccggtggttgccgctggctgtcgtactccggcttcagttgctgaccagggcggcaggaaagcatcagcgacgctgaagcggcacgggcggcctcgcaaactgtacccagttagcgctgacgagatttcagatgatccagagattgctttgctcgcgttgccttctccagacactagcggcgtcatacccgtagctccaaaacttggctacctgacctga

SEQ ID NO: 22023 - DNA, 3609 bp, Zea Mays
aggtaggcgtcgatgagtagtactcagacgccgccggcctcacgctgctgctccaggtcagcgccgtcccgaggctgcagatcaggaggtgcggtgcgtggatcagcgtcgaccccatccccgcgtgtttcgtaatagcaaaaatctccgtccatcagggaggtcggtcttgcagttggagttgggcacattcgcctctatcgggcgggcacattccctccgtcccgtgacttccaccttccttacccttcgtatggtgggggcccacctcgccgcccccaccccccgctgcccttctctcttccccgtctccgactccacacacctcccctttccactcgccgccggcgatcccgaaccgggagcagcgcacatggcaggccgggacgagaggtggggggcgcggggcggcccgggggacacgcacgcgtcgacgagccgcgcacccgcgggcaccgccggggagtcggagggcgcgtcgccggactcgctgcggaacacgccctccaacatcgcgcggctggaggacgcgatcgggcactgcgcggcgcggcgcaaataccttgcgcacaccaagagcccctccgacggcaaggacgtccgctggtacttctgcaatctccccctcgccgacaaagtgctctcttcgtccgtaccgcggacagagatagtggggaaaggagactatttccggttcagcgagagggactctctggcactggaggcgtctttcttggagagggaggaagtgctgcttgcatactggtggcgtgagtatgctgaatgcagtgcaggaccgagaggatccttggttgaaagtgatgattctgcatatctttataaggtggaggaagaacgggttggggttcctgtgaaaggtggactatatgaggttgatttgatgaggcggcattgcttccctgtgtactggaacggtgaaaacaggcgtgtcttgagaggccactggttcgctcgcaaaggtggtgttgattggattcccttgcgagaggatgtttctgaacaacttgagttagcatataattgtcaggtctggcatcgtcgaaaatttcaaccttcaggcctatttgcagcaagggttgacctccaaggaagtacactggatttgcatgctctttttactggagaggatgatacttgggaagcttggcttgtctttgatacgggtcctaagcttggtagtaacacaatcaaattaaggcgcggattttctccttctgaatctgcaagtacaaagccttcacaggatgagttgcgtcagacaaaagaagaggaaatggatgattactgctctcaggttccagttggtcatctggtattcatggttcatggcattggacagaggctggagaaagctaatcttgttgatgatgttgttgatttccgccgagtaactgctaacctagctgaaagatacttaacttcttatcaaagaagtacccagagggttctatttattccctgtcagtggaggaagggcttgaaactcagtggtgaaagtacggttgagaaactcactttggatggagttaaaggtcttcgagtcgcattaggtgccacagttcatgatgtcctatattatatgagtcctatctactgtcagcatattattgactcggtctctaaccagttgaacaagctgtacatgaaatttctgaagagaaatcctggttacagtggaaaggtttcattgtatggccactcattaggaagtgttctgtcgtatgatatactttgtcatcaagaatcccttttggccccatttccaacagagtatctgaacatggaaacatctgatcgaagtcaaggagcaaagtcagccaatgaagttgctctgcatgattcaggtgcaaaggatcatgatacttatactctagggcattcttgtactggtaatgaaaacagtgccgttgatgaaggtagcaccagaactgacatgtcacatatggacagcattgtcccatcatgtgtgctcgaggattcattaaataacccagaaactggtgtgccacgtggggcagttgttgctgagcaaaatgaaaaagaaaataggattgagaatcatcagacggtgtatactgaggaaggaacaacttcaggtgtaagcacaaaagatgctgaagcatcacacatttcaagatctgctgaggatgtccatgaagaggtccttgacaaagaaaaaatgatcatttcactagaagaagaggtgaaacgtcttaaagctaaactagatcagcttgaacagcataagcatctagtgactgagagcaccagtggtgttgagtatcatggaggcaaaaatggcaatcatgccttgaactttggcgaacttttcactgcacaaggaagtataaaccagccctactcaccacaaatcaaatacacaaaactaaactttaaggttgacacattctttgctgttggatctcccctgggtgtcttcctttccctgcgtaatgtccgtattggtattggcaaagggcgagattattggaaagataagaacataattgaagagatgccatgctgccggcagatgttcaatatttttcatccttttgatcctgtagcatacagagttgaaccacttgtatgtgaagattatcaaaagaagcgtcctgtaattgttccctaccatagaggcggaaagaggatacatgttggagtgcaggagttcacagaagatatttctgcacgttctcaagccattgcctgtcaattgaagtcactgaaggtcaaagcagtagctgctttgctagcattgagcagaaatgacacagaagaggatggtgagagtgctaatgaggaaggaagatcgtatggttccattatgatggaaaggttgaccggctcaccagatggtcgaattgatcatgtgcttcagcattcatacctatctgctctgggagctcataccaactattggcgagatcatgacactgctctcttcattctcaaacatttgtatcgtgatatacctgaggatcctccaagcgatgtcgttgaaaggatgcatattaaactgttttatgagagagatccggttgaggaagaaacgcccgtgacattttcggaccatgcagcaattaaggagttctgcagaaaggtgagagcctactcaacaaaaatggaggatgatgccaactgctaagcctcttgatggtgtcatttcctgatggaaaccatgttacatccccacgttcctcgccaagaaggaagatgcaggcatgggaagggagaacgattccacaaaatcgtgatcccaggataagaatcctaagaaatgtagttccacgcttgacaccagaatcaggacacttgagaaacgttgtacagagtcggttccccatgttgcttcacttgttcccgtcgtcaatgcagtgctgtacagagaacgtcctgctgtacctttctgtatatgtaatcttgcgtgctgtgcatacagaatatgatggatttagtttcaaacgacagcttacagcgacaccaggctgaaacgaagggactcgtgagagaaaatccataataatttagagacattaataacacagaacacctagctttcaaatgttgtgatgtcacaaagcttcg

SEQ ID NO: 22024 - DNA, 7506 bp, Zea Mays
cggcaatgtcgcagcttggattagctgcaactgcctcgaaggccttgccactactccctaatcgccagagaagtccagctgggactacatttccatcatctgcattgccgaggccctcaaaccgaaggaaaagccatactcgttcacttcgtgatggtggaaatgaggtatcagatgccaaaaagcacagccagtcagttcgtcaaggtcttgctggcattatcgacatcccaagtgacgcagtttcggaagtcgatatttcacatggacctaaggatcctagggggccaacagattcctatcaaatgaatgggattatcaatgaaacacataatggaagacatgcctcagggtccatggttgttgaattttgtgcagcactaggtggcaaaacaccaattcacagtatattagtggccaacaatggaatggcggcaacaaagttcatgaggagtgtccgtacatgggctaatgatacttttggatctgagaaggcaattcatctcatagctatggcaactccggaagacatgaggataaatgcagaacacatcagacttgctgatcaattcgtagaggtgcctggtggaacaaacaataataactatgccaacgttcaactcatagtggagaaagagtaggtgtttctgctgtttggcctggttggggtcatgcttctgagaatcctgagctgccggatgcattgaccgcaaaaggaatcgtttttcttgggccaccagcaacatcaatgaatgcattgggagataaggttggttcagctctcattgctcaagcagccggggtcccaactcttgcttggagtggatcgcatgttgaagttccattagagtgctgcttagacgcgatacctgaggagatgtatagaaaagcttgtgttactaccacagaggaggcagttgcaagttgtcaagtggttggttatcctgccatgattaaggcatcctggggaggtggtggtaaaggaataagaaaggttcataatgatgatgaggttagagcgctgtttaagcaagtacaaggtgaagtccctggctccccaatatttatcatgaggcttgcatcccagagtcggcatcttgaagttcagttgctttgtgatcaatatggcaatgtagcagcacttcacagtcgtgattgcagtgtacaacggcgacaccagaagattattgaagaaggcccagttactgttgctcctcgtgaaacagttaaagcacttgagcaggcagcaaggaggcttgctaaggctgtgggttatgttggtgcggctactgttgagtatctttacagcatggagactggagaatactattttctggagcttaatccccgactacaggttgagcatccagtcactgagtggatagctgaagtaaatctgcctgcagctcaagttgcagttggaatgggcatacctctttggcagattccagaaatcagacgtttttatggaatggactatggaggagggtatgacatttggaggaaaacagcagctcttgctgcaccatttaattttgatgaagtagattctctatggccaaagggccattgtgtagcagttagaattactagtgaggacccagatgatggtttcaaacctactggcgggaaagtgaaggagataagttttaaaagcaagcctaatgtttgggcctacttctcagtaaagtctggtggaggcattcatgaatttgctgattctcagtttggacatgtttttgcatatggactctctagaccagcagctataacaaacatgtctcttgcattaaaagagattcagattcgtggagaaattcattcaaatgttgattacacagttgacctcttaaacgcttcagacttcagagaaaacaagatccacactggttggctggatacaagaatagctatgcgtgttcaagctgagaggcccccatggtatatctcagtggttggaggtgctttatataaaacagtaaccaccaatgcagccactgtttctgaatatgttagttatctcaccaaaggccagattccaccaaagcatatatcccttgtcaattcaacagttaatttgaatatagaagggagcaaatacacaattgaaactgtcaggactgggcatggtaggtacaagttgcgaatgaatgattcaacagttgaggcgaatgtacaatctttatgtgatggtggcctcttaatgcagttggatggaaacagccatgtgatttatgcagaagaagaagctggcggtacacggcttcagattaatggaaagacatgcttgttgcagaatgaccatgatccatcaaagttattagctgagactccctgcaaacttcttcgctttttggttgctgatggtgctcatgttggtgcggatgtgccatatgcggaagttgaggttatgaagatgtgcatgcctctcttgtcacctgcttctggtgtcattcattgtatgatgtctgagggccaggcgttgcaggctggtgatcttatagcaaggctggatcttgatgacccttctgctgtgaaaagagctgaaccatttgatggaatgtttccactaatggacctccctgttgctgcctctagtcaagtacacaaaagatatgctgcaagtttgaatgctgctcgaatggtccttgcaggatatgagcacaatatcaatgaagtcgttcaagatttggtatgctgcctggacaatcctgagcttccttttctacagtgggatgaactaatgtctgttctagcaacgaggcttccaagaaatctcaagagtgagttagaggataaatacaaggaatacaagttgaatttttaccatgggaaaaacaaggacttcccatccaagttgctaagagacatcgtcgaggaaaatcttgcatatggttcagagaaggaaaaggctacaaatgagcgacttgttgagcctcttatgaacctactgaagtcatatgagggtgggagagaaagccatgcacattttgttgtcaagtctctttttgaggagtatcttaccgtggaagaacttttcagtgatggcattcagtctgacgtgattgaaaccttgcgtcatcagcacagtaaagacctgcagaaggttgtagacatcgtgctgtctcaccagggtgtgaggaacaaagctaagcttgtaacagcacttatggaaaagctggtttatccaaatcctggtgcgtacagggatctgttggttcgcttttcgtccctcaatcataaaagatattataagttggcccttaaagcaagtgaacttcttgaacaaaccaaactaagtgaactctgttccagcattgcaagaagcctttcagatctggggatgcataagggagaaatgactattaaggatagcatggaagatttagtctctgccccattgcctgttgaagatgctcttatttctttgtttgattacagtgatccaactgttcagcagaaagtgattgtgacatacatatcacgattgtaccagcctcatcttgtgaaggatagcatccaaatgaaattcaaagaatctggtgctattgttttttgggaattttctgaagggcatgttgatactagaaatggacaaggggctattcttggtgggaagagatggggtgccatggtcgttctcagatcacttgaatctgcatcaacagccattatggctgcattaaaagattctgtacagtacaacaactctgaggtcaacacaatgcacattgtgttattgaatgctgaaactgaaagtaatataagtgggacaagtgatgaccaagctcaacataggatggaaaagcttaccaagatactgaaggatagtagtgttgcaagtgatctccaagctgctggtttgaaggttataagttgcattgttcaaagagatgcaggtcgcatgccaatgcgccacacattcctctggtttgatgaaaagaactgttatgaagaagagcatattctccggcatgtggagcctcccctctctgcacttcttgaattgggtaagttgaaagtgaaaggatacaacgaaatgaagtatactccatcacgtgatcgtcaatggcatatctacacactaagaaatactgaaaaccccaaaatgttgcatagggtatttttccgaactattgtcaggcaacccaatgcaggcaacaagtttacgtcggcacaggtcagcgacactggattaggatgtcctgaagaatctctgtcatttacatcgaatagcatcttaagatcactgatgactgctatagaagaattagagcttcatgcgattaggacaggtcattctcacatgtttttgtgcatactgaaagaacaaaagcttcttgatctcgtcccattttcagggagtacaattgttgacgttggccaagatgaagctactgcttgttcacttttaagatcaatggctttgaagatacatgaacttgttggtgcaaggatgcatcatctttctgtatgccagtgggaggtgaaactcaagttggactgtgatggacctgcaagtggtacctggagagtcgtaactacaaatgtcactagtcacacctgcaccattgatatctaccgagaagtggaagatacagaatcgcagaagttactataccattcagctacttcgtcagctggtccaatgcatggtgttgcactgaataatccttatcaacctttgagtgtgattgatctaaagcgctgctctgctaggaacaacagaacaacatattgctacgattttccgctggcatttgaaactgcactgcagaagtcatggcaatccaactgttctagtgttcctgaaggcagtgaaaatagtaaatcctacgtgaaatcaactgagctggtgtttgctgaaaaacatgggtcctggggcactcctataattcccatggaacgtcctgctgggctcaatgacattggtatggtcgcttggatcttggaaatgtcaacacctgaatttcccaatggcaggcagattattgttgtagcaaatgatattactttcagagctggatcattcggcccaagggaagatgcattttttgaagctgtcaccaacctggcttgcgaaaggaagcttccccttatatacttggcagcaaactctggtgctaggattggcatagctgatgaagtgaaatcttgcttccgtgttgggtggtctgatgaacgcagccctgaacgagggtttcagtacatctatctgactgaagaagactatgctcgtattagctcttctgttatagcacataagctgcagctagataatggtgaaattaggtggattattgactctgttgtgggcaaggaggatgggcttggtgttgagaacatacatggaagtgctgctattgccagtgcttattctagggcatatgaggagacatttacacttacatttgtgactgggcggactgtaggaataggagcctatcttgctcgacttggtatacggtgcatacagcgccttgaccagcctattattttaacagggttttctgccctgaacaagctccttgggcgagaagtgtacagctcccacatgcagctgggtggtcctaagatcatggcgaccaatggtgttgtccacttgaccgtttcagatgatcttgaaggtgtttccaatatattgaggtggctcagctatgttcctgcaaacattggtggacctcttcctattaccaaacctttggaccctccagatagacctgtcgcatacatccctgagaacacatgcgatccgcgtgcagccatccgtggtgtagatgacagccaagggaaatggttgggtggtatgtttgacaaagacagctttgtggagacatttgaaggatgggcaaaaacagtggttactggcagagcaaagcttggaggaattcctgtgggtgttatagctgtggagacacagaccatgatgcagctcatccctgctgatccaggtcaacttgattcccatgagcgatctgttcctcgggctggacaagtgtggttcccagattctgcaaccaagacagctcaggcattattagacttcaaccgtgaaggattgcctctgttcatcctggctaactggagaggcttttctgggggacagagagatctctttgaaggtattcttcaggctgggtcagcaattgttgagaaccttaggacatataatcagcctgcgtttgtctacattcctatggctggagagcttcgtggaggagcttgggttgtgatcgatagcaaaataaatccagaccgcattgagtgttatgctgagaggactgccaaaggtaatgtgctcgaacctcaagggttaattgaaattaagttcaggtcagaggaactccaagactgtatgggcaggcttgacccagagttgataaatctgaaagcaaaacttcaagatgcaaagcatggaaatggaagtctaccagacatagaatcgcttcagaagagtatagaagcgcgtacaaaacagttgttacctttatatacccagattgcagtacgctttgctgaattgcatgatacttccctgagaatggcagctaaaggcgtgattaagaaagttgtagactgggaagaatcacgctctttcttctataaaaggctacggaggaggatctctgaagatcttcttgcaaaagaaataagacgaataattggtgacaacttcacgcaccaatcggcgatggagcttatcaatgaatggtacctggcttctcaggccacaacaggaagcactgctggatgggatgatgatgatgcttttgttgcctggaaggacagtcctgaaaactacaagggatatatccaagagctaagggctcaaaaagtatctcagtcgctctctgatcttgctgactccagttcagatctacaagcattctcgcagggtctttctacactattagataagatggatccttctcagagagtgaagtttgttcaggaagtcaagaaggttcttggatgatgatatgataccaacacatccaacacaatatgcgcatgctacatgttatttttcaagtacatacatagaaggatattgcttggccttgattgatcatgtctgatctaagtcgatcattattttcttgaaacttcctttcggacgtggtgctatggttgatgaatttggatgtgtgcgttctgccaggtgtaagcccaaaggtttatacagaccgagttaaggttaggaagagcacgagtgaacttgttctggttttgcagtggttaaggcagaaagttgtttcactgtagttctgagatgtattaccagcggcgctgtaattttagggtgtataatgcggatgctagtaaacaattgagtggttcattaaattttgaactcgaataatatgtttctgtaggcacatgtgacgtaccactacatgaaataaatgtcgctgaactagggcaccagagttttggtaggactaaggttttgtttggttatgggataaggtgagcatctccagcgttcccaaacttgaatttccc

SEQ ID NO: 22025 - DNA, 2147 bp, Zea Mays
aaaaggtcgtgatataatatggcttcaacgagacttcagcatatatgtgtgcaacctttttgacacaggccaggcttcaaaggtcttacagatggaccgcaacagcttggaacatcttttgcaccatttctgtggagtagctgcaaataaagaataccaagctgcagattggagattgaggccccttcctgatgaaatgatcaaatatgctagagaggatacacactatctgctatatatatatgacctgatgagattgagactagtgaatgggtcatcatgtgaaaatgatcttcttttagaggtttgcaagcgcagcaacgaaatttgcttgcaactgtatgagaaggagcagctgactgatacatcatatctacatatacatgggttgaaagaaaacgagctgaatgcaacgcagctgtcagttctttccagtctatatcgatggagagatggcattgcccgtgctgaggatgagagcactggctatatattacccaataagactctacttgagataggtttattactcaacttgattagctgtgttttttttgctttccttggataataactttgcccttgattttttgtgcttatagcaaaggagatgcctgtgacaagtgggaagttgaaaagaatgattaaatcaagaaattcgattttggaacgaaatctcaaccatgttattaacaatataagggatgccatagcagcttctggtgcttttgaaagtatagtggagcagctgaagaagggaaaactggaagagttaacattggcagatgtgaagaacagcagtgaggacactgaaatgattcctgctgttgatgttgataacattgaagatccgagtgatgaatctgctgtagttcctgcagtgattacaaatgtcggtgctgctccctgtattacaagcgaagcttccttgggtaatatgcatttagaggaccctgtgcctaaaacaaaggactcgggtgcttcatcagggtttactggactgacagacaacaaaaagctgagcaatgaccagcagcaagcagcaaaggctactgttcaagtatcaaagaggcctacagcttttggagctctgtttggaaaggcagctgctggaagaaggccagatcttttcctaggattttcaaatgttcagggtaagactaaggtggacaagataacgtcttccgtggtacttccttttcatcatttctcaggtggtgcaaaactttcatcagccgcccttccagcgaaagaatcgttgcattctgaaccagacagcatccaacacagtgatccagcttgtcagttggaagaagtgatacagttggacatgggaacagacgagcaacaaccaccagaaaatggcaacgaggatgatggacactgtgagactgaagacacggagatgtcaaagtccccttcaggtgacccgtctgttaccgagcaacgattccgatcactcaacgaagaaagaaacgttaagcagaaccagaagacacctcgagaattcgaatttagtgttccggtggtgccttttgattatgccgaagccagaaagaatctcgtgtctagtttgcctaaagctgagaggagaaaggacgatgccgttgccagggctataaatacagacgctggagataagcagaggggttcaaaaaagccaccaggtgggggagagaacgagggaaatttccagcatccacgaagacggcaggctttcccgccttcaggcaatagaaatgctacgtatcaccagtagcaagttgagatgtataactggcgaattggattattccaaaattgtgataaaagagtaccctacgtgttgtatatttggactggggatatctcggactcatgagaaaccaccgagactgctactgcaccgcggtgccctgacgtgttgctaacacgtgctaggtgactgagaatagttgggtattgcgttattttttttaatatgttctgaacatgagaatgccctagtatttcattaggatgtgtacattttacaatgttttatggacaattactgttgtatttttacttttgaactccagagccctgttttggtcacgcactacaattttcacctaaactcttttccgaacgtttactatattgggctgtttggatccctttattta

SEQ ID NO: 22026 - DNA, 866 bp, Zea Mays
ccacactgacatcaagacaagttgtatttttttgttgggctgttgcattggttgaagtgaagccaagcttactttcaggtgaagcggagaaattcctttttgaggacatatatcaggttggagacgtggtgcttgttgcgaatgaatctgtgatcgataatgaacataaactggttggattgcacagcttggtgggctacaatgtcgtaacttcccggcgacgcaatgttggcaaggtgcgtggtttcacatttgacatcagctcaggtgctatggagtctctcgagcttgactcttttgggctttcgattgtcccttctagcttggtaagcacgtactgtttatttgtcgaagacgtgctggatatagtctccgatacagtcgtggtgcatgaagacgccgtctcacgggttcaacggttaacacagggcattttgggcactcaaaacatccacggacctggtggtgagattgacgagtacggtagatttggggggagggggaggaggaggagagcaaatggccagggaaagtctggtggccgagaactccgcagcgaaccgaagcatccggatgatgaatgggagctgccgatggactactgacacaaactcgccatgatagcattctgtttagtgctattgtattgccagaaaagtacatgctttgtacatataacataccagaggattgcgaattcagaaaagacgaaaggccctttcagccttgtcagagtttgatcgctttggcccgggtgggttagtataaaaagcgagattgtgttgccatgcaatgaccgtaaccccctttgtcttccccgacactgattgcactacactactactactactactaatcattcaaag

SEQ ID NO: 22027 - DNA, 565 bp, Zea Mays
aggtactgcaagaacatcattggttgtgacaattggtccatctccaagacatcgtggggaaactaccagtacaataatgtttggacaaagggcaatgaaagttgagaacatggtgaaattgaaggaagagtttgattacaagagcttatgtaggaaacttgatattgaattggataaattaattgcagaaaatgaaaggcaaaggaaacattttgacgatgaagttgagagaataagagctgaagctcaatgccgcattgctgaggctgaaagggaatgcaaaatcacattagagaataaagaggctgagtctacatccaatgatactggagaagtgcataatttactgcagaatgagaaaatgctacgtcaatcggctgaagatgaggccagtgacctcaagaatcaaatatcacactggaaaaagctggaggctacagctacagctgagataataaaactacagaaaatgctagatgctgaagctagccagaaagagaaacttgaagaagaaataggtgttttgagaagccagttattgcagatgagtatggaagccgatcag

SEQ ID NO: 22028 - DNA, 1916 bp, Zea Mays
tgcacgcacgcacgcgcggcggcttgcgcttaagataccgagaacccatacaaaggtagaggcgcagggccaaggccaaccaacccacccaccgcgaaaccttcctccctctccttctctgtccccttctctcccctcctctcctccgccgctcgacagcctactctccaagccaggagaacccaacccggccagccccacacgcacacgcccacgcccacgcccacgcagccgcggcggaggccatccggcgggcgtccatgggctgctgcggctcctcgctacgggcggggacgcagccggagaagaagccggcggcgggggcgctgcccccgcgccgcccctcctactcgctgagccagaaccagaaccaggcgccgccggcagcccgcgcgggcgcccaccaggtgccgccgctcagggagttctcgctggcggagctgcgcgccgccacggccggcttcgcgccggacaacatcgtgtccgagagcggcgacaaggcgccgaatttcgtgtacaggggccgcctcgagcccagccgccgcgcgatcgccgtcaagaagttcgccaagatggcgtggcccgaccccaagcagttcgcggaggaggccaagggggtcgggaagctgcgccaccgccgcctggccaacctgatcggctactgctgcgacggcgaggagcgcctgctcgtcgccgagttcatgcccaacgacacgctcgccaagcacctcttccactgggaaaaccagacaattgaatgggctatgcgcctgagagttgcatactacatcgctgaagcactggaatattgtagcaccgaaggaaggcctttgtatcatgacctaaatgcatatagggtcctctttgatgagaatggtgatcctcgtctttcatgctttggcctgatgaaaaacagcagggatgggaaaagctatagcacaaaccttgcatatacacctccagaatatttgagaaatggaagagtaacatcagaaagtgtcatattcagctttggcactatactgctggacctcctaagtggaaaacgtatacctccatcccgtgctcttgatatgataaaaggcaacaatatccaagtactgatggattcacatctggagggaaactactcaacagaagaggcaaccacattggttgaccttgcctctcagtgcctacagtacgaacctagggatcgtcccaacactaaaaagctggtttccgtacttgagcccttgcaaataaaatcagaggtaccatcctacgagatgcttggcattccgaagcatgaagaagaagcacctccccctccacaaccgcaacaccctctttctcccatgggcgaggcctgttccaggatggatctgactgccatccatcagattctagtgaacacgcattacagggatgatgaagggagcaacgagctatcgttccaggaatggacgcagcagatgagggacatgctggaagctaggaaacgtggggactttgctttccgtgacaaagatttcaaggcagccatagactgctacacgcagttcgtcgacgtggggacgatggtgtcgccaacagtgtacgcgaggcggagcttgtgccacctcatgtgcgaccagcctgacgccgccctccgtgacgccatgcaagcgcagtgcgcgtacccagattggccaaccgcgttctacatgcaggccgtcgcgctctcgaagctgaacatgcagagcgacgctacggacatgctgaacgaggcgtcgcagctcgaagagaagcggcagaagaacacgaaaccttgatgaaagaccagacccctctctctcgtcccggggttacggtccttctgcggctcaaatagcaataattgtgtccgcttcacaagcctagtgcaacgtactatctgatctaggacccgatcgaat

SEQ ID NO: 22029 - DNA, 1695 bp, Zea Mays
cctttgcatactggtgtactacgtgatcacaactgtgttccaaatggggaattaaactagcatgctggttctatgattgaagggaatgatccagtcacgggtcatataatctcaacaaccattggagggaagaatggagagcctaaaaagactatcagctacatggcagagagagttgtgggaactggatcattcggaatcgtcttccaggcaaaatgtctggagactggtgagactgttgctatcaagaaggttttgcaggacaagcgctacaagaacagggagctgcaaatcatgcgatccatggatcactgcaatgctgtttccttgaagcattgtttcttctccaccacaagcagagatgaactttttcttaacttagtgatggagtttgttcctgagtcactacatcgtgtgctgaagcactacagcaatatgaaccagaggatgccgcttatttatgttaaattatatacctaccagatatttcgaggtttagcctatattcacacagtacctggtgtttgccacagggatgtgaaaccacagaatcttttggttgatccattgactcaccaagtgaagatatgtgattttgggagtgccaaaatgttggtcaaaggtgaagcaaacatttcatatatatgctcacgttattaccgtgctccagagctcatatttggggcaaccgagtacacaacatcaattgatatttggtcagctggatgtgttcttgctgagctgcttcttggccagcctctcttccctggcgaaagtgctgtggatcaacttgttgagataataaaggttcttggtactccaacacgtgaggaaatccgttgtatgaatccaaactacaccgagtttagatttcctcagatcaaagctcacccatggcacaagattttccacaagcggatgcctccagaagctatagatctcgcttcacgtttgctccagtactcaccaaatctaagatgcactgctcgtgtgcacatccattctttgatgagttgcgagagccacatgcgaggttgccaaatggacggccatttcctccactgttcaactttaaacaggaactagcaaatgcctccccggagctcatcaacaggctgatcccagaccatgctaggcggcatcttgggctcactttattgcccaccgctggaccataggcgaaggctctatggtgtttaaaccttgctctttctgattcttcgttgtgccataggcaattcaaggtgtagaatctgaccattattggaaagccaaacacgagctggcgccaatgtgttgcataaggagaggcggtatgttcgtgcagccagccttttgccgcctgttttaatgcaaaatctgattttacttaagcagtgtgaggggaagtgggttggtgtattgttaagctattgaaggaattcaatccctggtattgtattactttctccaacgttaaatgttgtagttcgcctgtaagtgttccacatcgcctgttatcagtccgcaatccttcgtgtaaatgttattaatgaaaaaaatacatcttgctatgttaccgatcgactcattccaatcacattccgtcctgttgcaaacaaattcttgttttcattgtcagtcgtgctgatcgggaattgtttccagcatcttcctgcaaggaagtgttaattctgaatggttgtaccacttccg

SEQ ID NO: 22030 - DNA, 301 bp, Zea Mays
cttctgggcaatcttctgtatgctgcaaaggttgtagcagagcaggaagggcttgctgatggcttcagaattgtcatggacgatgggcccagaggatctcaatcggtctaccaccggcacctacacgttcatcttctcgggggacggcagatgaattggccaccggggtggacaggtcgcgaggacgcagcagaggcggagccgcggagcgcaccgatgaggcgatgaccgacccccacctcaaaagctctccattgctcccacgtatcgttcaaatttataatgtttcctttggttttcg

SEQ ID NO: 22031 - DNA, 2423 bp, Zea Mays
ccttcgccagttcaccccccacagaccacaactgtcgcgtcgccggctcgccgctcgccctatcccccaccgccaccggccacgcttccgtactgagccgctgagggggccagtcaggcgcgccgaccgccgaaactgccatgaagctgacctgcttgtccgccgccgccggcggcggcggcggctaccactcgccagcgagccatctcctggagctggagggggtccgcttcctcctcgactgccccatcgacctctccgctctcgcggccttcgcgccggtgcccctcgccggtgacgcaggaggtctcatccgcgcggtgccgcgctactggttgccagcggccgtgaaagaaggcggcgtggacgccgtgctcgtgtcttccgctacggggatgctcggactccccttcctcaccgggctccccggattcaccaacacgaaggtatatgtgacagaggtagcagcaaggatcggaaagccaatgatggaggagctggtggagatgcatcgtgagtttgtgaggtactatgggccagatacggatgcatcacccaagtggatggaaggggaggaactcaatgaactcatgtcaatgtcgcaaaaggcagtgattgaaggcagggaaaatgatttgacttctctggtgcctttatacagtccaggaaacgttgaagaatgcatgcacaaagtacagtctgttaaatatggagaggaggtttgcttcaatggcatatttatgctgaaagcttctagttcaggccttgaacttggcaattctacctggacaatacaaagtccaagagctagcattacctacctaccaagttcagtatttgtgtcggctcatgcattagattttgattacagctctctgaaggaaaatgatgtgattttgttttcggatttctcatccttgaatgacacggacgaggataatgagaaactgaatgagcattcaatggatgaaacggactcttctctatgtcgctactcagtgtttagggatgacggcgctgatgcagatgaaagggtgccattcgtgtgcaacaatgatgatatcacagaggagattgagagaatcagctttatatgctcatgtatttttggtgcagtaaaatctggaggctctgttctaataccaattggccgccttggtgttattcttttacttttggagcttatatcagaaatgctacattcttccagcctgaaggtgcccatatttgtgatttctgaaacagcagaagaaatatttgcttttaccaataccttgcctgaatggctatgcaagtcacgtcaagaaaagttattcgctggtgaagcattgtttggccatgtcgagcttttgaaggagggcaaattatttttgttcccgcatctacattcaaagggtttgctcatggaaggagccttgtattgtgctatgtccacactggagccttagactcggcccagctgttcatttgcttcgtcgctggcatgcagacaaacggtgccttcttgttgtggagcaaggaaatggtgctgagttgagtcttaagcctttcatgcccttggcaattcaagtccttgagtgttctttcctttcgggcgtaagggcggggaaaattgatccattactgggagtgctcaaaccgaagtttgttatgcttccagaaggtcttaagtcgcggtgttcaataaagggggtgccatggtcattcttgtattactccaagggcaagaccatcgagctctcaaatttacgtgaagatattgaggtgcatcttgcaactgatgttgccttccgattgcagcctagacaactgaacgaaaccactgcagtggcgagattgagaacaaagctgcttgtaagcaatggacggtaccagctggcctctgcagaaaagcaaccagatcaatcaaagcgtcacttgctacactgtagcactattgaccctggtcgcttgctgtcagctttgcgagagaaggggatggtatgttcatttgctgcagatgatagccccactgctagtgaatcctcagttctggtcactagtcctggagatgctttggtgaggataacgcccgacacgactgttatatactgcgacgacgagagaacatccaatcaaatttatgatgcgcttagcagtgtttgtaaagggatctgactgcatcatgtgtaattgttgttcgttatggggtgtttggtttttagggactaatttttagtactccattttaatctataaattgctaaatgcggaaaataaaacttttatttttcgtacttggtaatttatgaactaaaataaaataggggactaaaaattagcctctagaaaccaaacattcccgaagttgtgcgtgtgcgttaaattgtgaattgccatgtggtggtttagtggttgaaaaaaggttaagttttttcttccag

SEQ ID NO: 22032 - DNA, 187 bp, Zea Mays
agttgggttggttagataatctccttacctttccaaccatatcaattctgtcgcaatcggagtccggatgcatcttgggcgtccgttttagtgcagactggtcatggaacccgagatggagtcgatctccttcctgttgtggcgcccttgctgctcctcctcaacacctaggcctttcccaagtcct

SEQ ID NO: 22033 - DNA, 2721 bp, Zea Mays
atgaaatagtgttttggtatcgatacggtaaacacggcgcccccgctcgcacgctccttcccactcagcagcagcacgcgctctgctccccacgccagcacgcccgagccccgaatcgagtcccctaccccatcgatccccgccgcccgcctttccccgccgcccgcctttcccctacccagctctcggggaccttctctcccagcccgagatccctccccaccgagatcccgcgccgccatggtgtcgtgacggcggcggaggcggcgtcatggagcgggagcccaagtcccccgacgaccgccctgagcccgctgcggcggcggcgcagccgcagccgcagccgctggagtggcggtttgcgcaggtcttcggcgagcgcgccgcgggagaagatgtgcaagatgcctcccattaggagcatagggcacacttaagtgttttcccaggccaagcctgccgggcaaggaagtgcgggggtgcatggtttccttttctggcatcgatcttaaacttgcttcttctttcctcttctttcccgttctgatcaactcatcgctgtgctgcgttactgcctgccggcttctatttagtgtcttgttcatttcacttgatatttgttgtgtcggcttgatttgttcgccagctaaatcagtttgtatcttgatcagtatgctacatgtttcagtggacataatatctgcaattgagtttgacaaatctgggaatcatcttgctactggagatagaggtggacgtgtggttttgttcgaaagaacagacattgctgataatgcttgtcgaggagaacttgagaggcaagaatatcttgtttctaggcatcctgagttccgttacaagaccgaatttcagagtcatgaacctgagtttgactacctaaaaagtttggaaatagaagagaagattaacaagatcaagtggtgccaaacaaccaacaatgcactctttctcttgtctacaaatgacaaaacaatcaagtattggaaggttcaagagaaaaaggtgaaacgcgtttcagtgatgaatttggacacctcccaaagttcagacaatggttcaacttcaagtccgggtaccagtagttgcagagctcttcttccaaatggtggatgcacaggaaaaatgtacagtccaaacaacaatatgtcatttcctccaggaggatgcacatcgctgcgtttgcctgtggtggttacaggccaagaatttactcatgttgcgagaagcagacgtgtatatgcccatgcccatgactaccatattaattccatttcaaataatagcgatggagaaacgttcatatcagcagatgatctgcgaataaacctttggaatttagaaattagcaatcagagctttaacattgttgatgtgaaacctgcaaacatggaggatctaactgaggtgatcacttgtgcggagttccatccaactcactgtaatacactagcatatagtagctcaaagggtactattcggcttattgatctgcgacagtcagcactgtgtgacaaccatgctaaactatttgaggagcatgaagcacctggatcaagatccttttttacagagataatagcatcagtttcagatataaaatttgcaagggatggaagacacattcttagtcgtgattatatgacactcaagttgtgggatctaaacatggattcaggcccagttgcaacttttcaggttcatgaatacttacgtcctaagctttgtgatttatacgagaacgattcaatttttgacaaatttgagtgctgcctcagcggcgatggactccatgttgcaactggttcttatagtaatttgtttcgtgtttttggttgttctcctgaaagcgtggaggcatcaacgttggaagccagcagaaatcccatgaggcgacaggttgctgatccagcaaggcctgcacggactctgaccggtgctgtgaggagaggtggagagaacacaagcgttgacgccagcggaaactcttgcgacctctcaacaaagctgctccatcttgcgtggcacccaactgagaactccatcgcgtgcgctgccgcaaacagcttgtacatgtactacgcataggggaacgtgctagagagaactggcgcaggaaactgttgtcggttcgatggctggggagcccccgaaaagcggcagtcggtgattccacaagatcagtcctggcacaagctgacttcctcctcgggattttccttggtggatgtgaagctgaagcatgtgttactggtttattattaccgaagctttttggcacccaaggtatgacgacggctgtagctgcctgccttgtagcgaaattggctgcggaaggataaaaggaagcggtaagaagacagacagacaggtcacaggaatacctgctcacgtatcacaaaggctgtaagatttttccccccttctcttttacgacgtgtaatgcaacctagtcagagctaaccatcagttgtcgtgaactctgatagtttctgtcatagatactgtagattttatctatgcagctgctgttgtattcattagattgttcggataagtgtaccagtgggctgtgatttgctggttgtggccgtgatgtggctacgcggaggaattcgaccgaagttaaatctctttctatttaaaattaaatataaaaggatgtaacccaacaagaaggcctcgcaggttccactcttctaa

SEQ ID NO: 22034 - DNA, 2248 bp, Zea Mays
gtcgggtgccatgtgttcggtagaatgccaaaaccaagcgcgcctactgcagacattaccgaacagtggtgctgtatatactagtggccttttttccaattccgatctacactcaaaggtgaattctactagtttgagattttggaggacctaccataattctgggaagtttgatttgactgatctgacgcatcctcatatgtggtacccgaaagctcgagaaaagaagcgtaatgtgtttttacatgttggccctacaaatagtgggaaaacttatagtgctctcaagaggctagaagcaagctcttcaggtgtgtactgtggacctctgagattgttagcaagagaggtagcccaaaggttaaacaaagttaacgtcccttgtaacctgattactggacaagaaaggaatgaaattgaaggtgcaaaacatagctcagtgacagttgagatggctgatatgacaactaactatcaatgtgctgttattgatgaaattcagatggttggctgtaaatcaaggggttattcgttcacacgtgcacttctgggactttgttcagatgaacttcatgtctgcggtgacccagctgctgttccccttatccagcgaattcttgaagctactggtgatgtagttacggttcaatattatgagagactatctcctttggttcctctgaaatctccacttgggtctttctctaacatcaaggcaggagattgtttagtatcattctcaagacgtggaatttataaactcaagaaaagaattgaaagggagggaaaacatctttgctctgtggtctatggttcattgccaccagaaactcgaacaaagcaggcgacaatgttcaatgatgataccagtgaccttaatgtgctagtagctagtgatgctattggaatgggtcttaacctgaacatttccagaattattttctctactatgatgaagtttgatggtttctgcaacagggaactaactgtggccgaaatcaaacagattgctggtagggctggaagatatggatctaagttccctgttggagaagtgacctgtctaaatcctcaagatctcccattgctgcactcgtctctgaaatcagcttcctccattatagagcgtgctggactttttcccacatttgatttattatctttgtattcacgattacatggaactgacttttttcaccctatactggaacgtttcttggagaaggctaaactatcaccagactatttcattactgattgtgaagatatgttgaaggttgctgctattgttgatgatttacctcttgggttgtatgataaatacctcttctgtatgagtccggtggactttgcagaaaattatgcaaggaaaggaattgttcgacttaaagaaatattcacacctggaacattacaggttcctaaaacagacaatcaactcaaggagcttgaatctgttcacaaggtcctagagttatatgtgtggttaagcttcagaatggatgattcctttccagaccgtgaagtagctgcctctcaaaagtcaatctgtagcatgttgatcgaagaatatctggagaggtttggatggcagccacaagaccgaagaaaggttttgggtggagcacaaaagctgctccaagaatacgatgtatcacaaatgaacaaatattttcaagaagtcaacccaggaccgaagtagaaggactatacaggaaatgagcctcaccacttccagtccagatttgaggaaccaataccatccagagcatttgcgttctgcctcactggttatggatcaccggcacaaagtggaactacacttcggacgaccgaagatatacgtggacgcatctcaaaccgtgatcatctagattgatttggcagcacgcatttccatcagccagatcgtgatcgactagtaggacttttttccccaaaaatgaaactacactccagtcttaagtcataatgaatacagagccatgagcccatgatagggccgcttctgagacggagattgtgtattaacgggtacacagacggtacttgcattctagtctgagttcgatgagttgcagcaatagcggctgtaatcctgtatataaagagggaaaataatgttgcttgtgctgttatttattgcaagatctgaatgtttgtgtccaatgacaatttagtagacattttacatgcactaactaatagctaatggcccgtgtgtacctttgtatatatcctttcagat

SEQ ID NO: 22035 - DNA, 2260 bp, Zea Mays
acactgttctaatagaggaaacattgagtgcaagaaaggtgggtggtccagggaagaggatatgcttttgtgtgaggctcaaaaagttcttggaaacaagtggactgaaattgcaaaagttgtttcaggaagaacagacaatgcagtgaagaaccggttttctactctatgcaaaaggagggctaaggatgacgagctataccaagaaaatggtgtgccatgttccaacacaaatgcaaagaaggttctcactgaaacaggacgcctcacaccaggcggagctggctctttggtacatattaagcagacgaggtcttccagttataatttgaaggagaaccttgtaccaaatatgaaattatttgaactagagaagagcacacaagatgccaggcaacctcttgctaccatttcttcgaacaaccaagataacgtgaatacagttaaatctcaaaatcttgtcccaaccacaaaacaattgttaggtccagaacaacattgtgtgaagcgggagggtaattttctgaagaaggatgacccaaaagttgctactttattacagcaatctgactttctttgctcccttgcaacaaaaatcaaaagtgacaatacaagtaaaagcatggatgaagcatggcagcaactgcaagatcatttagtgaaaaaagagcacaacaaagtgccagaaaacagtgggtctgaaatagcttcacttttagaggagcttgatgatttaattgtagacccctatgagaggaaagatgaagatgaacagaagctaagcgagcacaatggacggaccgatgtggacaatgatcactgtaacggttcttcacaaactagcatagtagtaacgacaaatatggtcccagaggaaatgatgggagattgtccagtcgataactgcaatgaggatagtagtctttgtagaaaagtgctttctggaagtacagaaccttgcccaggtgcaaaaatgacaggatgtgggaatttgagcgaagaccaggttgctgaaggtagtgtgcttcaacgtgtagaatctatatctcctgttataacagatattgatgatttactcgtagacccgtatgagagtgaagcggaagatgaagaaaagtcaggggagcagaatggacagattgatgtgcatgctgagcagtgttttggttcttctcaaactatcatagaagtgatatcagacatggcccctgatgaagtcatggaaacttgttcagcagataaccgcgaagaacatagtagcatttgccgaaatgtgctttctggaagtatggcaccttgcccaggtgcagaaataccaacatctgaaaaaatgagtgaacttgctgaagatagcagacttcaatgtatggagtttgcatctcccgttctggcaaattttgcgagcaaggaatgtggagaaacaccagaaccacaagttcttaatgagattgttgaagatagcaggcttcaatgtattgaattcaactccccggctcacacaattctcccagataaaacaggcgccgaaaactttgcatccccaagttttgatgtggttgcaaaagatagtaagcctccgtctttggaattcacatcccctgctcatacagttgcaacattccaaccgtatgcagacggcatccctaccccaaaattcactgctagtgagaggagttttctgctgtcagttttagagctgacctcaccagggtcaaggcctgaaacttctcagcagccatcttgcaaaagggctcttcttaatagcctttgaaatgggtttgcataaaatcccaacaccaagcctgctatgcccctcagcataatttggctactcctatatgcatgaagtgtgcctaccctcaaagggtttcatagtatgttttgtttgttgtatagaatgatgcattggtgtagttgtattagcatacaggaacgaaagggtgatggtgtaagtgtttacagcttgtgttcaaaatatagaaaaagtaatattctttgtgtaattaactcttgtaattcttcccatgggtgcgagttattagattgttgcgtagtgtgatgtaatggctttcctttgttgagcttttggtatggaagaaccgactgcaggctatggctgtatgctttattgatttgtatggttggaacttggaaacatgatattcggttgatagactgcgttctctgcagctgatccggcactaagtttggtgtccattttcagaataaaattcatgtatttcccaggcctccagaatcc

SEQ ID NO: 22036 - DNA, 1430 bp, Zea Mays
cttaaaaaaccatgcttcttaaattatataacatgttttattttttccttaaaatgtttgaccttctattgacatctgctaatgtgatctattcatgctggttcttatgcaacttgtacttgtgatctctctgcgccgcccaggtgctgctccggctcgacccgccggagatctgcaggctcgcgcaggtcaaccacgcgttccgcggcgccgcgggggctgacttcgtgtgggaagccaagctgccggagaactacaactatctgatggagttcgtggggagcggcgacgaggggaagcggaggcggcggcgggccgggaagaaggagatctacgcgaggctcgccaggcctgtgccttttggcgacggcaagaaggaattctggttggacaagaacaaaggcatgatctgtatggcactgtcgtccaaagcactggtgattactgggattgatgacagaagatactggcaacacatgccaacttcagaatcgaggtgaatatggctttgatatcacatttactaatatttgtctgttcaatttatgccagttttctgaaaacaaagatggtctgttggcattaattgcgatggaatgggctgaagatatttactcatgattccagtctgtagcctaccttcagcaaatctggtggtttgaggtggttggtgaagtcgatttctgcttccctgttggaacatatagcttgtacttcagggtccatcttgggaagttctacagacgatttggccgccgccagtgcacctcagagcatgttcatggttgggacaagaagcctgttcgcttccagctatcgacctctgacgggcagcaggcattgtctcagtgctacctggaggagcccgggagctgggtcctgtaccatgctggcgattttgtggcctcaaagcctgaccagctgatgaagctgaagttctccatggcacagatcgactgcacgcacacaaaaggcgggctgtgcatcgactcggttcttatctatccaaaagggaaggggtttcaccaggagagggtggtcaggtctcagaaatgagggttgtagatgttgtggaggtattcacattaggatgttagagcaaatgcagcttgcagcctgatcttatttttactttgggctctagttcgcagcagaggtgaagtgtatgtggttgtagaactcaggtattgtgtggtcaggtgaccaccagagtgctctgtcagtcctttggcaaggtcgttttcgccccccttcagctgaatttggacagcgagatagccatgaaactgtactgaaatgagttcgaaggtgtcattcccagtttctaatttgctttctactgcttagtttcggatgctccctttttcctatttgtcatgatccggtcttgacttggtcttaacttaatattaagaatcattattatgatt

SEQ ID NO: 22037 - DNA, 1646 bp, Zea Mays
ttcttttccttctccccccgcccgcggaatcaagactcgacagctccaggttggccatcgcccacccatcgtcgccagcacggaagaggcaactcgctaggcggcggcggagaactggccacgacgcgtccccggaagggccggttgcttgactgatcctcttcttgggcggcacggtgtcctgtgccgtgccgcgtgaaagattccaccggcatccccaatccccatggcctaccgccggaagcagggagtcgccgccgccgatcaccggagctcctatccccaggactccgcctcgtcccacggctacacgtcgttcaaaagcatagatgagcccaagctcgggctgtggcgaactctggcgaccagagccaaggggatcctcgacgaggacgggttggcgcataagttcgaggacttgcggaaagaacggcctcgtagcgacgccacggcatccagcaaagatcaggctcctaattctcgctggtcatttgagaaccactggaaggccggagacgccgcgtcgcggatcagacccgaggctctttctgcttctgtcaaccagcttagtggaaaaataaagaatgctttggaagaagggctcacgatcgtggataacaagacctccagtattattgaggaaacaaagaaaattcagatcaggaggaaacctgctggctcaagccctcatgtgccgaattcagcggtagataagcatacgcttagcacccctgatctttcactccggcagcctgaatctgctgcccaggagactggactgaaagcttctcgcgacgttgctaatgcaatggctgctaaagcaaaacttgtactccgtgaactaaaatctgttaaagcagatctagcctttgcgaagcagcgatgcgctcagctggaggaagagaacaggctcttgcgagaaacaaagcagaaagggagcaaaactgaagaagacgatgacttgattcgcgtgcagctggagacattgctgtccgagaaatcgaggctggcgcaggaaaactcgacgtatgcccgtgaaaaccgcttcctgcgtgagattgtcgacttccatcagttcaccacccacgacgttgtctcattggatgacggcgacatggaaggcaccgaaccagaagaagacgacgacaacgacaacggcctcatatgtgctgagaacgttctgcctgcggttgaagaaaatccagtagacgaagaacactgccctgtcccctccaagctagaatctccagtggccagcctgggcgagccatcatcgtcccccaggtccagcgattgtcacagtgcctcgaagccagacgcgtcagcgtctgatgtagcttgatgatgcatgcgacattggtgactttgccatcttgtttggggtttcagttggcgttggttgtgagtgatgcatgtgtgtataatttttttgtccattgtccacattggattggtttgtagcatagttacaggtttctgcttttgtatagagcgtatagtgctgtgttttgatgggaaaactgactcgtatggtccgccaagttttaaggtgcatatggtttggtccacatgtaattacctgtggatttgactgttataaattggccaagtgaaagaatatattgaagactgagattgttgcttgc

SEQ ID NO: 22038 - DNA, 2386 bp, Zea Mays
ctaaatttctcgttgaatcaacagcaaccaaaatgtaagcttaaacccaaggaaaaatttcaaacccgaaacccactagtaccgccacacgaattcccgaccccgatggcgacatcgccaccgcagaaccctagctccggcgagccctccgatgcgtcgagcctcgcagccgcggcgctcgaggcgcccgtgcgcgtatggagatccctcgtcgcgcgcttccctcccctcccggactcctccagcttccttgctggcgtctccgacctccagctccgctacttcggcaacagccggccccgccgccgcaggcgctccgctctacctctccctctccgcccggtggccgcgcactctgctcggattgctggtgagatgcccaaagcctttgtgatcttagatgatgttgtgcaacacaccctgactaatttgcacagtattcacaaaagcttactattttggcaggccaaggctgagggaacaaattctcagaaagtgtactttatgatatttgagagaggtccaagggcctttgttgatgcaacatatcaaacactcactagactcgggagcaatggacgccctgtccaatacattttgcattctgcatctgatatggtgtcaacaaaactcgctgccctgacaagtatgcaacactgcttggccgcttttcttgcagaggttcattctgaagttgataaatgcagggaaggattaactgaaaactcagataaatcgctacatacattattcattgttttgaataccacattctccaagttggaggtatcacttagaaatgcttgtgagggtcaagatgaactatttatagatgatggaaacttgcatgaactgtttgggaaattaccagaagttgatgtagagagttcagaatggacagaggccttggcaacagatggtacaagtttaatctatcaaaaccttcagaagctagatagttttctgtcctctcagctctcaagccataaaagaccaaacaaattgaccatatattggttaccctatacatgtggagcagtaggtctctctgtgtgttctctgtggcttttacgccatagcagtttgatgggaagccctgatatcgacaattggattcgagatgctaaggagtctgtggctggattttgggatgaacatgttgagaaaccaatcatttccattagagatgagcttttcgagacattcaagcaaagagataaaggtgtaatggaaaagcaagaggtccaactaactgaagattcattgcgcaggatgttagttgccttttgtgagcaaacagagggtcaaaagttgctggaagatttaccagtgcaggcgatgttggagactctcacaaagagatacgagaaggaattgatacacccaattcaaaacctgttcagtggagaattagcccgtgctatgcttattcagattcaaaagcttaaactggaccttgaatcgaccatggtgctgagggaagaggtaatattgcacgatgtcaacggaggctgcttcttgttgatgtagagagaaggcttatggagtttcaacattacagggataatggaatggaggaagaggcacggtgcaagtttggcttagtactttacacgcttgatagactctgcaaagctgttgagtcacacgcaaaagaaacaggcgaatggttaagcttgagacaagatatttttgatctgtcgaagctcgacatgggaatgccagataagatgattgtcgtttcacggttgaagtggatgtataactgcttgcttccattctcatcgagccgtttgccacgcctctagagcagtgagcaactggacgtcgtgtgttgcattttggataaagattttgacacggatacctggaactctatgtcggaaggatggttctttcatgcccacaagatgttctgtagattttagcagagctggatgaagcatatcggaagggggcagattgggtggatgcagtatccatcgagccctccgttgacaattcttgcattgctaggcatgttgatttggattggctgttgcaccgaatggtttgcgtcgatgggctacatctacatgtgtgcgagcattgtaccctttggccttgttccacttgcaattccaattccaatggttgttccatatcccatactagttcataagtcataacatgacaacagaatgctcttcttttatctattccgcagagatgggtacaatcttatttaactgtttcatttgaaagaacgtgttattattcatgtggccacacgacaccctgggttcctttcacttgccgatgatggcgagcagcgcttccttgtagtggccatgggtgttcttggccacggcgtcggcgagctttgtcccgtactgcctggtgtagg

SEQ ID NO: 22039 - DNA, 1764 bp, Zea Mays
gggggcgccactgcttctcttcaagacccgattccactcgcgtgtctgcccgccggccagacctcgaggaaacaaggccttacttccttgattacatggcgtcgccggacgaccccgtgctctccgcttgcaagaaaaacttgagccacttcagaataaaagagctcaaggatgttctacaccaacttggactttcaaagcaaggaaagaagcaggacctagtggacagagttatggcagtgttgttgagccagcaagatcaagcctttgaaacgaatggcttaccaaaggcaaaatcagcggtgaaaatagtggaggacacatttagaaaaatgcaagaccctacaaatactgttgcagtctcaaggagccacgaattaggagacagtgttacgtgtaaaaagaaaccggatgattctgctcaggcagttaaggttcgttgcccttgtggtgactccaagccaaatgattccatgattaagtgtattgatccacaatgcaacatatggcaacatgttggctgcgtcgtcatacccgatactgagaaatccgcggacaatatttctcctgaattaccttcctgcttttattgtgaagtgtgccgacttagcagggctgatcctttttgggtcactgtgaaccatctgttactccctatcttaataggaccctctactgtagcagcagacgggtcatacactgtacagtataccgcaaaaagctttcagctttcaagagctaatagagaaattctgcagcaagctgaatgcaatattcaggtttggtgtatccttctcagtgacaaagtaccttttaggatgcactggcctttacactctgacatgcaagttaatggtatttatgttagggtggttaacaggcaacccacacaaaagttaggggccaatggtagagacgatggtccactattaacagattacctgaaggagggacctaacaagatttctctatcaagaaatgacactcgtactttctgtttgggtatcagaattgccaagaggagatctctagaacaggtcctaaatttggtgccaaaggaacaagatggtgaaaacttcgatgacgcccttgcacgtgtgcgtcgctgtgttggtggtggagctgaggcaaataatgcagacagtgatagtgatatcgaagttgtggctgattttgtctctgtgaatcttcggtgccctcttcacttgtgggaagcccaaaccaagatgagtgcagcggagggagatgttcagttcgaccgagattgatactagagatttcctcagattctgattagcacacatttgtgttggctgatgcctgcatgacttggagaaaaggaagggggtggatgtgatgctgtctaacgcggtcagcgaactggcaagcagctagaggcctctcctctatcctgtaattggagatcccatctctgttaggtggtagaacgtgacaccaggagcaacatatagagtggcataatagagctgaaccatatatacatgcagtgtaggcaattttgtaccatatatgtcatgaaccgaggtggcagttagttgatgtaaatatgctccctctctgtttttctatattattggctgaaaggagaggggaggatgcatgcttagtccggcctggttatttatcatttatttatgatatataatgaaaacggagtaccaggtaggtcgcagcggtagagaggtgcaaatctaatctaatcttgtgtcagacagggtcttcaaatcatatctttacttatgt

SEQ ID NO: 22040 - DNA, 2065 bp, Zea Mays
gttttcactgcccagagaccaccaaaggaaaaaaaggggactcgctctcgccaactcccctgctccacagccacaagcccactcggatcccaatccgagccctactcgtcgtcgacgacgcgacggccccgcgtgcgaagccagccagccagccagccagccatcgccgtggaccggggagcccggagggatggaccccgagaagcgcggctacgagctccaaaattttgtggcgcatgatgcggaagttaggtccctgtctattggcaaaaagtctaggcgtgtgttcatcaccggtggcaatgatcgcaaggtcaaactgtgggccattggcaagcaaactccacttctgaccttgtccggccacacaagtgcggtggaggctgtgcagtttgattcagcagaggtgcttgtgcttgctggctcgtcaaatggttccatcaagctctgggacttggaagaagctaaagttgtgcggtctctcactgggcacaggtcaagttgcactgctgttgaattccatccatttggcgagttttttgcatctggttcgtcagatacagacctgaagatatgggacataaagaaaaaaggatacatacacacatataagggtcacagaggagcaattaaaacaatcaggtttacgcctgatggacgatgggttgtcactggtggggaagataacattgtgaaggtgtgggatttgacagctggaaagcttctacatgatttcaagttccatagtggacaaatcaactgtattgattttcaccctcaagaatttttgcttgcaacaggctctgctgataggacagtgaaattttgggatcttgaaacttttgaattgataggttcttctggacctgagggtaccggtgtacgttctatggtctttcacccagatggtaaaacccttttctgtggattagaccaaagcttaaaggtattctcttgggaaccagtaaggtgccatgatgttgttgacatgggttggagtaatttggctgaccttagtatttatgaagggaaactcttgggatgctcctaccatgagtgccgtgttggtctatgggctgctgatatatcatctatggaagataatcctgtgaaaccagttgatagcactgcaaattctcgtcctgcttcagcaatggcacattcaagaagttcatacaaaatcaaggagtctgggattgctcaaagcagggttcgtggctcacatttgactccagcaagtacagataagaccaagaaagataggagcagcactattccacgaagacctgattcgtctttaaagtcatctgttcagagtactaccctgatgaggcgtatgaagcttgttgatagtccttccaccaacacaaaaaatgtggaacgtaatgttgggcagagagacatttcattagcgtctcgtgcagtgatggctaataattctgcaactgctaagaaaagcaatcttacagaatcagctttagtgaaagatatttacactacatctcaggctgtttcagcacctattgttgtgcccagagacattttagaggacaaaacagtaagcaatgttcgtcgagggactggagagacagctgcagtcccagatgattttcggatccctgttcacagaagaaaaccctcacttagtggcagtgctgctgatagtgatagctcatcaagatcagtgttcactgaacctgatgtttgctcagagggtttgtctagcttaaaattctcctttgggctaactccatatcacaagaaagaagaatttggcgatgtggataatgaaggtattgcacaaatagcagaaaagatggaaagaacagtgtcgctggaccattctcagcagttaaatgatgataaatcctttgaatcaccatgctcaacaacagagactgccaaggtcaaatatgttagaggagttgctgtgccactggggaaaacaaagtctcttgttgagagatgggaaaaaagagagacttctagcactgattattcaccacaaactggttcttgtggtgatcgggcatcgagaaatgacaaccatccattccatctgcag

SEQ ID NO: 22041 - DNA, 594 bp, Zea Mays
tacacatgtgtctatcgaggtctccgttggatctgtccaaaccatctcaaccagtgttggacaagctttttttttcaatcgaaagttgtgacacggatcccatgtatgtggaatggaacaaaaagaccatgctacctttttgctagaaagttctacccagaatctctgaacaacttgctgaagctattttccagttacacatcggcttgattcaacattttttttgttcatttggcctaggagattcccctagttttttttttctgcttcatgtaaattgtgaaattgatacttagaggcttaacacagagttacgggtacagggccagtgatgtaattctgtgagtcccttggtagggctgaggtgctgtttgtttagtattgacctgccctccctgtcgttcttggtgccgtctgttaggttcctagcgcccattccctgagtaacagggtttttgtcagttattactgattaattctttgtagacatgaagagattacgaaatcagttacacttcatagtttaacctggacttgtttcgagttctagtggcagttgtactcttctgatgagtacggcatcatgttctcatt

SEQ ID NO: 22042 - DNA, 188 bp, Zea Mays
cgtatatagagctgcaggtctggcgagctgacgcaagtgacggagatagccgcgtatggcagcagggcatcgacagtctatggatttgggtgttttatcgaataggcgggatgcgaggagccgagcaatcacttgaacatggtcgacggtgaggtctgccgggagagaatattggcacacgacgcggc

SEQ ID NO: 22043 - DNA, 2014 bp, Zea Mays
gcgtgtgtagtgtgttctgctgcaaaccagcaatgcgacctctctctaatcttttgtgaaaaacgtctatgttttttttgctgacgacgcggcatattccgcctccctccagcggagaactcctcaaaactgcacgcagaaaacagatcaattgtagtcactgcctattcttggccatacggctttccccacaccccaacacaaacaagagaaaaaaacaaaaactagacgaaagagggaagaaaccaagaaattggcgaatccctgacgctccccactttcaactcccatccgcttgccgttgccgcgtttgtttatcgagccaatttgatcagggcgccacaccgaaccctagttcttgatttaatcacgggttgtgtggtcatgccggccgggtcaccccgttcttcttctcttccacgagttcaggaggtagagtgagagagaacatggaacgacaggggatggagggcaacaatcttctgcattttcttgataccccgagcgcccattacagaaggacatgcgacggatttgaggcccaacacggcggcgatgaacactctgagacatcagatactgatccggcgaatgcaagggaaatgctggaatatttgttgaaccaaccagcaaacaaaatctgtgcagactgtggctctccagatccaaaatgggtggccctgccttttggcacattcatctgcattaagtgctctggaactcatagaagtcttggtgtgcacatatcaaaggtgatttcagtgaatctggatgagtggacagatgatgaagtcaactgtttagctgaatcaggcggaaattctgttgtgaactcaagatatgaagcctttttacccgaaaacaaaaagctaaaacaagattgctcaacggaggagcgtaatgattttatcaggaaaaaataccagtttcaacagtttgtgtgtgatccacaattttcatgccctttaccacttaacagaaagcatgcaccaccagataaaaatcaccagcagcataatagcagcaagtatggttttggccatacttttaggaatagctggagaaaaaaggattcagatagcaaaagcctaaagaaaatgtcggatgtgggaatgatagaatttgttggattagtaaaggtcaatatcgtaaaaggcacagatttagctgttcgtgatgtgatgtcgagcgatccgtatgtcttgattcatctagggcaccagtccatgaaaacaaaggtgataaagaacacactgaatcctatctggaatgaaagactaatgctttcgatccctgacccaattccgcctcttaagctgcaagtatttgacaaggacacattcagctccgatgaccggatgggggaggccgaggtggacatccggccgctgattgcagcaacgaaggagcacgagaactcgaccatcaccgaatcgacagaactctacagatggtcagccagcgaagacagcaacggtgtgctcgccaaggacagcgtcatctctgttgcgagtggaaaggtcaagcaggagatcacactcaggctccagaatgtcgagcgcggtgaggtcgagatcgagatcgagtgtgtgccgctcagccagtagcagtcccatcgtgagcaggactggaagcagaaagagggaaggaatacatcatgctccattgttgtgacaaggacactgctttgcaatgcagaaagacctcagcttcacttgtttgattgctccatgcctgtaattcgcgtgcatgtgtgagatgtgtaatgtgttgtacggtagataggcaaagggaaattatctacttatattactttgatgataggcatacggttgaactgtttccagtagatttcctgacctcagttgctagctggtactaccaggatggtgaaaagatctgtatgcattttgcccatagacttggcttgctgcactggggaagacgacaatggtgaccgacaaaacagtcctacaacggttagagacaatttaaaaaatttaaaagaaagaaa

SEQ ID NO: 22044 - DNA, 801 bp, Zea Mays
gctgggtgaaggtggaaggctgtcgagctcgctggcaacagtctcgcctctcaaagcctcctcccagattagtccctgctgacctatgtggaagggtgttcttatgctcaataccgtcctaactgtgagggagcatcaagccaactcacatgccaagaaaggatgggagcagtttacggatgaggtcattaagactatatcacaaaagaaatcaggattagtattccttctttggggaaattctgctcaatctaagacaagattgattgacgaaacaaaacatcacatattgaaatctgctcatccatcaggtctgtctgcaaacaggggtttctttggatgcaggcacttctccaaaacaaacgagatcttagagaagctggggctgtctgccatcgattggcagctctagaaaaatcccaagacgacatgtgatttctctgtttgagcttgacaaccaccgttgctgtatggagtggagcagaagcacatgcctcaagggctatcatattcggtcaagattatgtggcgactaaagttgttattcatacatggccaatatggatgtgagtgcttaacgcttcttttgtgccgtgtcttatcctgctttatttactttggcactgtaccagcttgttgcggccattgtggttgtcgtgcgtacgtgcaactactttgcttggcgctaggacacgcccatttgggctgccttgctagatctaagcatctgacgtactagagcttaaccaaccaccctatatatatgcataaagggcctgcctctacggctctaccttccgc

SEQ ID NO: 22045 - DNA, 2806 bp, Zea Mays
cttcgctccccccctaccctcgcggtctcgcctgcgcgtcccctccctttccctttccacggccgcatccaccacctccgtttccaccccacttgatagcgacgccgccgcacaggaactcaggaacccctctcgcatctcccctcgcttccccgcgacagcgacggccggtcgcttcaagtgacccaagcacctgcgcccctcctttctccttttctcccctcggcccccgtccctctcagcccctatgacctcttccgcttccccgaaccctagccccgtcccagtccccactccgatcaccaccgcgaacgggaccacctcatcaccgaaggatcagccgccgcctccgcctccgctgccgcagcagcagcagcagcaggggggcggccaggaggaggcagaggcggcggatgggggaggcgccgaggctgcggaggcgggagtattagctggtgttgcggccgaggctatggaagtggatgggggctctggcgcgggggatgcggaggcgggcggctcggtggggggaggagtaggcgctggggcgggtggaggagcgcagcaggcctcgccggcgaccgtgttccggattcggctcaagcagtcgcctgcgagcctccgtcacaagatgcgcgtgcccgagctgtgcagaaacttcagtgcagttgcttggtgtggaaaactgaatgcaattgcttgcgcttcagagacttgtgcacgtattccaagctcaaattcaagccctccattttggattcctatacatatcctgaatccagagagaccaacagaatgctctgtattcaatgtgaaagcagattctccacgtgactttgttcagttcattgaatggtctcctcggtcctgccctcgtgcattgctagtggcaaattttcatgggcggatcactatatggacacaaccaacaaagggtcctgtaaatcttgtacgtgatgcaagcttgtggcagtgtgaacatgaatggcgtcaagatctttctgtggtgaccaagtggttgtctggaatttctccgtatagatggcttcctacaaactccactagttcaaacctgaagaccttcgaggaaaaattcctcacccaacagcctcagagtgcagtgggatggccaagtattctatgcgtctgttcagttttttcatcaggttctgttcaacttcattggtcacaatggccttctcaaaactcagcacattctagatggttttctactagcaaagggcttctaggagcaggacccagtggcataatggctgctgatgctattgtaacagaatctggagctttacatgttgctggggtaccccttgttaatccatccactgtagttgtttgggaagtgatgccaggtcttggaaatggtattcaggcaactgcaaagataaatgcagcaagttctgttcctccatctctgaatcccccttcatggccgggttttgctccactagcagcctacctattttctttgcaagattatcttgtttctgagggtgcacagacaaaaaagctgacagacaataatgagactactgaggctgcatcaattcattgttgtccagtttctaatttttcagcttatgtcagtccagaagcagctgcacagtcagctactactaccacctgggggtctggggtcacctcagttgcttttgatccgactcgtggaggatcggtcattacagttgtaatagttgaagggcagtacatgtctccttatgaccctgatgaaggaccttctatcaccggatggagggtgcaatgctgggaatcttcgtgccaacctgttgttcttcatccaatatttggaagccctactagcttaggtgggcagcctcccatgcaaactgtttggtccactagagttaataaaagcattccaccaacggaggatcttaaaaatcctcaaacatatgttccgatgccaacgacatcagatgaacggagctcctctgagtgcagtgttgacagggcgaacagactcagctttgacccttacgatcttccaaatgatgttcgacaactagctcaaatagtttattctgctcatggtggtgaagttgctgttgctttcctccgtggaggagtgcacattttctcaggtccaaattttgatcaggttgacagctaccatgtcaatgttggctctgctattgctccaccagccttttcatcaagcagttgctgcttagcatcagtttggcatgacacgctcaaagatcgaaccatattgaagataatacgtgtgcttcctcctgcaattcttagcacacaaacaaagatcagctcagcagcatgggaacgtgcaatagcagatagattttggtggagtttattggctagagttgattggtgggatgctgttggttgtacacagagtgctgccgaagatggtatagtttcacttaacagtgtgatagcttttctggatgcggacttccattctcttccgactatgcaacagaggcagcagcactgtcctaaccttgataggattaagtgtaggttgttggaaggaacaaatgcccaagatgtacgggcacttgtgttggacatgcaagcaagattacttctggatatgctaggcaaaggaatcgagtctgcccttacaaatccatcaactctgctacctgagccctggcaagcttccagtgatatgttatccagcatcgatgctgacaaaatgactgttgagccagctctgcttccaaacatccagcatcacatttcataactcgcttgcggcgttatgcgagtttctgtcgaactctggcgagccatgtggggc

SEQ ID NO: 22046 - DNA, 1185 bp, Zea Mays
agccgtcgcctctccttgctctgctcctctctctcccaagcggctctccctctatctcctcgtttctctcccctcctcttctacagccgctgccaggcaaccgaccgccgagcagcgcagccacccgagccccacgcccgccgcgccaggaaccagcgcccctgctctcgccaggacgccaggaattgctctttctatagcaagtttatgagttcagtttatattccattgaatatttgttgcagtgaagagaaatgagagaaagccttcggttgtagccttcagtttatattccattgaatatttgttgcatccgactcatctctgtttcgattccatccggtttggctcattttttaatcgagtgtgttgtagttttgtaccctaatgtcgtgggagtgctaccgaagtactgatagcatcactttaatttcattagctccgtcctggcaatcactttgggaaggtggtcagtggaataactttgcttaaaaagcttgaagcagttggtagtgaaactggaaatccttcttatcaagtgaaaattgtagactgtggtgaagtttccaacacaaattctcaggatccgctaaagggagataaagtaagctcaaagacagataacagcagttcagacagtgaaaagggtggccatcgtaccaagcgttccttgacgaaaggcttcaatgcagcagttgctgggtgcttctttgccattgaaactgttggaatggctgctacactagcttcagtctgttcagtcccattgacttcagtactgcttctctttgagctgacaaaggattacaggattttgcttcctctcatgtgaacaagggagaatattgtgaactgaaggtcatgtatcagcgaaaagcaggctttcctcttgtagcaattgtgcactgaaaaactacagtgcccttatgacaccacaatagtaagcaagactacaggacatctatgcgaaatgcagctagccagctacactgatgtagagatcattcaggcagtttaacctctatactgtatcattttaatttaaccagctatttcactactgccttttatagtgtttaggttataaccaatgacatctattagagtttataatttaaactcattgattgaaaaacatttagttgtgatgtcactaaaaggtgaaataaatttcttatagtgtgc

SEQ ID NO: 22047 - DNA, 1315 bp, Zea Mays
ctgtgcactactgttcctgatgggagttttgagatgtcccatcaacaagccttagcacaagtaacagcacaagcagttcattctcagtacaatatgataaatcacacagattacagtattcctttttcgtcgacaacagcaccagctttgatcacagcacagcatgccaattcttctgccaatgtggcatcagcacaggagaaaccagctctgccgtcacatgcaggtaatagcaacattgaatcaaatgaggtttcacaaggactcaaaacttctgcacccacttttgataaacctgctgacgatggatacaactggcggaagtatggccagaaggcagttaagggtggcgagtatccaaggagttactacaaatgtacccacacgagttgtccagttaagaaaaaagtggagcgctcagcagaaggacacatcactcaaataatttatagaggtcagcacaaccaccagcgtccaccaaaaaggaggtccaaagatggtggtggtccactaaatgaagcagatgttcttcatgagaatgaagacatttcaactagatcagaacctggctctcaagaacactctggaaaacatgaagggtcaaatgatggcatattagggccttctgtgtcaagaaggggaggaggagatgagcaattgtcaggctcaagtgatagtgatgaggaacaagatgatgaacaaagggctggcgacgaagaccctggctatgcaaatgcaaacaaaagacatgtgccaactccagctcaaaggataattgtgcaaacaaacagcgaagttgatcttctggatgatggctatcggtggcgcaagtatggacagaaagtggtaaaagggaatccctacccgagaacccacaagttatggaactataacagccttccatgaatccacccacagttttagcaacaaatcaaatcattcgatacccatgtaaatcccaaacatggacatcagacacatcactgctctatggtgcagctcttagggtctggcacaatgtcacatcaatcctttatatcttttgaaagttactccataacccattaaagtcctggcgatgttgcagttgctgagaaaaactgacactttctctgatattcactacattcaccttcagttcatttctttggtgttcagttagaacctttcagattcctttttctttgggaccagaaaggatctttcagaaattgataagctttagtatctctgatccaagatatgtaattttagtacctgtgttatcaaacaattttaactttggccatcagtaaaaactacttttcacgatata

SEQ ID NO: 22048 - DNA, 2739 bp, Zea Mays
gggccggggcccgaatcaagtttagtcctcgggagccctcgcgtgcgctctcttttcctgtgtctgctgccgacgaaagggcggccgccgccagacctccatcttcgtgaccttcgtaggcggcgagcacccaccaggcatggcttcacgcatgacaccttccaagaggccttttcagagaagatcttcagactacgatggccggggcaagtggcagaagacgaagcacccttctccacataaatctcagttcaaaatcgagcctggtgttcccattttccgtattctctgcccggcttcaaaatctggtaatgtgattggcaaaggaggtgccattattgcaaagatacgtcaagaaaccaggatgagaatcagggttgatagggcagcccccggctgtgacgagagagtcatcttcataactgctgccaacaaggatgaagaagctggcagcgagcaaggcggagagaatgacggaggtgctgctgcttctactggtggtgaccatgagaaggataaagataacaacagcaaggagcaaaacgttgatccagaggagaacaactgcaacgagcagaatgatgattcagagaaaggaagtggtaaggaagaaatagatggtttcgagaaagaccatggtacggaagaaaagaatgattcagagaaagaacacaataagggagaaaaggatgatcccttggttgcgaaagttacaaagttagaaccagagagggtaataccgttggcactgaaggccgtttcacttgtattcgataggatttttgcaactgaaggtaataatgaaactgggaacgcatctgctgcaagcgctcctgtttcgttgcgaatgttggtgctatacagccaagcaggttggctcctggggaagggcggtagtgtggttaagcaaatggcagcagataacggctgtgaaatccgtgttttgaaagacaaccttccgtcatgtgctctgttgaatgacaaactttgccagatcactggagagattgactcagtaaggaaaggtctcaatgctgtatctgaagtgctcttagctcatccacccaaggaaactgatgcagttgctgatgttcattcttctggatcatcgtcacgttctttgttcagccagcctgatggtcttccctctggaatgcaatctaacttccatatacctttgcaaggcccgccatcccaagccaatggaccttttgatatagttgatcttcaacctccaatacatggtcatgcctcagtggctatagaatccctctcctttaggatgctgtgtccacaagacaaggttggcagtataataggcaagggtggaaatattgttaaaaccattcaaaatgatacaggctgtgaaattaaagttcttgacactgttccaaaaacagatgatcgcatcataagtatatctggacctgcgcatccgagtgatggaatctcccctgcacagaatgccattctgcatgtgcagcgtaaaattatgttacctagctctgataagaaggaaggtcctgcaacgtgtaggctgatcgtttctggaaaccaagttggttgtgttctcggcaagggtggtagtatcatagctgaaatgaggaagctgtcaggagcatttatagtagtgttgagcaaagacaagattccaaggggtgtcccagagcatgatgaagttatccagataaacggaagttgtgaagctattcaagaagctctaatgcaggttacagctaggcttcgtaaccatcttttccgggacagaatgcctgcagtggggcctaatatgcggccaccttttggtttgttagatccccagtttggtccattttcgggaaaccatgaatcatcatccctgtttcataaagatttcatgggacgaccattggatgggattgctgctccttggacagtgaagggcatgcgggatctcagcgatccagtgtcaatatccgatatccctggagcagggcatagagaagctggtggatttccaggtcctggtcagccatctatgatgccaaacttgactgcagaggtcttggttccaagattagttatccctgttctctgcggtgaggatggaggttgtttggacaggatccgtgagttttctgaagctaagataactgtcgctgagcctacagccgatgcgatggacactgctgttttgatatctggcacaccagagcagatgcatgcagcccgaagtctcgttgaagcattcgttatgagcgaatcttttggcccatgacatgtccagaggcagtgaagctagcgatcatatgtgggttcatgtttgtgaatatgcgtcccagtctgtctgcagagtgacatatgctccaagtggctaattaggctgaatattcgactggagtcctctttctgtctgcagagtggcaaatgctccaggttgctagttatatataatcttccaaagtcgtcactttgactctgagatacggagcacattttgagtagccgcagaactatgttgcttatgcaaggaagtattgtttggacccggaaaggctctaactttatttttgttgtactgatgttgtgagatgtaccaccattgtctgtatttcagtccggctttatatctgtattttatggtattgctaccatagttaatatgacggtaaggcagcgaaaaggcgtaagccggggaatattaaatagtagaaatctttatctttatatatactaatataatgaagcagatgcaaactc

SEQ ID NO: 22049 - DNA, 545 bp, Zea Mays
atcctccctgcgctttctcggtctatggccgctccatttgtccggcatgcctcctcctcccgctccaccacctcctccctccgcatgccacgcctcctccctctgcatgccacgcctccttccctctatcggacgtcacgctaggaacaaggtgaagagcgatattgaggaggccatagggtcaggcatggaggatttcgttctccatatcgggccaaaaggacagaggtgagctcctacgacgttccttgctctcatccatggaggtggtggtcgagctagccgacgcggggtgaggctcctcatttgcatggggcgggcttcctcgttggtgtttgatctatcaaattggtgtctgcttcaaacttatgttgtttacttattctatatttgtatgtagtatcatctctattgtttttagcagtataaattttttatttgtagacacttgatgtcgatgttatctatgacccaaataaattattgaaggaactgttcaacatggcaatgttaatgatccgtatttgtataacacttagttctta

SEQ ID NO: 22050 - DNA, 909 bp, Zea Mays
ccttgacctagcgccgccaccttctctcctccccctgctcccactcagccgccgccagggactccctctccctcctctctcctctagcttctctctcttctcccctccctgctctctcacccaggcgcgacgccctgctccaccgcgtccccgaccgcgcagagccccatcccgagcagcaccgaccgcgcgcagctcccacaccaatcgaccgacgcgcccaggcgaccccggctggacccgaagcaccgcgccctatgtgcccctgcacccgacgcgccgccagggccaagcgcccgatgcctcgccagggagagcagcggaccgcgcccagcgcctagcccgagccgaccccgacgccgccgagccacaaaccgttccgtgccggccgttcctccgcgttaatggagtttactgcagccgtaactcctccctccattgatgccgacaccattattggccatgaagcacctccagccgacccttcatctctctcccatcctctataaaagggcagccgagctcctctcttctccctcccacaactgagctctcttcctccccgagctccctctctctcccactcacccacgccatcgccggagttcgtccacgccgctcgccgtcgtacctcgctgtcagaatgctcaccgacgaccgtgcccgttctttgcccgccaagaccgccgtttatcccaaggttgaagacaaccccaaattgttgacgtattttctaaatcatgttttgaatttatggatcttgtgaattgtccttgtaatattgatgcgatcttggcaattcgtgtatgattttagagatttgcgatatatacgtgaaagcaaaatcaaaccccgcgacaatattttaaatatgcgtatgattttataattctaaaaatgaacacgatc

SEQ ID NO: 22051 - DNA, 2440 bp, Zea Mays
cgcctcgagggcccacatcgctctctcagccatcacaccaccgcctcccccgtccccgcctcgccgccgccgccgtcgtggcctgccggcctccgatggcgaagacccgcatgcctgcgtccccaccccccgcagaaacgccgactccgcagcggcggcgcaagaagaagggccgcccgtccctcctcgacctccagcgccgcagcctccgcctccaggcccaaaaccctagccccgacccctcgcccacccgccgggagcccaaccccttcgacgacgatgaggacgggaccgggagcgggcggcggcgccagaagcgcttcaagagcgtcctatccggcgttgttaaggaggagctgggggagggggagaaggatgccgcgaaagcgacggggaaaggggacgctgcgtcggatggtgggcccgcggggactcccctcccagacaaaaagttgctactcttcatcctcgataggctccagaagaaggatacttatggagttttctcggagcctgtcgacgcagaggagcttccagattactttgacattattgatcatccgatggacttctcaacgatccgtgagaagctgttgaatgactcgtattctaagttggaacagtttgaggatgatgtatttctactcacatcaaatgccatgtcttacaattcagcagacacaatctacttccggcaggcacggtctattgaagctcttgccaaaaaggattttgagaacttgaggcaacccagcgatgaagaagaacccaagccaccagctcgaagaggtaggccaccaaagaatccgaagatggagggtgatgcgtcaccagacctatccaatatgaaaacaagcaaacctgaagacagtatcgatacattcaggaaaaaatcaactggagatataactcgaaatacaaatactacgatgaaagagccatccagttttcacagtatgcttggttcttttagtgcaaaaagagcagataaaatcggtgattattcaggttcatccaagtggggaaagaaacctgttggtgtagatgatgaccgcagaagtacatatgatcagcactattcatgtaatagctctctgtttgctgccctggacgacgggaggaaactactagtgccagtaggggttcagcagcaacatgcatatgctaggagcttggcacgatttgcatcaaaattgggcccagttggctgggatgtgacagcaaatcgtatcagaagggcactaccccctgggacaagttttggcccagggtgggttgtagatggtgaaccacctcaaaactctcagcggggtcctgtcgcatcaaccgacccctcctctgaatccactgatccacccaatatgccatccaagaatgatgtactccaccagaagtgtgggctgtcttcaaatgggtacgttactggtgaggagcatttaactagaactcaaacagtggcttctacatcagcgagctctgaaatttccagcaaagtaaacaagcttgagaatggggttaccaaatcatgtggtggtatgggcaatacgggatcagcagggcctccaatgcagcagctctgcctacgcggtccagaaatccgttctaacatcaatggctttcctgctatgtcaaacgccacgagtcagtatgccgggcaaggtttgtttggatcaggcatccctatgacacacgcccaagtgctggggatgttttctggaatgaacggcaaagccaatggctatgtccataggcacccagtggctgctgatagtcttaaaacagcagcgcagaacggagatgtcggaaaggcagctgtcaaccctgtgcaaggtgcaggtcatgatccaaagattgccaacggtaatagttctgctcacccaggcttaaattccggtgtccagtcgtcaggttccccacctaggcgaacgctggcaaacccaaagcaccctgatctggccttgcagctatgaggtagccattgacatagtttgccttagtactgtgatctgtgacagaggcatgagttcaacactgcttcgtccggtaccttgccaagcggagcacgagaccgatcgaagaggtaagaagtgtttggtttgtcgtcagagagaggggtggcggcagcgggacatcgtgtagggtccctcgatttaattgatcatttgaccccctgtgagttgtttgtaaaagggtagggtagcttctgtacaggttctaatcttactggagatgataatgcttcggatgaaggcagcgcccgctgtccagcttgtaacattattgatagtagaaagaagaggagggaagcatacaggcgaaaaggcagtgaataatttgtgccttttttgttttgcccctcccccccccccccccccccccccccggccctgagttgacgcactccgtttccaaatgccatgtgatgcgcacaatgtctgca

SEQ ID NO: 22052 - DNA, 1815 bp, Zea Mays
cgagtctcggagccatgcaactttacatcaagatgtgccaaggaagctcttgaggtggtccacagaaaatagctcaaggaatgcatgtgaaaggtctgggttgaatgaaaataatcaggacattggtgattcttcagaaaagcaggagcatctcctggctgtgccaggtgtgattctcttatgctgtggccttatgttaccatgctttcatgctgaaaggaaagaagtcagcaggcatgacaatgcaaccattcagcgcaacgcacttgaatcagtttcatcctatgaaggaagcatgtcatctgagaaagtcccaccaactccacatcgaatacctccaagtccctctagatttgcgccgtctccacagatagctagagttggatctgtcaacttaagcatccagcagatcctcagggcaactcagaacttctcaccttcatttaagttaggtgaaggaggatttgggatggtctacagggctgtattgccagatggcaatgttgttgcggtcaagagagctaaaaagtttgcaggtcctagggatgagttcagcaatgaagtagacttgcttgctaagatagaccaccgaaatttggtgaggttactgggttttactgataaaggaaatgagcgcattatcatcactgagtatgttccaaatggtactcttagagaacatctagatggtcaacatggaagagtcctagattttaatcagcgtctagaaattgcaattgacgtggctcatgcacttacttatcttcatctgtatgcagagaagactataattcatcgtgatgtgaagtcatcaaacatcctgctgacagatagctatcgggccaaggtgtctgactttgggtttgcaagaagtggccctagtgacacggagaagacacacatatcaacgaaagtgaaaggcacagctgggtacctggaccccgaatacttgaggacataccagctaactccaaagagtgatgtcttctcatttggcatattgcttgtagaaattctttctgctcgcagacccgtagagctgaagcgaacccctgaagagaggatcacaatcagatggactttcaaaaaattcaacgaaggcaacacgagagagatactggacccattgctggaagatcacgtggacgacgaggtgcttgaaaagctccttagcctggctttccaatgcgctgctccgacacgggacgaccggccgaccatgaaggaagttggggagcagctgtgggagataaggaaagagtacggaaagagtgttaggaaggtgtgaagatcatggaaaacatttccctgtttctcaagactttccctggaccaaggggactaagggggtgtttggttttatagggattaaattttagttcttccattttattctatttaagtccctaaattaccaaacacggaaatcaaaactttattttagttttagtatttggtaatttagagacttgaatggaataaaatggatagactaaaaataagttcctagaaatcaaacaccctctaagcatgcgaagtatttgtgcccattggataaacacctgatcatctatgtttcttggaagatgtgacctgaagaaatgtacagtgcgataacaccgccatcagtttgtgctttcttgtctcagtttgcagtgcactccctctatggagaatgtatattttggagttctcgcatttcttgattctgttgatatggtattctgatggatgtacccgcatacattactgcaaacggtctgaaataatatacgaagggaaattgtttgtattggaagacactgaagcttccgg

SEQ ID NO: 22053 - DNA, 1270 bp, Zea Mays
gactcctcgttggagttaataaaatcaagacgatttgctgaagctgaaatctggcaaaggaagatattacatgttctggagctttcagagggatgggattcattggtcactgcacgtgcagctgaactcctaagtttaaatcttgaaaccatggagaagttgaaggaatcagaagagctattggaacgatgccttgcagtcaagaaaaagattctacctgaagatcatcttcaggtagcttatacgttggtacacctggcaaggttaacattgcacagagttgtaaaggatcgggatgtaaacagcgatgtaactgcatattacctcgcaaaagcaaaacagttcagcaatgattcaatcaggattacagaaggacaattaaattcttcaagaaaagatcagaataaaattaacaacacatcaactgcagatacagataagagtgcagcaataattctttttcaagcacttcatgtttttggactcattgatattgcagcgaagcagttgctagggcaaggggagcaagactataattctgttcaagatgctctgcagaagtgtgtttcactttacaaagagcctcatacacgaaggttggtgaaaaatgctgccaagcaggactacatgatatgcctgacgagcctgatcgatatggttcagagcttgtttcccattccacacataccggggttgcaggagttgctttgcgaggccgaacaaattttaggagagctagaagaagagagtactaggaagaagcaatgatacgtaggaaccaacacccatatgggtggaagcatttgttaattgcaagttgtgagccatatattttttcagttggtcgagatcgcccacctatatgggtggaagcatttgtttgacgaggtgctgaatcgagtgacgggttaaagagtttaatgcttgtttgcgcagtggtgttatgacgtggtcttcaacatagagtcctagtttctcggtggtggtggtccacaagatagatcatgttgctgaaatcttggatgctttctaaatcaaaatccttgacattggcgaccaaaaaaaaagatccctatcaatggcggatggccaaactgaaccaaggattggttttggcatagaagctcttcctaaaagttgtgctggctgtttgcgtaattcttttagatattgtggtcttagactatctctagcaacttactcatctttatctctatatttaaactccacattataaacaatgcactttacaatacaaaacaatattttg

SEQ ID NO: 22054 - DNA, 1408 bp, Zea Mays
gtactaactattaagggggcagtgtagactgcccccgctccctacccgcacgcgccagcgaaatcccgccccacaacggcctcccgcaccgcacggccgcgtgccacagagcgtacaccacccccgcccgccctccgcctgcccgccctccaagctcagcctaccacgctcgccccctgccagtccttccgcgaatcgggtgtccccaacaatcccgcgcacccgccgcactcgggcagatggagcgcgaccgccgcgccgcacgctccgacttcgtgcggttccgcctggtgtgcaagctgtggatggacggcagcggcatcaggaagccccgtgagttgggcgcacgcgtcatcgaccacagcttccaccctcgccggtggatcctgctgacggaggagaaggaggaggctgatgaggcgacgcccacgcccacgcgccgcacgctgcttaacctcaccacccggaagaccatccaggtggatctgccggagctcgctgggcactccgtggtccccggacccaccgcggcgccggagggcatgctggtggtgcgcgatctgagaaaccgttggggctgaagtgggaatgtgacaggcatgcctgcatgtgccccgcatgatgtctactgcctcacaggtttcattgcttttcggtggggggaccggagagcaaccgaatttgtagtagtagtactgaacaatctgaatctcagatgaaaccatagaacatgtttcccagtctgcaaaatgcacaaggcttccgtctttacagacatgcgttcaacttccaccgaattgctggtagtactatgatggaacaatttggttgacataggcctaggtgtatgtctgcaaaacgcttttttaaggtcggtctcaacagcgagtttttatgatacattgctggacatatgtactacttcctggaagatgtatacccacgtatgactgggcgtcgccccctgaagacaccgtcctccatcaaggcgttatttgctgatgacaatgttgtggtggcacagccacctaatgctgggattggtgctggtgcaaggttcggtgctattggtgtagatccccaggctcaatgatgaattactttcagtgacttgagggccgaggctgtgactgatctggaatgcggcagtttgttttctctgcgcaaactgcggaactggcccggagtaaaatggatcgtgatgggcaaacaggccaacccctgttgcagaaacttgttcatgtgacggtttaacatctgacctgctaccctttcatgcatcggtgagtttagtctaggaaactgtttgaagcggggaaatttggtgctttggcagcgagaatttggatggagcgttgtaattgcagaacggtgaaggaatgactcctaacattgtggacgcttggat

SEQ ID NO: 22055 - DNA, 3238 bp, Zea Mays
aaaaaaaacagaaacccgttacccgactcgactcgtctcttcccctccagtctccaccgagccaagccagcctgctccagcggcagacccgctaccgatctcctctgccgcggcccgcggcggcggcgatttcccctccgcgaatgccccttcaccgctgcagttgatacgccacccaagtggttcgttccacccttccttccctcgccggtctctccatcgccgcagcccgcagggcgccaccttgtcggaaggcgcgatccatggaccgctcgatcaacttccgcggcatcgccgggagcgccggaaacatcatgcagggaatggggaaattcgttttcggcaacgaggggatcgagtcaaaggaagatagctacgtcgagagatatctttatcggataagcaatggcacgatacctgatgaccggaggtctgcaatgactgagctgcagtctctagtggcagaaagccgctcggcacagatgtcgtttggagcgatgggttttcctatcctcctcaatattttgaaagaagaccgtgaggatgtagagcttgtgagaggtgccctggagacctttgtgagtgcattgactcctattgagacgtcacaagggccaaatactgaggttcaaccagcgtcagtgaactctgatctgctatctcaagaaaccgagaatatttctcttcttttgagcttattgtcagaggaagacttttatgtgagatactacacaatccaacttctaacagctctacttacaaactcgctgaaaaggttacaagaagcaattctattgattcctcgtggtataacagttctcatggacatgcttatggaccgtgaggtcataaggaatgaagcactgttacttcttacttatttgactcgggatgcagaggaaattcaaaaaattgttgtatttgagggtgtgtttgagaagatatttagcattattagagaggagggctattccgatggaggtgtagttgttcaggattgccttgaactgttaaataatttaattcgacacaatgcgtcaaatcagatgcttttgaaagagacaatgggctttgacccattgatatcaatactaaagattaggagaggcagtgcatttaattttacccaacagaagacagtaaatcttcttggtgctttaaatactgtggaattgcttttgatggggggcccatctggtgaagcaggtaaagacgctaacaagaatgcaaatcaaactgcattggctcagaaaaacattctggaccatcttcttttgttgggcgttgagagtcaatgggcccctgtcgttctccgctgtatggcactgcgatgtattggcaatttggtattaagaaatcctcagaatcttgattctcttgcaagaaaacaagttggagaagagcctcatgttcaacctgcactgaatgccatcttctctataatcttgcggacctctgtagcgcaggaatttgttgctgctgattatgtattcaagtgtttctgcgagagaaatcctaatggccaggcattattagcatcaactattgttccacatccgaaccaaggaaatatgcatgaacctgctatcgacatgccttttggaagtgtacttctgcaagcactggtttcaagtgatgtcaatggagatatggaggcatgttgcagagcatctagcgttctttctcacattgtcaaggacaacatgcaaagcaaggatcgtgtattgcaaattcagcttgagacacttacaccgtccttggggcgcactgagccagtattgcatcgtattgtcacatgtttgtccatcgcagcctcaacagagggagaaaacaaccaaaacaaccaaccagaagaaccgtacattcaacctgttattcttcggctactcatcatatggcttgttgattgttcaaatgctgttaactgcctgttggaatcagcagtgcatctgaactacataatagagcttgcttcaagcaaacgttacactgcttgtgttcgtggactggctgctgttgttctaggtgcttgcatcctgtacaatgctagccatgagaagggccgtgatgcttttgctgttgcagatgctataagtcaaaagattggcctcacaacgtacttcttgaggtttgacgaattgaggagaagcttggcacatcctttgccagagcagcatcatcgcaaggagctttcccgatcaagtgcgaatagcatgtcagatttccaagaaattgaagaggatgaaacaaataaagatgatcaacaccctgtcctctcagaaatatttgattcacagtttgttaattttcttagtaagctcgaggctgatattagagaaaacataatggatatatttagtcggacaaaaactgcaactgcactccttcctactgaattggagcagaagaacggggaggttgatggagagtatatcaaacgactaaagtcgtttgtagagaaacagtgcaatgagatgcaggacttgctggctcgaaacgcaatgttagcagaagagttagtgagaactggtggtggtaccaccacagatacttcacagagaccgaacaacgggcgagaaagggtccagatcgaagccctgagacaagaactggagggagcgagacgacagatagaggcactcgaaactgacaagtcccagatcgaagccgaagctaacaaccaacgaaaccttgcagtaaaactggagtccgatctcaagagcttgtcagaagcttacaacagcatagagcaggccaactaccgcctggatgccgaggtaaaaaccttgcggcagggaggcagtgtgccgtatcctgacgtggaggcaataaaggcgcaagccaaggaagaggctgagaaggacagtgaggcggagctgaacgatctgcttgtctgcctcggtcaggaacaaactaaggttgagaagctgagcacaaggctggcagagctcggcgaagatgtggatgcccttctgcaaggtattggtgacgacactgccattccggacgatgatgacgacgacgatgaagatagtgaagagtgatatgtttatgtaaccctgtaggtctgttggtgcacacaacctcacgttgggtcatgatattgtaatggcaattggcattgtacagtggataatgtgtagacaaaggcaccgttccaatttaagttatttgtggagaaactagttgaaaactaagtggcggaccgtccggtcccggacggtccacacctcgcgat

SEQ ID NO: 22056 - DNA, 2041 bp, Zea Mays
atttgcacagaggaataactttatcaacttgagaaggttgcaacagaaccagttccagtttcttgggataaattggctggtactaactggagcatagtaactacaagtgatggaaagaaatattattatgataacaaacaaaaggttagcagctggcaacttccgccagaggtgtgtgagatcctcaagaatgcggaatctggttccttaaaagaaggttcaacttcactgcaggatgctgcaactatagagaataagggagtaataagcattgatgcaagtactcctgccatacagacaggatgctggtgcttccagtgcgccttcagctctggctacttcatctgctacctctgaattgaatggatccaaaccagctgatgctgcacttaaggggcaactagtggcgaataatggtgagaaattaaaagataacaatggtgatgtgaatatctcagattcttcttcagattcagatgatgaggaacatggaccaagtaaagaggactgcattcgtcagtttaaggtgatgctaaaggaacgaggagttgcaccattttcgaagtgggagaaggaacttccaaaaatagtttttgacccacgctttaaggctattcctagtcactcaacaaggcgggctatatttgaccactatgttcgcacacgtgctgaagaggagcggaaagagaaaagagctgccctgaaggctgcagtagaggcgtataaagaattacttgaagaagcatccgaggacatcaaccagaaaacagactaccaagaattcaaaagaaaatggggtgctgatacaaggtttgaagccttggatcgaaaggaaagggagattctttttagtgagaaagtcaaggctgttcaagaaaaagtccaatcaatgcgcaaagctgtcatagctaatttcaaatcaatgcttcgagaaagtaaagatataacttcaactagccgatgggcaaaagttaaagaaaatttccgtagtgatccaaggtacaaagccatgaagcatgaagaaagggagactatatttaatgaatacatagtggaactaaaatctgctgaacaggaagcagagcaagctgccaaggccaaagtggatgagcaagccaagttaaaggagagggaacgtgaaacacgtaaaaggaaagaaagagaggagcaggagatggaaagagtaaaaatgaagatacgtagaaaagaggctgtgtcatcataccaagctttacttgttgaaatgattaaggatcccaaggcatcgtggactgaatccaaaccaaaacttgaaaaagatccacaaggtcgtgctcgaaatcctgacttaggccaaggtgatgcagaaaagttgtttcgtgaccatgtcaaggacctatatgagcggtgtgtacgtgatttccgggcacttctatctgaggttatcactccagaggtagcagcacggacaacagctgaggggaagacggcaatcaactcctggagtgaggcaaaaggtcatctaagatctgatctaaggtacaataagctaccgagtaaagacaaagagtctatttggcggcgctatgctgatgacttgacgaggaaactcagacaatcagacacgaaggagaaggacaaatcggatacagatgggaaacaacctaggtcctctgatccacctaggcggaggtagcttgtagtaacagtcacttgtacttcctaggtgctgctcctatatttcttactgttgatagttaagggtctgctcgcactcgtctgcaacatttgaatagtcactggctcactgccacttttgatactgagagtttctgtgttgtagggtgttttccttgcaaatgtttttcccgttctggatcagatgatatatttttgcagtatgagtctgacattgcagtaccgtgccaagttgcgtctcccatgctctcaggtctcagccttccatctttcaaacttcaagcccatttataggatctgtttcaccgttagaattctggcgacttcggctccagacctccagctcccagacagaggatagaga

SEQ ID NO: 22057 - DNA, 1190 bp, Zea Mays
attcgttcccattgtccacgtcttcgcgattaacataagaagagcaacacctctgcttaccaaaacagatgtgtcttgcgcctcattctctaccatgtatgtgtgaacctgcctgtcatgattttctcgtatcctgccttcaaattcatgggtctcaggagctctcttcctttgccacattggtcggttgttgtatctcaagttcttttctactttgtccttgaggattttatattctattgggggcacagggcattgcatacgaaatggctatacaaacacgttcacagcgtccaccatgagtacgccacaccctttggtttaacatcggaatatgcccacccagctgaaattttgttcctgggattcgccacagttgttggtcctgctcttactggccctcatctcttcaccctgtggctgtggatggtgttgagggttttggagacagttgaagctcacagcggctatcacttcccatggagcccatcaaatttcctgccgctgtatggcgggtaagtaagctagatcattgttttccttccccccccttaaaagagattgtgcttgtttatttgaagctgaacgtctggccatttgctgagcttttgtcatggtgaatagctcggacttccatgactaccatcaccgtgtgctgtacacaaagtcagggaactatgcctcaacatttgtttacatggactggttgttcggcacggacaaggattatcgcaaggcaaagaccattgaggagaaagaagggaaaaatctgtagattgtggaagctgctcagcaagactggcgatagagtttcactcatggaaggagatatggatgcaccctagaaacagtcagtttatctcctgaccatcgatactataggttgagatattgatttcctgtgtttgctatgatcaagaatgaggccctggtggccctggtctgtcatgaactgaatttgatgatttgtcatctcctcctggtggtttgctttgcgtttctttcgtgactcgacgggatgtatacatatggaatggcctggcagcagtaataaccatctgaattgagtcgtcagcgatggtgggggtagctttgcaccctagaaactttcctctgcacgcttgtgtattttgttggtaatcgattccggaattgcattgttcctcgtacacgcgcacacaattgatctg

SEQ ID NO: 22058 - DNA, 1000 bp, Zea Mays
atcctaacaaattccatttttctacctgcctgttgaaagaaatgtgaaagagataaatcgcgtgttcttgttcattgcatgactggaaaaaacaggtctgctgctattgttgcagccttcttgatgaagtctagagggtggagacttgcacaatcttttcaatgggtgaaagatcgaagaccacaggttcaactgacagatgcttctcagaaggagcttttggagtatgagctgaagcttttcggacccagtactcaaaccttggttcccactgaatcatttgcttctcttggatttggttatacaaaaccagcaggtgacatgcaaacgcctgtgttcaaccaaacgaccatgccatccatattcgagcgattcaacccaaatgatcgccccaccaatttcacttttggagttgagaggaaagcagaagctaaccctcgagataacaatagtgatggcagggtaaacccaacttcaacggagaacctgatggacagctcttaagatgatttcacgatgtcgctgttgaatctccttgttccagaagtaaacccgctgtaatctgcatgtcgcggaagtaaacctactgctcggtgcctcggtgcaccgaatacttatccggtgtctaggtttcagggaggttttgcccttgtcgcatgagaaatggttctctggaaaccgatctttgctttagaatgactgtatgaaatagatgtttgtggctcatctatctgttcctttctcgtatagtttctgattgctacatatgaataaggcatagtgcttaccagtcgggtcgtttgtttggtcatgtatatatgtagtcgtccgtaaaaggagagagatggagagatttttcaggtcggcagctggtggtgacgtgatgagttttagatctttagtctaacgcaacaggagattaagaatctagattatcacctttttagttcgaaggtttgagaattaatgacagattgataaataaggtaaacagttattt

SEQ ID NO: 22059 - DNA, 1618 bp, Zea Mays
accaattgattttcttcacccgtccacctcgtcttgcgctcctctgtctcggcgacgactgtgctaccgccgccgccgccgcaagacttcgtcgggcactttgccggcgacgatttcccaccagcccaacaggatcagaggaggtgatggcgaggagtgacagctgcctggcgcgcgtgggtgccggaattgctatcggtggcgcggtcggcggagccgtcggtaaccttcgtccctaaacccctaaacactaggcttgcagcatcaatccgtccgtgcgagccgcttcacccgtcggtgtttttttttttggttggaagtagattagtgtgcgatttcaggaatcttctcgagctagctagtagctacatccctggtttgtgtggttagctagcggcagatgtaataactaggtggcttttgttaagagttactagtgcttaggtagcatcatctggaggtggaagatatcgatgctcgagttggagtttgtttgcccccaattgcttgtgctctaagggctgttgctgattcggtctgccgtggtttggttaacttcctgctggtgcttagaacttgggatggaaaatgtaagattttgtatttgcctttgatttgactgaatgaatgacttctaatgtcaaaggcttgttcaatgccactttggaatgtaccgattagtatattcctgatttggattccattgtagcgtcaagatgacagcatttggaattgtctgtatgtcgagttactggtatttgctgtcataaagttatccttccgcttggtgattttgtacttagctcgtggagagagtaccggtcacaaggacttaagggtcagatatggtcgtgtattaggctaccagtctctgactgtcttatcttgatagtcattactcgggttttgtaagtcagaaaagatgtgcctgtggaaagttacttttgttgatatttttacgggatctgtgttgaccagtgcttcaaggatgtacctaacatgcttggcttgcttctttcgtgcaataactcttatgcaattgttgctttcaagatgtatctcaaacagagttgcttatattccctctgctcactagaaagtgtttaagggagcctaattagcatgcatgcagtcttttctgtcctaaatctcattcttgtatgagggagttggtagatctcaaagtgctcttgtacccacgtgcttcctaggatatgaatgtcacagaaataaatggtatatttttccttctttctgacgccatagcatgagtaccaagttactaagggggtgtttgaatgcactaggactaatagttagttggctaaaaatttgctagtggaattagctaactaacaaatagctagctaactattaactaatttactaaaaatagctaatagctgaactattagctagggtgtttggatgtctccaactaattttagccgctaactgttatctccactgcattcaaacaccccctaattggcatgtttttcctccttcctctgcaggtgcttgctatggaacttttgaggcgttcagatacaaggaaaataaaaaactggaataggtcggtagtctggtcctggaagactcaaaagcatagtggaag

SEQ ID NO: 22060 - DNA, 848 bp, Zea Mays
ggccgtgcttgtcccggagggtgaccgtgcaggagcagatatcctcgtccttcatggactcgccgccgccgccgcacctcgatgcccccttattcggcgccgatctcatcccctccggccgcctccgccggatgcgcgggtggcgccactcccccggaggactcgaggaagagataaggatgtttcagacaagagtgttactgggaggaatgaacatgtatgaccgctaccaggattggcgccttgacgttgataacatgacatacgaggagttgctcgagcttggagacaaaattggatatgtcaacacagggttacgtgacgacgagattactcgcaaccttcggaaggtcaagcacccatccttcagttccttacggttcgcaacagaaatggaaagaaaatgcagcatttgccaagaagaatttgaaacaaatgaagagatgggaaggctagactgtggccatagctaccatgtgtactgcatcaagcagtggctctcgcagaagaacatttgcccagtttgcaagactgccgtcagcaagaattgaaatccaaactccagtcacgctgtctgtagatctcggtgaaaacagcaaattctgttgtcctgtacagtccgttatatatattattattgtatgaacacaatccatttgtttcatcttgcagaaagaaaatgccatgttttggtcatgttccagcaaactacagacttgataccctcttatcttagagtgattaggaaaaggttttgcagtaacagataggatgaacctctttcataatgtatctaggctctatttagattttgtggtctttaacctatttagattccatggtcttag

SEQ ID NO: 22061 - DNA, 7440 bp, Zea Mays
tgtatgtgctcatggcatcaccttcgcccgtctggcttcaaaggctgatcgcgagtagtctctatccccttcctgtattgtccgtttggggtggggtccgcctcctactgtgctgaagcagcctttcttcttggcactacgcccgcccgcccaccggaccctgcagcagagtccactgtccacggccaaaggcgagagagagagagagagagagagagagagagagagagagagagcacgggatgggttgaggaacgagatggagggagaaagtgggcagcctgctggatcttggcatctcgccgccgccgctcacttccgctccacctgtttggtgcagtgtgggctagttatctactagacttgccactggtgcagattccgttgatcccacatctgaaaagcaggggagtcgacgaccctcatggttttgaggataatatattgcatctctgcactgttctaagcgtgaggaagtaaagcattatttattggttggagtagtttctgttgctatccggcaccaatggcgactttggttcgtcatgattcaaggcagtactcttggtggtgggttagccatatcagccccaagaactcgaaatggctccaggaaaatctcagcgacatggacacaaaggttaaagcaatgatcaaacttatcaatgaagatgctgattcttttgcaaggagagcagagatgtactacaagaaacgtccagagctaatgaaatttgtggaggaattctatcgagcataccgtgcgctggcagaaagatacgatcaggccactggggcacttcgtcaggctcacagaacaatttctgaagcatttccaaatcaaatgccgtcaatgtcagacgagtcaccctcttctttcagccaagagatggagcctcatactccagatatgtctacttttacacgtgcggcatttgattctgatgatcttcagaaggatggagttggtatgtcaccacagcgtttcacctccaagagaaatggtacacaccctgaggaaacaagtgcattgtcaagtagaaaaggtctaaagctgttcaatgatttgtcatcgagtagtgaaaatgctcctcgtgctggttttgatgggaaagtacggaaaggcctaacctttgaaagcccagaagttaaagggaaagatggtatcagcaatgagatggcaaatttgcagcaagaagttgcaagactattatccgagagccagaatctgaaacagcagatgctgtcagaatccgagcgggcaaacaaagctgaaaatgagatgcaaatgctcaaggcaacagtattgcaattaagtgctgataaagacacatcacttacgcaatataatcattcctctgagcgaatatctacgttggagtccgagctcttgaaggcgcaggctgacctcaagaagttaactgatgaaatggctgcagatgtccagaagctaattaatgctgaaacactcaatattgctatactgtctgaggctgagggtttggatcagaagatgaagatgcaacaacaagaactagaacaaaagcttaaggaattggagagtttccgctcaagcttccaggaggagcatgaaaagcgtatgcaggctgaaagtgctctactttcccaggggaaggaacttgctcaatctcatgaagaagtacagaggttgactatagaaataaagatggcgaatgaaaagttgaatgagctcaagcagaccaaggaggaccttcatgacactgtttgtgagctgaagagggatgttgagcgccttacagaacaaaaccagtcatctgaggtgcttatacgggaacttggtgacgagataaatacactcaaggattcaaaaaatgaactccaaagtgaaataaaaagccttaagagcaccatttcacagctaaacactgagaagaatgcagctgcgcttcaacaccagcagtctgtggagcaggtttcggtaatcgaatctcagctgtcaaagctacagtcagagctagatgagactgagcagaaagtacagttgctgacacaagatcttgaaaagaaaaaagaagaagcggagaatatccatttcaagctgcaagatgaatgccataggcgtatgcaaattgaagcaactcttctcatgacagagggtctacattcccagttgcaagaagaaatgaaaacactgacacaagattttgacggatcaacaaagaagcttagtgagttagaaaataataagttagacctggagagcacactgaaagaactgaataacaccattttaggtttgaactcggagaaggatgcagcactccttcaacaacagcagtctttagacaaagtatctgatttggaattagaactctcaaagatgcagttggaaatggagaagtctgagcaaaaaattctcttactggagcaagaaattgcacggaagactgaaagtgtcgacagcttggagataagttttaaagatgaatgtgagaagaggctacaagcccaaacatcgcttgtgtcattggagaaaatgtattgccagtcacaagaagatgttagaaggttgcagatagagattgagaagcagaatgacaagttgaatgagttggagaacttgtcatctgaacttaacaacaccatcctacttgtaaacactgagaaagatgcaaccctccatgagaaccagcagtccttagcgagaatattggatcttgaatctgaactcatggtcttgaaaactgaactggagaatgttgaaaggaaagttcacatgatagagcaagaactcatatataagaaagaagaagcggataacctccaaattagcctacaagatgaaactcaaaaacgggttgatggtgaaacatctcttcttatgatgaaaaatcttcattcggagtcacaaaatgaagtgagagggttggcactggaactcgagaagctgaatggtaatttaagacaggtggagaacagtaaggttgatcttgaaaacattgtaaccaagcatacggaggaaatccatatccttcgtgaacagaatctttctactgagcttatgataaaggacctccatcttgaattggatgtattgaaggatttgaatgtgaaacttcaagcagaaatggatttacacaaaggtgaaaaagaagtacttcagagagagtttacttctcaaagggaagagaaggaaaatctagaggggatacaccacactctggtggatgagatggataccctaaaaactactacaacaatgaaccagaagttgattgaggaattgcaaatcacaaacttaaaactgaaggaagtgtgtgcaaggagtgaagttgagaaggcacttctctcagaaaaactccaagaggtggagaagctatctgaagaatattcactcttggagaactcactttcagatgcaaatgctgaaatggatgcattgagggagaagataaaagcacttgaagcttcagaaagctctctcaaggatataatttcctgtcatgtttctgagaaggctgttcttgtatcagagctagagatccttggtaaaagattatctgatgctttagagaacaaatctatcttggatatctcattatctgatatgaaactagacctagaagatttgagaacaaagctgaaagattctgaagaatcctgtcagtatctccttgcaaataactcagcactttctggtgaactggatgcattgagggagaagataaaagcactacaggcctcagaaaggtctctgaaggatgaaatttcctgttatgtttctgaaaaggttgttcttgcatcagaggtagagatccttggtaaaagtttatctgaggtttcagagaagaattctatcttggatacctcattatgtgatatgaaaactgagttagatgaattgagaacaaagctgaacgattctgaagaatcctgccagactcaccttacaaataattcagctctttctgctgaaaagaacaatctgttctctcagctggagagcattacattggccatgaaagcactagaaggtatgcacaccaatctggaacagatgcactcctctgtatcaagagagaaggattttgcatatgatcaagtaagggaactgcaggatcagttgagaattaagaatgaggaatttgaagtgttagcaaagtcacatcaattgcaagcaaacagctatgagatacaaatttcttctctgcaagagaaaaaccattatatggaggaggtgcttgaacaggaacagcagaaaaacgtaaatgcttctattagtacagttattttggagaactgtttggtcgatgagcaagacaagaaggctgctcttttcactgaatgccaaaagtatgctgtggaaaatcattcagccaatatgttggtttcacagttgatgggggaagctagatatcatggggaggagagaaaaacattgctaaagcacaatgaaaaactgaggcaagggatttcaaagcaaatgaaggttctgaatatctgcaaagatctagcacctgctgatttagctgaggacgaagttctgttgcagactgttttagatgaaaccattaacactctgagacttaaggatgaaactgaagatgtgaataggctcatgaacactgagttctcagttctctcagtagttttgttgcaattagggatggagctcagagatctgcacttacagaagtgtgccattgagaaagaagtggagagtggagaaacagagttgctttgtttgcaaaacaaaaaccaacagatgttggaacagaatgaacaactaaggaatggattacaggaaagcagtgaaagggaggaggtgctgaaaactgaagtattcatcacacaagagaaactatcttgcttgagagagtcctaccagacatcacaagatgtaattttcaacctgaccgaaaaaaatgagtccttgtctaaggaataccagtccttgagtgagaagtacaattccttggaagatgagaatgatactgttcttgaagaatgcatgatgctcgagaacctgtgcctgttctttaggggacataataatgagattgcatctgcattggcttctcttaccaatgagatggctttgttgagtttggctaagagcgatcttgatcttcaagttgatgagctgagcagaaggtcagtggcgcatgaatcagaaaatagtcacttaaaggagtacatcatatgcttggtagagattctcagaactcgattagtcctttcagagtttgatttggacaccaatcaaagtgtctgccaggagttggttgttaaacttgagaattgcatgacacagctggcgcagaaggatggtgagctaatggaagcagaggaggaagttcaactattgcaagaaaagaaccaggaactctgtggagttgttagatctctacaagttgcaactgaaggtgctaaagtggtggaaggagaactggagaagaaaatcacaagactgattgaacagtgttcttgcaaggatgtcgaaattttacttcttcaccaagacaatgaggcattgcaatcagaagttgagcaatgtgagagggaatttgttgttctgatggatgatgcaattacctcttcagtgaattctgcggtgtatgaagaaacagcattcaagcttatgatgaatggtaaagctacagagaatagagcaatatccctaaaggagttgctaatgaaggaggtctcttcccgagatgctcacattgaggagttgcagaaaaagttggctggcattcaggacgaacatgcagaactaaaagctgagttgaacacacatctagctctcgtagcatcattggctgatcatgtcagtgtgttggaagaagattgccgttctctgtcaaaaccctgtagtacagaagacaaagaggaaaccgcatgtgtacatcatgttcaagagggcaatgatgggctggaatctcattgcttacccaaaggaactccagagttacaagggttgattgcaagaatagaagcacttcaagtagttgtatcaaatgctaaagatcgtcaagatcaggagtcagctgagtctgcagctaaattggcggcagtaagtgcagaaattcaagaccttaaagcaagaggtggctcacgcatggagggaaaagaaatatattctgatcatgagaaacaagatgttgagatctccaaagggaagcaagtccagatcatgaaggatattgagctggaccaaatatccacttgtccaccatatggtgctcgagctgccctctatccgcttggaactggtgcaaatgccgaactcgatgacgatatgcttcagctgtgggaggctgcagagaggagctgcaagaaccaaacggccaagtcctcgtcatctgagcacgacatacaagccgtcgaggatctgaagagtgagcacccttcgtctgagctagcaaggggaagagaccttggaatcaataagctagaagcgtcgaagggagctgcagagcctcatgaggcgtggagcaagaacgtacttgagaggctcacttctgatgctcagaggctgttgagcatccaagcgagcattgaagagctgaagcagaaaatggaggggcagtcaaagggaaaatcccctatgaactctgagtacagcagtgtgagcgctcaggtgcatgagacagagggccatgtcttggaacagatcaatctgaacaacaaattgactaggacggctgagaactaccccacactgtcagataatatgagcaccgagcgagaagggtattccagcaggaggaagatctccgagcaggtgcagaaagggtcggagaatgtggcaaggttggaactggagcttcagaagattcagtatgtcttgctgaagcttgaggaagagcacgagtacagaaggctcaaagtctctgataagcgcactcgcgtgcttttgagggactatctgtatgggaggaaggaccgcggtggcgggcagaagaaaaagaagagggtcccgttctgtggttgtgttcgtccgaaatcaagaacagagccgtagcctttctttttgttcgacctgcacctccaagtggtagccgtagtccgaaatcaagaaataaaacaaaatcgacctgcacctccaagtggttggctaagtgtcgcctgtgcattggaagaggaggtggtgttcctaggatccctttgtaattgagttagcattttagtatcttttttcttttatttttgaaactagcattatagtatcctgatgaagaagcttatgtactaaattttttgttttcctgtctaaatgaggccattctggctagtttaatgcgttaatactgtcgtatatcaaggcgttctctttccatctataatagcttcgtgtttacagcccaagcagtgcattttgcttccaggttcagactgcagaagcaaagcaccgggactagtaagtcatttctttaatattgatgaataatctca

SEQ ID NO: 22062 - DNA, 485 bp, Zea Mays
  misc_feature (1)..(2): n is a, c, g, or t
nngtggttgtagggctcaggacaggctcacctcatcagcgccagccaaggaggagacggatggagggagacacagatgaggcaaggcggtcagagcttgggagcagcccagcagatcaacaaatgcagggtgcgggggcggggagcgcgaaaagcagcagcggcagaggaagcacggcattgtccacgagattcttgcaggcagcgaccaagcacgacagcagcagctgcaggggccagggaggggaggggaggggagcgggagacgggggtaggtctgcgcgcgcggcggagagcatgaattcaagcgagaagagctaggtgggaggcccggacggttggcgtaatggcagacaagaaaggccgagcggaccggacggagcactgcgccattgccactgcgtagctttgcatcgggaggtgtgtgtgctgtggtgtgatgtgatgagtgaaaacatggagcccggcaagccgagctagtaggag

SEQ ID NO: 22063 - DNA, 2279 bp, Zea Mays
attcagcaatgcatcccgttccactgttccagcttgcacccgacaagccgaacacttcaccctttcccacttcacctccgccgttccgcatctgtggtcaaatacgacgctcgcgtccataccgatccgtgtttgcccattcctctcctcccactcgcttttcctccaaagcgagcgagctaggcgttacgccggagctcgtttgggcggtggtggaggagagaggaaagggaggagatgaaggcggtggagcgagcgaaactggtgaggagcctccggcacgagtcgcggcggctgcgtctactcgtcctcgttatcggtttcttcctcgttactctcaccttcgttgtcgtctccaagcccgacgcgctcctcttcaacctgaacggcaggctgtcggtggaccaggcgccgcgctcgctcttgatccgccagcgggttgacgccgacgaggggagatccgccgaaactctcgcctcagccaccggagatccaaaggtggtcgaagacgatacctacggcgaggaagccagcgccaaagccagagccaacgccaatgcccgagggaccactgccgaggaggaacggatgctcgctagtgagcccgagcagagaaaaagggcacaggaagccactacatctgagattttagatacagaatttaatctcactccagatgttgaccagagaaatggtcgagacagatctcatcaagcagcattggataatatggagcgggacaaaccattgtgtgatttctcaaacttcagagcaaatgtctgtgagatgagaggtaacatcagaatacacccaaatggcagttcggtcatatacatggaacctacgagttcaggttcaaagagaaacgaacaatggaaaattaagccttaccctcgcaaaggtgatgaattatgcctcaatcatattacagaggtgacagtgaaatccagcatagtggcacctgagtgttccaagtaccatgacgtgcctgctgtgatctttgctctgactggatacaccggaaatctattccatgacttcaccgacgtgcttgtcccccttttcacgactgcaagcgagttcaatggtgaagttcagttcctaatcacagacatggctatttggtggacaaggaagtatgctgtggtgtttgagaagctaaccaagtaccccttgattgatttcaacaaagacaacgaagtgcattgcttcaaccatgccattgtcggccttcatgcttacatggagttcacaatcgacccgttaaaggctccacacaattactcaatggtggacttcaaccagttcatgcgcaggacctactcactgcctagggatgcagtgagagcacctggtgagaccccacagaccaggaagccaaggctgctgattatctcgaggcaaaggacaaggatgttcctcaatcttaaggagatcgtggccatggctgaggagatcggctacgaggtggtggttgaagaggccaatgtgaactccaacgtcggccatttcgccaaggtagttaattctgtggacgtgatgatgggcgtccatggcgccgggctcacaaactgcgtgttccttccgcacggcgccacactgatccagattgtaccttggggcgccctagatgggatatgcaggatcgattttggttacccagcagaacagatgggcctgaggtacaagcactacagcatcggcgtgcacgagagcagcctcacggagcagtaccctttggaccacgagatcttcagaaacccgcttgcgttccacaagaacgggttcgagttcgtcaggcagaccttcatggatacacagaatgtaaggcttgactgcaaccgtttcagacctgtgctcttggaggctcttgaccaattgaaccaataaggacccattggtctaattccacggccactgtactagatttttgttttccttggcgattctagtctcaccatttttcctctttgtaaaatttcgtgatcactgtatctggttacatgagcaacatgaaaatcaattgtttctccaaatgtgtaggatcgaaatcgggattgtactgtattttgtttaatgtaaattagcagtcgtcgatcacagaaatatcagcgagaagctgctgttacatgatcacagcgagtagaattttccaggcctgacaggcatgatagaaatggggttggtggagaccaccttttttttaggctgtgtgattcatcatgttttttgctcccacttttttggttcttggacacgaagaaacgctaatgctgttc

SEQ ID NO: 22064 - DNA, 3079 bp, Zea Mays
ggtcaggactcaggagtaggaggagagcagcctcaaaaccaggcgcacgcacccgcgaggccgcgacgccactgaccaaccagccaaaaacccggccgcgcgcctgtttgttcggccggagcgcgccatggccatggaggaggggtcaggagcggtggagaaagggccggccgtgggcacggtggctgacgcctccgccagcgtcatcggcgaaggcgccgtgaaggaggaggccgggggcagacggcagccaccggccggctacgcggccgtcgtgatcggcggcaccttcgaccgcctgcaccagggccaccatctcttcctgaaggcggcagcggagctggcgagggagaggatcgtggtcggcgtctgcgacggccccatgctcgccaagaaacagtacgccgacctgatacaaccgatcgagaagcggatgcagaatgccatggattatattaagttcataaagcccgaccttgatgttcgtgtggagcccatcgtcgaccctttcggcccatccatcgttgaccaaggccttgaggccatcattgtcagcaaggagacgttgccgggaggacacgctgtcaacaggaagagagcagagagagggctcactcagttgcagatcgaggtgatagagctggtgccagaggagtcgacgggggacaagataagttccacggcattcagaaagatggaagccgagagggcgctgcagcaacagaataaacaagatgatacagcagtaggcactccggttggggtgcaaaacatagcggttcagtcacatggagcatagtaatgaaccgaagttcgtactttaacaaaaaatacattaaactttgagctctctacttccatcacatacaaaggcacagtgcttctgtgcccaaacatggactgatcaatacagaaaagttccagtttcttcacatatttagaccgaaggatattctaccaagaaaaaatatgcagccagcctttgcaactttagaccttgttcgtttgtgccggattggtgggtcggaacgatttctaaccgaattgtttctctgatttatataaactttgattagctgaaacgattccggatgcaatcacccgaaacaaacgaacaaagccttagttgtaccacgctcatgcttagatcttcagatctatgaagcatctttagatctatgaaacttacaaatcagaatttgagtcaggtcatcacatttcttcaaattgatgaaacttatacaaatcaggacggattcttgagacttgattcattgaccattaaaaaacaaatcaatcactgttaaaaatacattagcgtttgcacaacattgcaatcaaccagccgtaactataaactacagacccatgaccaagacgatttggatgctccttttgcttcacacaggcaataaactggaggtgcgctagaaacagttgggaaattctggatgatgatcttacaagcatagcaaaagacagcagttcagtactttttgtggcggccctcagacatccaaggaaggattctgcagcattagctctcaagcctggcagggcgaaagctcttaggcggcaactgcgaatgtagagaaacaagccttgattttgtcatcatagggcacccattatcagaaataacaagtatcaaacataggtattgcattgtgtcagacatccaaggaaggatatggggcagcactagctctcaagcctggcagggcgaaagctcttaggcggcaactgcgaatgtagagaaacaagccttgattttgtcatcacttgcaatgcacaacagctaataaaacagcaggatatacagaatgtactggaaaaaaatcatgagctggacaagaacaggtatgtctcagacatccaaggaaggattaaacagcacaagctaaatacaagtatcaaacataggtattgcattgcatcagacatccaaggaaggatttggcagcactagctctcaagcctggcagggcgaaagctcttaggcggcaactgcgaatgtagagaaacaagccttgacttcatcatcacttgcaatgcacaacagctaataaaacagcaagataatacagaacgtactgacaaaatcatgagctggacaagaacaggtatggctcagacatccaaggaaggattaaacagcacaagctctcaagcctggcagggcgaaagctcttaggcggctactgcgaatgttgagaaacaagcctttaacttcaacatcattgccatatgcataacaaatatacggaacaaaatgagctgaaggcaaagcactaacaataattatagtaaagcaatgactgtaatcacagaaaacggctctgtggacagatagaagccgtccccaggttcctatcgacatgtgaaacattgaaacacctttgtatcggcctaatcatagcatctccggtcaatgctcgtggctaccagagacgtggcatcaggcccaaactacttcagcattgacatcaagataatgaaatcatacataacagcagatttagtacagtccctcagagacccgattaaaatcacacaccacagctgaaacaaacagctgcagatgggagctccagcctgaccaaaccacaaaggttatggtcaaaggatggaacacctgcagctgagagaggcagctgctgtttgcagtgtcaaacggcacttcctatcggtaggtcttgggatcttcactgggacaacatagccaaactactctcatggcagattcaggaaactaaaacaaacattccctagaactgcacagaagaatctaaacacagcaaatctaggtgaatgcaattctaggattaaatgccattacaaatctagttcaaaacaaattgcaaatgtagctgatttcattggttaacaggttaatcatcaggaagctaggcaattttctatcaagttatcacaactaaaacaggcggcaaattgaaggataactacatcaacacatcatcataaaaaaaatgaaatatgggtgaaagaaatagcgcacatgctcccaacccacaaacaaaagtagacaacaaataatccaaaaacatgtgatttgtaa

SEQ ID NO: 22065 - DNA, 3216 bp, Zea Mays
cgacccaccgagccatggccccacggtttcctggtttcctccgcctcactggtcctcccctctcctctccccccttccctcgctccagcgagtaccgacgcctcccacagctggagaccgtactttactggcactggcagtaatcttcccacccgcctcggcgcctcctccctctctcccaacatcgcccgctctctcctcgctgttctccgctgtcatctcccccggagaagcgtggctcctgtagccggcctcctacctgcccctcctccgcgcgccgagcaccagacgacgcgacacggccgagcacggtcgctgcttccgcggcggcgccgctccactctcgtgctgcagctagcggaacagagatccgtggggacatgaacagggtttctcctctctgttggtatgaactaaattgatcgatggtcctattgaatatagagctactattatatggcatattctgtcatgcaaatgatggtggttgtaagttgtgattgaggaactccattgtttgagaaatggatgaaacaccaactagttctgggcaatctgaagatagttcatgtgaacctaattggtggccaccagacttattagagaagatagagtctgcttccatatcaaggaaacatgatgttttgggtaatctaaggtcctcatcctggaaggcatcacaattactgtggtcaacaggatcttattcagggttaatccctaatggtttctattcaatcatcccggataaaaagttgaaggagactttcccaacaattccatcggtagatgacctgcaaactcttgaagcagatgggcttaaggctgacataattattgtagacactgagagggataagaaggttttcatgttgaagcagcttagtgctgcacttgtgaaagggttaagctctagcccagcattagtgataaagaaaatagcaggtttggtttttgactgcttcaagcgacaaaatcctgacgccagtccagcaaaaggctcgattgaagatactcatttctttggatataaaggaccacaacttctagggcagataagacatggatcatgccgacctcgagctattctatttaaagttcttgcagatgctgttggccttgagagtaaacttgtagttggtctacctgatgacggtgccgttggatttgtggactcctacaaacatatgtctgtggtagtttcgctaaactctatggaactgctagtggatcttatgcgatttccaggccagttgattccattttcagctaaggctatctttatatcgcatatatctgctgcgggtgaaagtgactcagctgaaaatgactcctgtgattctccccttgagcccaacagccctctgtatggattgtctgataaagttgaaactgaaggaattgaatcttcatcaaatctatctggacgatcactgcgtaatatgatgttgagatcaaggacattttctgaggggaaattaagcacgtcatgtagtgaaccgaatatagcgaatgccttttggaggcacagtcaaaggagaggagttgccgaggaaccccgtggtgctagttccagtcctgagcatccattaatgagagcaaggggaagatctatacttggtggtgagaagcaatcatttcaagaatacacagaatctggagctgcttcaagatcagatggtcttgggggcacttcaacctctaatgctcgaagaataaggcgtagaagcattagcatcacccctgagattggagatgacattgtgagggcagttcgggctatgaacgaaacactaaagcaaaatcgccttcaaagggatcatgtcgaaggttcatgctcatatgttacggaagaccaaagcaacgccaatgactgcccaaataaagatgatgcatctcggataattggtgctactgacagtgactcaagaaaccgaactggtcctactcaaaaggccatgtcattgccttcttcgcctcatgaatataggggtcaagatacccaaaaaggtgatgattttataagtaaagagaagatggcattggcatggaacaaagttttccagagctccccatttcttaacaagcccttgctgccgtttgaggaatggaacatagatttctctgagataacaattggcacgcgggttggaataggattcttcggagaagttttccgtggtatatggaatggaaccgatgttgccatcaaagtatttctagaacaggacttgacaactgaaaacatggaagatttttgcaacgagatatacatcctgaggtaccagaatttctcttgattttttactcgatattcttctatttttcattatatactaacattaattgtggcaacttattctttcctttcagccggttgcgacatccaaacggtaaccatcccttttaactgttgtgaaacagttctcaaactgctccacactagatgcctaaactaccttatttcttgtaagattgttttctaaccgtgtgtgtgtgtgtgtttctgttctgtagttatattgtttcttggtgcatgcattacacctccacacttgtcaatggttactgaatatatggaaatgggatcactgtattatctcatccatatgagtggtcagaaaaagaaacttagttggcgtaggaggttgaaaattattcgtgatatatgcagggggttgatgtgcatacaccgcatgaagatagttcacagggatctcaaaagtgcaaactgcctggtgaacaaacattggactgttaagatatgtgactttggtctatctcgagtgatgattgatagtcctatgactgataattcctctgctggcaccccggaatggatggcccctgagcttatacggaatgaaccttttacagagaaatgtgatatattcagccttggtgttatcatgtgggagctgtgcacattgagtcgcccatgggaaggcatctccccagttcaagtggtgtacgcagttgctaatgaaggttcgcggcttgagattcctgaaggacctctcggcaggttgattgcagattgctgggcagagcctgagaatcggccgagctgccaggagatcctaacccgtttgctggactgcgaatacactgtcagctgaaatggaagctgctcgctcgtccactcaattcctgcacagttgggcatgtccggcggctgcaaccagccagacaaccttcagttccacatgaacctgc

SEQ ID NO: 22066 - DNA, 1983 bp, Zea Mays
tacaggcaaaatatttccggtcctcaaagctcccgcccgccctccttccctccctccctccggcgccagtccaggcacaggcaggcttcagtctccagagatggcgaggaacgagcccctagacttcgagaacgaggacgatccgctcctccccgccccgcgccccgccaagaggagcaaggtcatcggcatggatgatctcctgctggattactttcaatctggtaaaaaggacaagctcaaagttaaggctgccaagtctaagcatggccccaaaggaggatatgattcaggtgaggaagacgacagggctacacagcaagagattacagtctgcaaaatatttgaggaagttcagcaaaagggcaaagtgatggatgctagagacgatgtacccccatggggtcaacaattttttagatgccaggtcgactctaactttatcttctgtttaccattttcagtccaccagatgctttccctttcttgatcaccagccactaagttattcatccttacagaaccccccctcaaatcttagcaatggcggagttgagaattgtcatctcctgcaatcattctctgcaattgaagatataggttttgatctagagatgcatcaaggagaggggttcctcgaaggcatgctgttggatggatggcttctgaatttggttcgcatatgtggttttgttgaagactctgtagcatcgtggacgctgaccaacttgttgcattcacccaatgagaaattacaagtttctgcagctgacttttgggatggcattctttccttggatgaggctggtgaaccgttggtcaaccttgggtattttccaagttactctgttctaaaacgggctatgctgagctatggatatctatttgatacttcaggcactaaggcttcaatctctggaagcactgctgcaggtggccctgatgatagtctgcctcataacatcattgcttggttaagagttgtatctgcttgctgcaaaatcagaaaagtgcattccatcttctcgccttctgaggcagaagaacttcttgctattgccatttccctctttttggaccgtcgacttgaagggttgctgcttgttttgggagactgcctgaattcacttatattatacttcaatacgagtgagtgggaaactagctgtgtgatggtggctgaatcaattgctcagagggtcacactggacctcaattgtttaagggttgttgactgcatcactggtacaaataagcgcagcaaaatcctaaggagtcaggtggcacttcagctgctgaagatcagctttgggcttaagattttgaagctagtcacatccatcaacgtgaaggagaaagaatgtgacttcttcaggctttatgtgtatctagtattgatggacaacttgctcttctcaagtgatgcatttagagataagactgggatggttgatgcttggcggaattatctgcgcaactgttccacccaaattgggtgcacggactggagattctatgctccaaaggcccgaaacaaggcttcttatcttctgcaaggttcaatcttgaaaaaaagcagtggcgatggtaaaagttgtgtccggtaatcaaaggggaccaaatgtctggtgcagcagtgcccaggttgtggttccattcgatgggcaacggcgaagtgctcatatcattccatgttttatgtacaattcttttttagttgttgtgttttagttcaaaaatgaactagcgagcgacaaatattcgagaacagagttagcagccagatttagaggggtgttgattgatgtatctgtgggggtgcttctgcttggttgattgacagaaacaaaaaggaaagagagcagcaagggatgattgggtgcagcctggagggggatgttttgtttatctcgtgttattaggttcttctccaactggctggttagctggctggccagattccgagcatcgttttcggacttg

SEQ ID NO: 22067 - DNA, 1249 bp, Zea Mays
cccgcttctcatcaaacttgcatctctacatgtcataaattgtactagtgattctatgtaaaattgcagtctgttttatctgattgttctgaggaacatcgatagtgcatatcagatttaagtatggtagtctaactctatctaaccacagggatgcatttgttgagtactggatggatgacaataagattacaatggatatggctagtcaaatatttgaaattttaagaaaaccaggttgcacatatctcactcaggatgacttcaagcctgtcctgaaagaactacttgcaactcaccctggcttagagtttttacaagggacccccgagtttcaggagagatatgcggagactgtaatatacagaatcttttactccataaatagatctgggaatggccatctgactctcagagagctcaaacgtggaaatttaattgctgcacttcagcagttagatgaggaagaagatatcaacaaagtgttgagatacttctcatatgagcacttttatgtgatctattgcaaattctgggagctggatgcagaccacgattttttgattgataaggagaacctcatcaaatatggaaatcattcgttgacctataggatagttgatagaattttcacacagataccaaggaaattcacaagcatgacagaagggaagatgggctatgaagactttgtttattttatattatcagaggaagacaaatcatctgagcctagtcttgaatactggtttaagtgcatcgatcttgatggtaatggtattttaacttacaatgaaatgcaatttttctatgaggagcaattgcaccgaatggagtgcatggcacaggaacctgtggtttttggggacatattatgccagatgattgatatgattggaccagagaatgagagctattttactctacgggacttaaaacggtgtaaactctcaggaaatatattcaatattcttttcaatctgaacaagttcatggcatttgaaactcgtgatccattcctcattcgccaggaacgtgaaaatccaacgctgactgagtgggatcggtttgcgcatagagaatatattagattgtccatggaagaagatggtgaagatgcttcaaatggaagtggtgatgtgtgggacgaatcacttgaggctccattctgaatggtggtctgttcggttcctagggagcagacaccgggaacgattcctaaccggaaggtttgcctaatttatataag

SEQ ID NO: 22068 - DNA, 3224 bp, Zea Mays
gcaccaccaccaccgtgccgcgagcgaagtgacgtcgcgttcacttccctcataaaatctcgccccccactctctctctacccgagcccagcagtaatttttttttggggaaggtgaagcgagaggagcaggaggagagaaaggggaacgaggccggccgcgaatcggaggggaattcggggggcggggctcggtccggccggaaattcgcgcgattcgggcgcgggcgccgcggatgtgaagatctggtgctcggcgggatgacttcttcggcggcggccgcggctgctgccgcccaggtggcgggaggaggtggaggcggcgagggagatgccgccgctgcggcgcgaggcggaggcggaacggaggacggcatgtacacggagctgtggaacctctgcgccggcccgctggtcacggtgcccagggtcggggacaaggtgtactacttcccgcagggccatatcgagcaggtggaggcgtcgaccaaccaggtggctgagcagcacatgcaattttacgatctcccgtggaagatcctgtgtgaggtcatgaacgttgaattgaaggctgagccagacaatgatgaggtttatgcccagctcactctgctacctgaatcaaagcagccagaggagaatggctctagtgaggagatgcctgcttcacctcctgctgcacttgcaaggccacgcgtgcactccttctgcaagacattgacagcctctgataccagcactcatggtggattctcggtgctgcggcgccatgcagatgagtgtcttccgccactggatatgacccgtcaacctccaacacaagagcttgtagccaaggacctgcatggtgtggaatggcgctttcgccacatattcagaggtcaaccacgaaggcatcttttgcagagtggctggagtgtttttgttagtgccaaacgtcttgttgctggcgatgccttcatctttctaagaggtgatagtggggagcttcgtgtaggagtcaggcgtgccatgaggcagcaagcaaatgttccgtcttcagtaatatcaagccacagcatgcatcttggtgttcttgctacagcatggcatgctgttaacactgggaccatgtttactgtctactacaagcctaggacaagtccagctgagtttgttgttccctgtgatcgctatatggaatcactgaaacgaaattaccctatagggatgagatttaaaatgaggtttgaaggtgaagaggctccagaacaaaggttcactgggaccattgttggaaatgtggatcctgatcaagctggatgggctgaatctaaatggcgttacctcaaggtgaggtgggatgaagcttcctccattccacgtcctgaaagggtttctccctggcaaatagaacctgcagtcagccctccccctatcaacccacttccagtgcacagacccaagagacctcgctctaatgctgtagcttctctgcccgagtcttcagctccaacaaaagaagctgctccaaaggtcacattagagactcaacaacatgccctgcaaaggcccttgcagacccaggataatgtggccccgaaaagtgtttttggtgataacagtgaattggactctgctcataagtcctccctgcgaccgtcaggttttgatctggacaagagcaccattggcatgcagaggaagctgggttcagatatttggatgcgaatgaacagacctgatggttacagtgaaatgttatcgggatatcaaccacctaatgaaggtgcacggaattcgcagggtttctgttctttacctgatcagattgccgctggacgtcctaatttctggcacactgtaaacgctcattaccaagaccagcaaggcaatcacaatctgttccctggttcatggtccatgatgccttcaagtactggctttgggatgaacagacagagctatccaatgatccaggaagtcggtgggatgtctcagagttgtacaaacaccaagtttgggaatggagtttatgctgcactacctggccgaggcattgatcgatacccatctggatggtttgggcacacgacacccggtggtcgcgtggacgatgcccagccacgcgtgattaagcctcaacctttggtccttgctcacggcgaagctctgaaaatgaagggcaactcgtgcaagctttttggaatccatctcgacagcccagccaaatctgaacctttgaagtctccgccaagcgttgccacaccggcagctgagaagtggatggcagacggaatcgacgcagacaaaagccctgagccgcacaagacgccaaagcaactcggtgctacacaggtggatcctgtcccagagagatgcccacaagcttcaaggggcacacagtgcaaatcacaaggcgggtcgactaggagctgcaagaaggtccacaagcaaggaatggcgctgggcaggtccgtggaccttaccaagttcaacggctacacggagctggtggcggagctggacgagatgttcgacttcaacggcgagctgaaaggctgtagcaaggagtggatggtcgtgtacaccgactacgaaggcgacatgatgctggtcggggacgacccctggaatgagttctgcagcatggtgcacaagatcttcgtgtacacgagggaggaggtccagcgcatgaacccgggcgccctgaactcgaggccggaggacagcggcctcgccaattcgacggagaggggctccgcatctactgctgctgctagagaggcacccggctaccagtccgcctcgtcgcttaactccgacaactgctgatgccttggcagctagctggtcgtcccaagtagtagagaacaaggcaaatgtatccatagatctccttgtagcggagcttaatgcctttttttcccctttctaatatgcattggatgagcccgtagcgcaccgtagtagtatctaaagctggtgttctgagttggttggaccttcctgcagttttggtttctccttctgatgtggcaagttttagctggtcgcacctacctaatgtatgcttagcaaacgaagtcccactaagcgctgtacataactgcccctccctgcatcaactctaatatatcatctgcttaatcgtcacccctgggcccccgtgctggttgctcaagatcccagctgcttgttgtggcgcttggtttggttcgttgtcggccgtggctcatgtttgtt

SEQ ID NO: 22069 - DNA, 264 bp, Zea Mays
caaccccattcccccacacgctgcacaccccaatcccatcggcctcggtcatcagtcgatccccaaccccagttccccaatccccactctcccagtcctagactcctagcctccaagacccaggctcctagccgagagccggaagccgcaccgccgccccaagcagccagggcgctaggccctgcctagatctacactggcaggagctgaggagagtgcttgtcgccacactggagcagtgtctgtgcctcacacccaagatcg

SEQ ID NO: 22070 - DNA, 750 bp, Zea Mays
acctgaacaaactactccaaacactggactcatccttcacaaacatgctttctatcatcgatcgacttgcatactcaatactcttaccaggttatgttaccagaggctgttgcaattgtggtcgcacccacagatccaaccaggagttacggaatattcaggctgactgaacctggagggatggatgttcttagggagtgtgacgaaagtgggttccacactcaccgagagacaaccaacggcagcccaatctatgaaacctgctcgaaagtgcacttcaatcccaacttgcggtttgagattgtcgacctgcgctcggctcaatgatcaatgggactaaagctatggcagcacgtgctcccttgtgctccctcttggcagaagtatataccatagagcttgctgacgatgcgtgataggtatagtgacagcgccaagccggaaccaagatgctcatgttacttatctgacatctgcgctggtatttgtcaaagaaaaggagtaactgaaaactagcactggttatcttgtctgttcggccagcctttgagttggtattttaagtaatactgtatataacatacaactggggcaaaacacacacacacactattaacttggtctgggatgtgattgtaacgtagcgcaatagcgcttgactgtttctgtggcactgccaatttacttactaattgtcagtgactggagtatgaagaaatacattaatttggcagttccttactaaaccaa

SEQ ID NO: 22071 - DNA, 1629 bp, Zea Mays
gtgggcatggccgagtttctggaggcttcctgcgtcgcgtggaggcagacagagctcagggagggagggaggggaagaacgaagcagcagcaacagcgccatccgctcgcttccttccccttctctccctcctcccccaccgccggcgtcgcctctacgcgcgcgcgccccgccgggggctgccgtcgctgcacccgtggcccgtgggcggcggccgcgtacctgtacctacgtgctgccgggggggggggggggggggggagctacgcgtctcctctcgccatggacgccggtgtagagaagtgcggcgacgcggcggcggagggcggcggcgacctctacgctgtcctcgggctcaagaaggagtgctccgacgccgacctcaaggtcgcttaccggaagctcgccaagaaatggcacccggacaaatgctcctcctcctccatcagcgtgaagcacatggaggaagccaaggagaagttccaagagatccagggcgcctattcggtactctccgacgccaataaacggctcctctacgatgtgggagtatatgatgacgaggacgacgaggatagcatgcaggggatgggggacttcattggtgagatgacccagatgatgagccaggtgcggccgatggcttaaaaaagacggaattgttatgaaagctccttatcctccatggttttttgtggatactaaaagctgaacttttagaggcaggaaagctttgaggagctgcagcagctttttgtcgacatgttccagtctgatattgattcaggattctgcaatgggactgctaagggccatcaggttcaggggcaagccaaaagtagaacatgctcaccacggtcccctcctactactatagtaaaggaggcagaggtgtcatcatgtaatggcttcaataagcggggttcatcagcaatggactcaggaaagcctccaaggcctgttgaatgtggtgcaggtcagagccaggctggattttgttttggggtgagcgacacgccaaagccgcgaggtccgaacgccaaccggaagaggaacggccggaaacagaagctgttccccaagcactacgttacatccgaagatgatacggccggttcctagcatcagcagcacggtagcagtttgaccgttggctttggtgatgtcagcagtagggagggcacatcatgtcgcctctgccagctgctgtgatctgaagaggcgtttagctcatcatatgcctttagtcttttgagaggtctttagggttgaaaggtacttcgaaaaccgaaccagcgtctacaggcctaagagggatttccattgaaactcgtcgatgatactacagttttctttccccatctgtgccggttgtgttgtactaccactaccagtgacagcaatcgtgacttgaaagcggtcgaggtatatcttgttattttgtttccctccgatttttcaatatccgattgattttgttttgaagcaaatagagagcatgtccgtgagaatagtcatgaagcaaatagagaacatgtccgtgagaattgtcggttaatataatttttagtttttaatttgtacatgccactcttgagaaagatctctctcaagcttgtccatgtgcgt

SEQ ID NO: 22072 - DNA, 3207 bp, Zea Mays
aacagcccaggcacacacgactagaaccaggcaaccagctgcggagggaggaaacctagcggaacactgtgcaggtgacggcggcgcgctaccggtgacaggggatacggcggcatcgtcccctcctccatccccggcgcggcggcgccagcagccggcctgcaggcacacaagtggccacccttccaatggcggtggagaagtccagcagcggcacatcaactccctccaccacctccaccatggaccggtttcagaagattgtcctaagctgggattacctccgtctcatcgctgaatccaagggcggcaagcaggccaaggtgctgcagcatgtgaagaacacatacgtctcggtggctgagtaccttggtgtctttgagccactgctctttgaggaggtcaaggcacagatcatccagggacgcagtaacgacgaggaagaatctgggatggactggaggaggggagcagtggggtcgtgcacggagtctgaggggttccacaagctctctgtggcggtggaagacaattttcaggataatgtgtcagagaatgatctactgcttatctccaaggagaaatttgaggagggatcgacccctaatgcatatgcatttgcattagtggagcagcgaggtggtggcatacatatttcacttagaacttttgtggcaggtgaaattcaaaatctgaatgttgcaaagcctgtgaagtctacaaggctgcaacattttgcttccattattgcaagtcaaaacagcttgctgtggatactgaaggtctgcagcttgtctacaataatgcgggagttcacagctatgcattccgtagcttctctaccttttaaggatttgattctttcagctaccgaggcgcacaaggatggtgatgatcaaagtcgtgcgtggaatgtccctgagccacttatggattatctcaaagtgaatcttaatgattcccagctagaagcagttaatgcaggtctttcacgcagatcctttgttcttattcagggccctccaggaacaggaaagacacaaactattcttggactccttagtgccgttctccattctgctcctgcaagaatgcagatcaaaggaggatttgatgttctaaaacatgggccagaactggacattgatggcaagcgtgcacactggataaaggcatctccttggttacttggtgcaaatcctcgagatctgattatgcctgttgatggtgatgatggattttacccaacgggaaatgaactgaaacccgaaatcgtaagttccaatcgcaagtatcgggctcatgtgttggtgtgtgctccatccaactcagcactcgatgagatcgtgttgcgtgttcttaagacaggaattcgagatgaaaataacaacacttataaccctaaaattgtgcgcattggagtgaaggcccttcattctgttaaagcagtttctatggattatcttattcaacaaaaactttctggtgtagatcgcacattagatggtgggagacgaggtgctggtgaatatgatcggattagagcttcaatactggacgaagcagccattgtattttctactctgagtttcagtggatcatcaatttttagcaggatgacccgtgcttttgatgttgttataattgatgaagctgcacaagcggtggaacctgcaactcttattcctttgatccatggctgcagacaaatttttcttgttggtgacccagttcagttgcctgcaactgtcatttcacagactgcacagaagttgggatatggaacgagcttgttcaaaagatttcaagctgccggttttccagtgcaaatgcttaaaatccaatatcgcatgcatccagagattagtacattcccttcaaaagaattttatgaaggggtactacaagatggggagggcctgagcaggaaacgtccatggcattcctacagctgcttcggaccattttgtttctttgacgttgatggcattgaatcccaaccatctggaagtggttcttgggtaaaccaggatgaagtggaattcataactctcctgtaccaccaattggcattgcgctatccagagctcaaatctagtcctgaagtgggtgttatatcaccatacaggcatcaagtaaaactattgaaggacagttttcgatcaacctttggggatcaatcaagggaattgatagatgtaagcacagttgatggattccagggacgtgaaaaagaaatagtcattttttcatgtgtaagatgcaataaggaacaaaagattggctttgtttctgattttcgacgaatgaatgttgccattacaagagcaaaatctgctgtactggttgtaggttctgcttcaacattgaagcaagataaacactggaacaaccttgttgagagtgccaaggagcgaaactgcttattcaaggtccccaagccattgaccgcattctttgcagaggataacctgaagactatgaaggtggaaaggcgtcctccgccagagctgaatgctcgagtactggaagagatcaaccaagaagttgtaaggcaggagctcatgaatgtcgatgatgctgccgaccatgcagacgcaggggacgacgatgatgctgatatggatgctgacgatggaggcggcgatgattgattgtaagattcaaaggcttgggtggcctaggtagagcatttacgtagactactggtatacaagaggagtcggttttcttgggtagacgtagtgattgctgagggttgaaaaaaaatggaagcgatgattcttttctcttatctaattatggggagaagctgactatcgtagagtgcaccaccaaaattattttttgtgaaactgcagaggtgacaaatatgtcgcttatgtctgttttccacggttcacagttaaattgatggggctggagcctggaggttcaccagctccagtatttgtcttcacggattgagttgaggcagtgaagaacgtaagcatgtggataccagctagggaaaacaggcaacagcgttgatccaagcagcgttttacagttacatgcggaaaattgtgtgggttgtatcttacaaacacatattcatctcccaaacacggaaatctctgacttcgaaggagataaacttgtcgtttcaaccagaacgtctctgtgtagtacgaaaataacaaaaaccagctccgtggtgtcatttta

SEQ ID NO: 22073 - DNA, 185 bp, Zea Mays
cttgtggcctcacaaccccccacgcctcagtgtcttcctccccttgccctgaatctagatttactttgtagatgagcctgtacggcggtcagatcgacacatggaggaacaaccgcggtgaggagctcctcttcaccagcagcaagcaagctttctggtatggagctaaacgacactcttggcta

SEQ ID NO: 22074 - DNA, 610 bp, Zea Mays
ggcgtcggcctgcttccagtttaccgcagcggggcgactgacgcgcctccgacgacacgccagcagcaccgcctcggggcgctctccatctccaccgcgccctcagagaaaggcgaggccgacgcgggggctaccgaggttcatctcgcagccctcctggccgcgcgcggcgtgcgggacttcgccttccgtcgcgttcccgccgactactacgaccgctccctcgaggagcggcgcgacctgctccgagccgactcagtcgcccagctctgcaagagtatcgtcatggtgaacacccaagctgctgcagatgttgttgattgcagtaatccaaagaattcaaaatactatgtcgttgttgttcagtatatggcacggcttaacgctgaaaacatcaagaacttcctgtatgaactaaatgagaagcaaataccgaaaaagagatttaacatgaggttggcaccagaagaggagtcacacaagcttactgggtttgtgcataacgctgtcacttgcatcgggatggaaacaaacataccgatagatggtcctactctagttacgcaggattaagtgatgcatagtattaatagcaaatagttggaacttg

SEQ ID NO: 22075 - DNA, 467 bp, Zea Mays
agttaagcacgctgcagcaacgcggcagagcacatccgtagtgtgtgcatgcatcacagtcacacacacacagcagaagaagaagaaaccgaacgagggtttagctagcaaaataaacagaagcaagcaagctagctagagctaaggatcgagatcgagatcgaccgaccgacgacgatcagctagcatggcgcgcttcgtggatccgctggtggtggggcgggtgatcggcgaggtggtggacctgttcgtgccttccatctccatgaccgtcgcctatgatggccccaaggacatcagcaacggctgcctcctcaagccgtccgccaccgccgcgccgccgctcgtccgcatctccggccgccgcaacgacctctacacgctgatcatgacggaccccgatgcgcctagccccagcaacccgaccatgagggagtacctccactgctgatgatgcctaatttttt

SEQ ID NO: 22076 - DNA, 380 bp, Zea Mays
tcggttgtgtttctacgaagatccaaaattccttggaccaaaagcttcagcttccaatagtcgttaagggccttgtactgcgaactctggacaaagtttcatgctgctacaaagggagttgccgagctttctcaacaatagcgatcgtggaaggcgtcaaccagattgtggatgttgaaactattctatctacttttggatctaagttataggatatttgaacattttaatgtttgatacctggatgctttatgcttatatgtggatgctagaaaaagttgtgtacacatgtttttgacaaaattgtacgcacgatttggattgcattcaattgaatgatcattttattaactgatggtgaattaaatatgttataaaca

SEQ ID NO: 22077 - DNA, 4075 bp, Zea Mays
cgatagtgatttcatcttcctctaccaggcggctccgtggtccgtgctgatcaactgcatcaaggatcgtcgccggcggcgcgctggcagcagttcgcacggcgagatcggattgatcgagatcttctaggcctggacctgcgctagacctcgaagcctcgatcgcaccgcatcttctctctctgctgctggtccgctccgtcgccgccgaccccgccgccagcttccccttccacctaaaaggacgacctctggccgcccttgtcccgccccgacgcctcggtttccactgcataggcgtggtgcggcgatccgtccgggcctagggttgcgagagacactatagggtacgaccctaggagcatccgcctccacgtgggtgaggcggaagagggaggatgacatcgctcagccgtgagctggtcttcctcatcctgcagttcctcgatgaggaaaaattcaaagagacagtccacaagctcgagcaggagtccggattctatttcaacataaagtactttgaggacgaagtcctcaatgggaattgggatgaggtggagcgctaccttggtggattcaccaaggttgacgataaccgctactccatgaagatattctttgagatccggaagcagaagtatctggaggctcttgataagcatgatcggtcaaaggctgttgaaatcttggtcaaggaccttaaggtctttgcatccttcaatgaggagttgttcaaggagatcacacagcttctaaccttggagaattttagggaaaatgagcagctctcgaagtatggtgatacaaaatctgcaagacaaataatgcttgctgagctgaagaagctgattgaagctaatcccttgttccgtgacaaactacaatttcccagcctgaagacttctaggttgcggacacttattaaccagagcttaaactggcagcaccagctttgcaagaaccctagacctaatcctgacatcaagaccctttttgttgatcattcatgtggacaaccgaatggtgcacgtgctccatcaccagcaaacagtccgttacttggatctatgcccaaacctggaggtttccctccattgggtgctcatggaccttttcaacctgcaccaacacctgtcccacctctggctgggtggatgtcaaaccctccagcaataacacatcctgctgtgtctggtggtgccattggatttggcactccaacaaatcctgccgttttgttgaagcatcctagaacacccacaactggtaatcctggtatggattatccatcaggagattctgaccacatttccaagagaactagaccggttggcatgtctgaggagagccataattaccaacaagatgatttccacaaagctgttgcacggaccttgagccaaggatcagcacctatgagcatggatttccatccacttcaacaaactcttcttcttgttggtaccaatgttggcgacattggattgtgggatgttggtaccaaagagagactcgttgtaagaaacttcaaagtctgggaccttggtaaatgtacaatgaccctacaggcagcactggttaaggacccagctgtgtcagttaatcgcataatatggagtcctgatggaaccttgtttggtgttgcttattcaaggcatattgtacagatttattcctataacggtggcgatgatattagacaacacttggagattgatgcacatgttggtggtgtaaatgacatagcatttgctcatccaaataagcagctatgtataattacatgtggagatgataagacaattaaggtatgggaggccactagtggagctaagcaatttacctttgaaggacatgaagctcctgtttattctgtgtgtccacattacaaggaaaatattcagttcatcttctcaactgctttagatgggaagatcaaggcatggctatatgataatttgggatctagagttgactatgatgcaccaggtcattggtgcactacaatggcatatagtgcagatggttcaaggttattttcatgtgggactagcaaggatggtgaatcacatctagtagaatggaatgaaagtgaaggagcagtgaagagaacatatcagggattccgtaagcgatctatgggtgttgtgcaattcgataccacccggaacaggtttttggccgcgggggacgaattcatgattaagatatgggacatggacagcacgggtcttctgactaccattgatgctgatggtggcttaactgcaagtccacggatacgcttcaacaaggagggaactctattggctgtctccactgctgacaatggtatcaagatcttagcaaatgctgatggacttcggttgctgcgcacactggaaaatcgttcttttgatgcttctcgtaatgcatctgaggctgtaacaaagctgcagcaagcagttcaggagctggtgctccgtcagctataactgcaatgaatggtgatagcagaagtttggttgatgtaaaacctagaatagctgatgagtcacttgacaagtcaaaggtatggaagcttatggagataactgagtcaagtcagtgcagatcaatcaaactggcggataacatgagaacaagcaagatttcgagattgatttacacaaactctggtcttgctatcttggctttaacttcaagcgctgttcatctactctggaaatggccacgcagtgatcggaattctggaaaggcaaccgcaagtgtatctcccactctatggcaaccaccaagtggcatcttgatgactaatgacacgactgacaataatcctgaagaagctgttcactgctttgctttgtcgaagaatgattcatatgtcatgtctgcttctggaggaaaaatctctctgttcaacatgatgactttcaagacaatgacaacgtttatgcctgcaccgccggcagcaacttttcttgcatttcatccccaagataacaacataattgcaattggaatggatgactcaaccatccaaatctataatgtccgaattgatgaggtcaaaagcaagctcagaggtcactctaagagaatcacaggtcttgccttttcaaatgtgctaaatgttttagtctcgtcaggagctgatgcccagttatgtgtttggaacacggatggatgggagaagcaaaagaacagatttttgcagataccatcaggtcgccaatccaatatcttggacactcgtgttcagttccaccaagatcaaatgcactttcttgttgtgcatgaaacccagattgccatctatgaaactacaaaactagaaccagtgaagcagtggcctgttcgagagaattcacctccaatcacacatgccacattctcgtgtgatagtcaactgatctatgcaagctttatggatgccactgttggcatatttaatgggtcgagtttgagacttcaatgtcggattcttccagcttcgtatcttcctccaaatatcagtccgagcgttcatcctgttgtggttgcggcacacccttcggaagcaagccagtttgctctagggctgactgatggtggtgtttttgtgttggaacctttggaatcggagagaaaatggggaaatcctccaccagtagagaatgggtctgctagcaacttgtccacaccgcctcctaatggagcttcaagttctgaccaaccagaaagatgattaagaagttggaactggtagatttttcgtggcacgagtctaaccaagaagggcttcaaagggtggtgcgactaaccttggcagataggttccaagggagccggacaatgcgctcaataaaaataagttcaacagaagtttgtccgttgcttgtataaatatttgtattgactatcgagtgaggagtcctagtatttcatttttgctttgtttgcggtgctgtgaaaaggatcagtagataagctgtagtacaacaactatcagactggctgtacttacctatatttatgactattagttaatgtatgttgtttcatttgcctttttggctccgttcagccgtttttgctatcataaagtgctgtttct

SEQ ID NO: 22078 - DNA, 2156 bp, Zea Mays
ctccgttcccctccttgtcccctggggttttgctgttcctcgttgctgagcagtgattggaggggctaccgggatttttgctacttgcctccattgatggcttatcttcttctccatcctcagttcacttgctcccagcccccttctcatcgattgaggacttcacaagatgccgtggatgggttaagcgatgaaagtgacggtgaaacctcaacaaaaaagaagagaaccccaagacgtggaagaaagaaagccaccgttgaaacatcgagagatgtaggagaagaaatcgaagtcatcactgaacaaacggccgctgaagagactaaggaagttaagaggagaggccgcaagaaagctgctacttctgcaagctcagaagaggagaaggataaggccaaggaaccgaagaagaggggacgtagaaaagttaagactgtagaggaacctattgataatgctggagagcatctgagcaaagatttgatgctctataatgaaagagaagatcagactcgtctacagaattctgccagtgttctggaaagtaaaatagcgtcagtgctacatgaggatattggagaggttgacgatttaattccgctcgtgtgctgctttggacctgccaaatactcctttattccttctggaagaccagcaaataggttgatagaccatgagattcatgatagaatgaaggacatgttttggtctccagacaaatttgtgagggcaccaggagggtcttcatccaatgttgctctagctttagcagcgattggtggaagggttgcattcatgggaaaattaggtgatgatgactacggtcaaagtttgctgtatcacttaaacatcaatggagttcaaactcgagcagtttatatggacccttcagcaccaactgctgtgtctttgatgaaggtcagaaccgaaggaagtctgaagacaaactgtgttaaaccttgtgctgaggattgtttcctgccgtctgatatcaacccggcagttctaaaagaggctaagatgttttactataattcttcagctttgcttgagcccactacagagtcatcattgttgaaagctattgatgtttcaaagaaatttggtggtacaatattctttgaccttaatcttccacttccactatggtcatccagcaaggaaaccaagtcactcattaaggaggcatgggaagctgccaatatcattgaagtcacaaaacaagaacttgagttcctttgcagcatcaaaccttctgagaaatttgacacaaatgataatgataaatccaaattcacacactatagttcagaagttattatgaaattgtggcacagtaatctcaaggtcctctttgtgacaaatggtacctccaagattcactattacacagaaacacacaatggctgggtccgtggtacagaagatgcaccgatcactcctttcaccggtgatatgtcacaatctggcgatgccattgttgcagccctcatgaggatgctggtaattaaccctcacctgatcacagacaaggtttacttgcacaaggcagtcaaacatgctattaaatgtggtgtcatcgaccagtgggtgctcgcgcgagaacggggcttccttcccaaagagagagcagatccaaccagcgagcagtacgaagtgaagtccatcacagagagggaataccgcacacttcctgatgccatgcaatcagaaaacacgtcaaccagtgaacttgcttatgtggagtgaaaggacaggccattggtgtctgtacactggattcctctatttatttatggaaactgactggtgctgcagttggtattcagaagaattagtttaaacatgcagattttaggtttgtcgagtgtaggttaatagcccccaaagtaagactaacatattgataacatagagacaatgcaaatgtggctgatgccaggaatttttcctacaatgcaatatttgttcattcttgatttctctgcaacaccactatcaattgtgggatggaggtcatttgatcttatcggttatgcaccaaatgttattatcatatatccagtgtatcaaaaatatattacatgactgaactcaccagtctgtttccttttcaggtaaaagaattttttccttaacactgaatgaaatat

SEQ ID NO: 22079 - DNA, 2956 bp, Zea Mays
gacgaactcttggttctcaagctttcccggccagtctcgcagcaaccctttccctaccccgatcgagcgtgcgtcaaggtcgggatccggcgccgccgcatcccgatccgatgctctccggcgtcgaccacgacgttcccgacggcatcgggatggcgcggctcgcgtggacgcgcctccccaccgccgacggggagggggcgggcccctccacttccgaggccgcggacgacgaactcttatcgggcgctgccatagagagcctcgactacgaggtcatcgagaactacgcgtaccgggaggagcaggcgcagcggagcaagttctgggtgccctactacgtcatgctcaagtggctgttcgctctgctgatcggcgttggtactggattagctgctatattcataaacctggctgttgagaacttctctggatggaaatatactgcgacatttgctataataaagcactcgtattttgtgggattctttgtgtacacagttttcaatttagccctggtcttctcttctgtatatatagtcacaaactttgctccagcagctgctggatctggtattccagagatcaaaggttacttaaatggagtggatacacatggaatcctccttttcaggacattagttgggaagatctttgggagcattggatcagttggaggtggattggctctagggaaagaagggcctcttgttcatactggggcctgcattgcttcgcttcttggacaaggtggatctgcaaagtaccacttgagttctaggtgggtacggatttttgaaagcgatcgtgataggcgagaccttgtgacatgtggatgtgcagctggagttgctgctgccttcagagctcctgttggtggggtactatttgccttggaggaagttacttcctggtggagaagtcatcttatgtggagagtattcttcacatctgccgtggtggccgttgtggtgcgttcagccatgaattggtgcaacagtggaaaatgcggtcattttggagctggaggttttataatatgggacatatctggaggtcaagaagattactcataccaggaattgtttcctatggcaattattggtgttatcggtggacttcttggggcattatttaatcaactcaccctctatataactaaatggcggcgaacgtgtcttcataagaaagggaaacgagtccaaatctttgaagcctgtcttatatctttggtaacatccacgatttcctttgtgttgccactactgaggaaatgcagcccatgccctaagttagaaactaattctggcatagaatgccctcatccacctggcacagatgggaattttgttaacttctattgttcacaagatagagagtacaatgatttagcaaccattttcttcaatactcaggatgatgcaatacgtaatcttttcagtgcaaaaacatttcatgaatacagtgcacaaagcctgatcactttcctggtcatgttttatttcttggctgttgtgacatttggaactgcagttccggctggccagttcgttcccggaataatgattggatctacatatggaaggcttgttggaatgtttgttgtcaagttctataagaaactaaacattgaggagggcacgtatgcactccttggtgctgcatcgtttcttggaggttcaatgagaatgactgtatctttatgtgttatcatggttgagattacaaacaacttgaaactcttgccattgatcatgcttgttcttctggtttctaaggcggttggtgacttttttaatgaagggttatatgaagagcaagcccgattaaggggcatccctttactggattccaggcctaagcaagtcatgagaaatatgaatgcaagggatgcgtgcaagaatcaaaaggttgtctgcctaccacgtgtttcaagggttgttgatatcatttctgttttgcgaactaacaagcataatggtttccctgttgttgaccgtgggcagaatggcgagtcacttgtcataggtctcatacttcgtagccacttattggtacttctacaagctaaagtagatttccagaacagtgctttcccctgtgggccaggcgtactgaacaggcacaattttagtgactttgttaaaccagcatcaagtaaaggaaagtcaattgatgatattcatttgacagaggatgaactggggttgtatttggatcttgccccatttttaaatccttcaccatacatagtgccagaggacatgtcgttggcgaaggtgtacaatctcttccgtcaacttggattgagacatatatttgttgttcctaggccttctcgtgttgtaggattgataaccagaaaagatttattacttgaggaggataacaacaatgtgatgccggagctccaatcgacgagtgggcttgctgaacggcaaaatgctcgggggtaatatacatctggaacgtcctcttcttgacaacctagttattgaatagacacgtagcagcatgtatgtcaaaataattttgatagctagcagttaaccttgcactgcatgttgggacatggcccatgggtattatacttcacatgaatgatgaagcagcagtgagcggataatgcagcatggttttggattctgccgactgttgcgcatggatgttggcgttgcgcatcattttttgctccgtcagcagtggctagggaggcgattccccggtgccgtgtgtttagattaggtgattgtaacttacaaaggcgtccatacatacacaccatccatgtatcccacggtaaatttcgaagactgtatgtataagtacatatttgttatacgatggtaaagacaaaagctatgtaggatttgcgtgctctcatgaaactatgatacgtggctataattacttccggttcccgctgaaatcgctagaattttccattgactacatt

SEQ ID NO: 22080 - DNA, 1061 bp, Zea Mays
cctcggtgactgacgcgtggccctcacctccgctttcccctcctcccaaataaaacccgaccgcagccgccggtcgtccaggaacgccgccgccgccatggccactgccggagccttccacgccggcggcttcctcctcctcccggtccgacgaagtctccgcgggcccagcccctcaccatggtcccacttccgcacccacttcatctcctccaagccgccgccctccacccctctcccgccgcccgtgccgccagctcgcctgtcccccgtgggttctgccttcgggcctcctagcagaaagaccggcgcggttggagccggggctggcgcgggtgtcgtcgggtggtaccttggcctcttggacgcgcggcccgtgctgaccaagagcgtcaccgccgctgtcatcttcaccgccgcggacgtctcctcccaggcgagactgttgctgagattattgcaagattgaagagggatctagttcccaccatcaaaagcgggcttttatactggccaacttgtgatttcattactttcaagtttgttccagttcatttacagccgctagtgagcaattcattctcatttctgtggaccatctacataacatatatggccagcttaaagaaagcagatgtggaggtggccccgagtacctaggtgttgtcgagtgactcaacatggctgttatctgtcgattcttcgtacaaggcagacttcatgtatgcctcctggatcgcggatgttatcgaccggcgattttaggctttagagagatggattgcttacgatgcatccttcacttttggttagggcatagtgtccacagggattctacttgcttatgtttttggctgaagaccattttgtttggatgatcgaattatactaggttcattgggtgggtcttctacgacgtctttcttacggtcttttgatcctatggctaagaagtacatttacttcaactaaattttctgtatctagttatggagatgcaagtgaacctgttctttgccacaaacaataacagacacaatctatctcatccttttcttctc

SEQ ID NO: 22081 - DNA, 1294 bp, Zea Mays
gccggttctctctcctcccatccagtcttacccctgctatttgtacccgccttaccgcgccccctaaccctaggccctcaattccactctgcccgagcaagccgaattgtcgtccgaattcgctcgcggggagcacttgctacctcgcgcccgccttctgtcgcgcggattcgttgctgcgcctggagatggacccgatggacatcgtcggcaagtccaaggaggacgtctccctccccaaatagttcatcaatctcctttcgtctgaatcgaatgaagtgtgcagcagagaagagaaaaaaacgattgctcctgagcatgttatcaaggctctaagtgatcttggcttcagagagtacattgaggaggtttatgctgcatatgaacagcacaaacttgatactttggattctccaaaagctggcaaattcactgggattgagatgacagaggaagaagctgttgctgagcaacaaaggatgtttgctgaggctcgagcaaggatgaataatggagcccccaaaccaaaggagacagaacaagagccgccacagcaaccacaagcacaaccccaacttcagctgcatactgaaccacagcaacccgtgcaatctcaagtgcagttgcattcgccaacacagcattccctccaacctcaagtgcagctgcacccccagccacaacagctcccacaagtgcaggtgcactctcagacgcagctgcaccctcagccacagcagccccaagtgcaggtccatccgcagctgcagcaactcccacaattacaggcccactcgcagccaccgcaaccccaagtgcaaatccacccacagccgcagcagcccccacaagtgcagttgcagtcatcagtccagcagacctcccaaccccaacctcaggtacatctctacaatcacagggggggctcacaagcgcagctgcagccccaactgccaggtcagctgcagacacaggggcaaaccggacctggcattgacagttagagactactgctggcatatactaggaacctgtatgcttgcttgtgactcgttagatcctgatttaggtttctgtgcttcctgtacaatgtaaatccagtgtgattgcagttgccttgttgctaataatgtgaaaccgttagttactgatgatgtccttactgtgtcgaatactgaatgtcatggcgtggcttatgtgccatgctgaatgatgttctgtggtcattgtaatagcctaacttgacatctgtccatgatgatagtgattgatttgaatgagctcttggtgcata

SEQ ID NO: 22082 - DNA, 166 bp, Zea Mays
tcataccatgcatgtgtcttactcattgcattcattagattgcaatctcgctgacggagagtacgtgctcatccccgagcaaggtggtgtccatgaggaggaccaggagcaagctcccgagactgccatcgaggatctccccacagccccagctattgaaggcaag

SEQ ID NO: 22083 - DNA, 270 bp, Zea Mays
tgtttttcaggttataattttgttctgttgtggatgctgctaagtgctggtgagctcggccttcttatttaggtgtatcccatcattagcttctttattgaggattgtcacttaagcgagcatgtattttaaaacttataaatgctttatacattcaaattgtaatctttttgaatcaatttcttttgtaatcacttcgatgatgtataacgaaatcttgatgtaacttgtaatcattttgtaataaagaatttatttccactgcaaatg

SEQ ID NO: 22084 - DNA, 2364 bp, Zea Mays
gcacagcgcagcacatgaggagaagaagagggaggagtaattatttattaattaacaaagagaagacttcttccttcctcgtcgtctccagcccattccaattcttgattccatcgccccaccatccacaactcccctaatccttccaacctcctcgtcgtccagtccaccacctccacgcgcaatggccagcggctaggcggcaccaaccagatcacaaggattcgtttcatccggcagcgcagctctagagcctccatgggcagctacgcgtacaagtactgtatgtgcttcacgcgcaagttccgatccccggacgcccagccgccgccggacgtccgcgccgcccacctctccttcgcctctgacgcccatgccctccgccgcttcgtcgccggcgtccagggcgagtcccccgccgacgtcgaccgcatcctcgccatgctctccgggggccacagccatggaatcgcccgcctcgtcacaaggtcgccggcggcatccacgcccacgctcgaagacttcttcgccttcctcttctcccccgacctcaacccacccatcgcgcaccaggttcaccaggacatgtcagcgccgttctctcactatttcgtgttcaccgggcataattcctacctcactgggaaccagctcaatagtgactccagtgacgtcccaattgtaaaggcgttgcagagaggtgttagagtcattgaactcgatatgtggcccaatccttcaaaggacaatgtcgatattcttcatggagggacattgactgccccagtggaaatgatcaaatgtttgaagtccatcaaagaatacgccttctgtgcctcaaattatcctcttgttattactcttgaggatcacctcacatcagatctccaagctaaagttgctacgatgctcactgaaacatttggagatcttcttttcgtccctaatccagacccgatgaaagagtttccttctccagcatctctaatgaagagaataatcatatcaaccaaacctccacaagaatataaggagtttctcaaagccgagaataatcgcagtggcagcggaaacatagctgagttgccagaccaaggaagcctgagaagaatagattcaaatgccgatgaatctgatgggaaggatgaactggatgagcaagacgaggaagactccgacgaggacgatcccaaatttcagcaggatacagcctgtgagtataggaaactcatcaccatccaagctggcaaaccaaaaggccatttgcgggatgcgctaaaagtggatccagacaaagtcaggcggctttctttgagcgagacacagttagctaaagcgacaatctctcatggtgctgaagtcataagaagaatatactccgtgtgtatccaaagggcacgagggttaattcttcaaactacgatccaatgaacgcctggacccatggtgcgcagatggttgcgttcaacatgcagggccatgataaagcgctccggttgatgcaagggtttttcagagccaatgggggctgtggttatgttaaaaagcctgacttcttgctaagaacaggtccaaatggggaagtatttgaccccaaggctagtttgccagtgaagaaaaccctcaaggtgaaagtttatatgggagacgggtggcgcatggacttcagtaaaactcatttcgatgccttttcgcctccagatttctatactaggggatcgcaggtgtgaaggcagacagtgtgatgaagaagacaagggtgattgaggaccagtgggtgccgatgtgggatgaggagttcacgttccttctgacggttccggagctggccctcctgagggtagaggtccaggagtacgacatgtcggagaagcacgacttcggggggcagacagtcttgccggtatgggagctgaagcagggcatccgtgctgtgcccctgcacgatcgcaagggtgtcaggtacaagtccgtcaggctcctcatgcgatttgattttgtgtagccgagccgagccgccattcagattcagcttctgtttttttccttcttgtgtgaattgaatgtattactcccttccttccatcttcaacgtatatgtgtatgtatgtacttatttttgtcggaataaaagttgtatggaatggaatggaaggaaggagtagaactgtcttcaaactccagcttctagatctgtacgggtgattcagttttacttgctggcacattgtttgtttgtttactttactggagatagatttgtacattagcttgattattcttcatttagctactggctaagagatagattagccaatgtgtttgaaagcctttatcatggctatatgaataagataaggagga

SEQ ID NO: 22085 - DNA, 389 bp, Zea Mays
tttagttcaagcaataccttctctttattacatatgtttaagcaggtgatacacaagggattttcatcaacaagtggtcgccagaagaactgaaacatcaagatggcgtttgcttttaggtcatgccattcaggagatgatgttttattattatgcactgagactatgtttgacattggtcgtgtacactgagactgttttattatgatgcactgagactatgtttgtgtacactgagactatgttttattatgatgcactgagactgttttattaagcagtgtgaagttcacagctgctgttctcattttaatgcaattgtgttcaatgagcagtgttgaatgacaaacagtgttctcagctgctgctcatttttatgcaaacatttg

SEQ ID NO: 22086 - DNA, 1490 bp, Zea Mays
aatcccacccaccgccgcccgtctcccgctcaagccccgcctgccgagctagctagcttccctccagccccgtccgctcgcctggaagctgcctgcgcttgcgcacgtgggcgcgcagtgggagaagaacccacccacctcccgcgtctgcgtacgtttttcacccggccgcctcgggggctcagggctcaggcaggccgataccctccccaatccccaccggcaccgaggcgctggccgacgaggccagcatgaagccgcgggcgttcctggagcgcctggcccgccccttctcctcctcccgccgctcctcctccgaccagtcccgccgcgacagggaggaggaggcggacctcgaggcgatcgcggcgcgggagcagcgcgcgttcagccagcagcaacagcgaccggtcacgacgagcggagctgacctggccgcggcggcacgaggttgtggtcggcgtggcgcgtggcctgctctacctccacgaggatgcgcacacgcccatcatccaccgtgacatcaaggccagcaacatcctcctcgacgaccggtgggtgcccaagatcgccgacttcggcatggcccgtctcttcccggaggccggcgatggccactcccgtgttcatacccgtgttgccggcactaacgggtacatggcgcctgagtacctcatgcacggcgacctctccaccaaggccgacgtcttcagcttcggcgtggttgttctcgagatcgtctcaggccgcaagaactccgcctttatcccgcccccggacgccgaggccgacagcctcctggaatacgcatggaggctgtacaagaaaggtcggagcttggagttgcttgaccacgcggtcaagtcgtcggcggtgccggagcaggtcgagctgtgcgttcgcatcgggctgctgtgcgtgcaggctgacccgcggctgcggccggacatgaagcgcgtggtaatcatcctgtccaagaagcagagcacgctcgaggagccgacgcgtccgggggtgcccgggtcgcggtaccggcggaggccccacggcctgcgcggcacgcactactctgctgggtcatcgtccggcaccagcttgccgtctacgtccgcaacatcggacgcgtcagcgtcagcgtcagcgtcggtctccaacgccatgacgacgtcgagcacccacaccatgaggagccaaggcttgccctcgcaccgagaagaacacgagtaggagtaacagggcgagccccaactgtgtacatttgtcaattctttcctgttttcttcagtttggtgttaattccgatcagggtggtgaatgggattgcagagtaggtatagatgtcatgattgttttgctagcttaggatggtgctgaaaattaagctattgacgggtccatcaccgaatctgtggtagactgcaggcaaaaactgtgtatatataaaaacgagaaaaagcaattttttttaacgagaaagaacaaattctaag

SEQ ID NO: 22087 - DNA, 1311 bp, Zea Mays
tgaacagggagatcttttgctctcacgcagaaaaaatgtttggatagaactttctgcttctccgtccttaagcccaagtggaagaaggaggagggggctttgacgccggcgagccatggcgggggctctgctctcctctccccattatctctggagccccacttctcagccctcgcttcgccccaggagcaggggaccgctcggcactggggcagtgcgtgttctgccgccgaggaggagggcccgtgtgctcgcttcgtgctctcgcgagcctgccgccatgaaccgcggtttggaggtggagaggaggcgccttctcatgtccgggctcgtgtcttctttcacaatcgtgctcccgatttcaggagcatatgctgttatggagactaatgaagacgtaaaaatgaacacacaagttgatgagatcaatgcatactcttttctttacccggtcgaactgccaggaaagaaattttccttcaaatgggtagagtccagaaaaccagagcgatattcctcagcagcaccactatcacctgatgcacggcaacgaattgtatcggagcgagttgacatgatacataatgttgtcatctcagtctcgattgggccaccgaattcacgttttttgccttccaaagacaagagtttgtgggatccaaaagatgttgcagattgcattttatctgatagatctaccctgaaggtgacgactggccagcgcatgacagagagttctgtccttgatgcacatgctacagaggttgacggagaaccatactggtattatgagtatcttgttcggaaatcaccaacaaaatctgcatcagaaccaaatttgtttcgacacaatgtaacgtgcactgctgagcgtgatgggtacctgtactcactgaatgcttccactcttagcaaacagtgggaatctatggggccctttctgcaacagactgttgcatcatttcgccttctcccacctacagaaaactatgttcctccctacaaggatccttggagattttggtgaatggagatccttttttgtagttaccatttttttcctcttcagattcaggttttagaccatatgtttttcacaccatatgtttagtgagtgttgtcctttcaacttgacagataaaattcagagacccattttggttacaccaatcctgtccgttctgattaattaacagtcatattcaccttaagagttactctctttgtcccaaaataaattaacttcttgaatcaccctaagtcaaactaccttgagtttgaccaactttatagtaaaaataacaaaaaaaa

SEQ ID NO: 22088 - DNA, 2791 bp, Zea Mays
cacgcgcggtgttctgcctccagtcggtcgcgatagcgctctccatcctgccgccgccgcctaccatttctgccattcctgtctattcccatcgttgaaaccgctcgccctctccacgtgacatccaaacgcgaccgccccctccccacccccaccagccgcccgcctcctctgcgtcgcatccgccgcgagctcggggcgggacagcctccacggcggcggggtcacgctgaacagggagccgctgcagggccggcgcctgcacgccatctccgtgtatgtgagcgggatgctgaccgtgcgcgagacgctgctgttcgccgctgagttctgcctgccctgcgcgctttcctcagagcggaagcgcgcgcgcgtcgaccagctcggcctcttctacgctgccgacaccatcaacggctggcggcagcggcgttcctatcgcagccatgcgccgtcgacgtcgtctacggggaggtgtgggcaggacggctggcactgccggtggtgaacggggaagagctgtttgcacgcgggctgttgggtgtcgagctcgccccgatgacgttccgtcgttcgcagcaaagccagactggtgccctgtgttccttcgggcatcactacggcaatttgaggggctagaggacgccgccgacgtgctcgtcaactcattccacgagatcgaacccaaggaggcagattatatggccctaacatggcatgcaaagacaataggcccaacattgccatcattttatcttgatgatgactgtttgccgttgaacaagacttacggtttcaacctcttcaacagcattagaggagcttggcaatggattgtacaattctggcaaaccattcatttgggttgtgaggtcaaacgaagaacataagttgtccaatgaactccgtgacaagtgcaaggaacgtggccttattgtttcttagtgcccccagctggaagttctagcacataaagctacaggttgtttcttcacacattgcggatggaactcaacattggaagcaattgttaatggtgtgccaatggtggcaataccacactgggcagactagccgaccatatcaaaatatatggagagcatgtggggcttgggtgtccgggtgcgcaaggatgagaaaggcttggtgacgagggacaaggtggaaaggtgcatcaaggatgtcatggatggtgatagtaaggataagtataggaagagtgccactatgtggatgcaaaaggccaaggcagctatgcagaatggagggagttcggacaagaatattacagaattcatcgctaagtattctttaagttaattttcaaagatttcgtaaaaaagttaattttcaaaggtataatgatagtgttataattactttctaccttcgtggattgtatgctgcatgttatattttgtctcaggattgtgcgtattacgttttgacttgatgctgtagatgctacaacagcaacctccacgtctaaaaatatatacattgttatgcgctatcctttgaaactttataatcacattatctttacaactaattaagtactcattgtaggcgtccacacgccgcgagctcggggcgggacagcctccacggtggcggggtcacgctgaacagggagccgctgcagggccggcacctgcacgccatctccgtgtatgtgagcaggatactgaccgtgcgcgagacgttgctgttcgctgccgagttccgcctgccctgcgcgctttcctcagagcggaagcgcgtgggcgtcgaccagctcggcctcttctacaccgccgacaccatcatcggcaacaggggccaccacggcacgtcctcggcagcggcgacctgtacgcggtgtgtgctggtgatgcaagtggcggcgtgggcgtgggcgtgggcggcctatacgaggtcgtgtacaacaacgtcgttagtctatgtgtcaaggccattgggtggaggcccgagcggaggttcaagtggaagctcctcgacggctcgacggggagaagaggagcgcccacttccctatggtcctggtccagatgcccatgtataacgagctggaggtgcataagctgttagcggcagcatgtgagctgcagtggtcgaaggacaggataatagttcaagtggtggactattctactgatccctttatcaagacctgaagatgaaagaagagcaccggcccactttgcttcataggaccactatatggaatggtatgcagttggtggactctggcttttgtagcgtaacatagtggtccatggtgcacttagaaaggacaatctaatcatgatgcaatgacatcatatgtgattcatgatatagcatcgacatcatggttcaattatcgtgatatatgttcccgttgcaacgcatgggcactcacctagtaccttttgaagtcctgaaccaccacgagagcggcggcggcggcggcggctcccaagatattttcgcttcctaaattcacaatgcaggatccgagtccgatacgtcctgggaatgggagcgtccgcacgttcgactctgctgggtgccgcggtcgccgcccaccgacggaccctgcagcttgctctactgtagccgccacccgtcggaaccctagctccatggctgcgctgcgtgggcgagagactagcgagagaagccactatcgttgacggtcagcattcagccccctagctaattgctgttttctacgatgtgtcgttgtttgtcaaacgttcaaccataagctatttcccatactgtagccccactagttaagtgttcg

SEQ ID NO: 22089 - DNA, 1887 bp, Zea Mays
gtcagatctcggatttaccgatccccacggccacgagggccctccgcagtccgcaccgcagccactgggcagacgaggagaagcttcgcggacgccatgtcctcgccgtcgccgctgtgcgccgcctcctgctccaccgctctccgcgcgccgccgccgcctctccttcgcttccgccgctcttatgctccggtagccgcctccgtgccgcgcacggcgcctgccgtctccgatgacctcgtcctacgcatcgccgaacagctggaggactcggtgacctccacctccccgctcctggaccccctccgctccgcctctgcgctctccctcctctccacacgctggcccactcgccgttccagcgaggccttccgcttcactgacatctcctacctccgctccctccccatctccctcccgtccagggagcccgacctcaagctgccgtcctcccctttctcttcccacgtgctcttttcggatggaatcctcgtctcttcctctggtgcccatgtcagcgccctcgccgatcttccccctggccgcgcccgggaccgcgccgccgccgcgctcgcggccgccgctgaattcgcccacaaggacctcttctatgacttcaacgccgttggggcgagggacgttgttgtcgtgcacgtgcctgagggggtcaaggtggccgacgacccaatacacatcatgttcgcctataccaatagcttcgctgagagtatgctgatgtcaaatccaagggttctagttgtggccgagaagtcagcagaggtggctatagtggaggagcattttggggctggagaagaaggtggttgctattgggccaatccagtggcagagattataattgacgagggcgcaagagtggttcattcatacgtgcaacatcaatcatttgctgcagcacatactaaatggacagtcgtccagcaggatacaactagtaagtatgagtttgttgaggtcagcactggagcaaaattgaacagacacaatctccatatcgagcaattaggtcctgagacagagacagaactatcaacacttcacttaacgtctcagaataagcagatacatgatctgcatagcagactgatacttgatcaccctagaggtttctcgcgacagctccataaatgcattgcttgtggcacaggaaatagcatatttgatggcaatattaaagtcaacagtagcagttctatgtatcaccaatacaccagggagggtgccgcacccatatcggatacggtgatacatcccgatacgcatgtcgcgaagtattagggaaacgagataaaaaaactgaatggtttagctcacgatacggtgcaatacgctgtgccgatgcatgccagcccaatagtacctcattttacagcccaatgcaagcccaacatcattagcccatcaccatccattctcaagcctcacccaagaacaaacggtgcctcgtctccaactcccacctcttgcttcttggcgccaccatggacagggagtcagggagtgtcaccacctcacatggagcacatgccacccggatctagcgctgccaactactagtagcgcatgccgtaagaagctagtgccactgcctcgctgggaggcacgtcaccactgggtgtgctgatgtcctcaatcctcatgattgagtgctaccgcttggatctgaactctgggacttgggagatcatcttgcgcagctgctgaaggttctgagataggtgcactctagctatgctgaccggtcagttcctggctgcttggtcatttagatcgtcgctttccttatgttttgttgaaattgattcgatcattttggttctctctctaaggacatgtaaatgcaatcattttaactatacattttat

SEQ ID NO: 22090 - DNA, 2135 bp, Zea Mays
cgcgcaacctcatctctaaaacccgctcttgtcttcagaagtttcagatcctcgcatcgtccgcaccttatcctctagactttacagtacctgctctcagctcctccctatctcaatggcatccgcgaatgccatctccaccgcctccctcctccggcccctctctcagggcagggcgacgaggtcacagcggttcgtggtgcgtgcgaacgccaaagacattgcctttgaccagaaatccagggcagcgctgcaggccggcgtcgagaagctcgcaaacgccgtcggtgtcaccctcgggccacgagggaggaatgtggtgctcgatgagtacggaaaccctaaagttgtgaatgatggagtcactattgcccgtgctattgagctgtatgatccaatggaaaatgctggtgcagcattgattcgtgaggttgctagcaagaccaatgattcagctggtgatgggactacaactgcgtccgtccttgctcgtgaaatcatcaagctaggccttctgagtgtaacatctggtgcaaatcctgtatcactaaagaaaggaatagacaaaactgtgcagggcctaattcaggagcttgagaataagtctagaccagtcaagggtggtggtgatatcaaagctgttgcatctatctctgctggcaatgatgaatttatcggatccatgattgctgaagcaattgacaaagtggggcctgatggtgttctatcaattgaatcctcctcatcttttgagaccactgttgaagttgaagaaggaatggagatcacaagcataaaggaaattcttccaattttggagaagaccacacagctgagagcccctctgttcattattgctgaggacattactggtgaagctttggcaactcttgttgttaacaagcttcgaggaattctcaatgttgcagcgattaaggctccaagttttggtgagcggcggaaggctgtacttcaggacattgccatcgtcacaggtgctgagttcctagcaaaagatcttggtttgttggttgaaaatgctacagaggaacaacttggcacagcaaggaaagtcacgatacatcagactacaacaaccctcatagcagatgcagccagtaaagatgagatccaggcgaggattgcacaactgaagaaggagcttgctgagactgattcagtttatgatactgagaaattggccgagagaattgctaagcttgccggtggtgttgctgttatcaaggttggagctgcaactgagactgagcttgaggaccggcagctaagaattgaggatgcaaaaaatgccacttttgcagctatagaggagggcattgttccaggaggtggtgcggcatatgtgcacctatctacggttgtccctaagatcaaagaagcaattgaggaccctgatgagcggcttgcgctgatattattcaaaattagatggtatgaactgtatttgccagaggcattggtagcacctgcttcattgattgcacacaatgctggagtagagggtgaagtggttgtcgagaagatcaaggagagcgattgggaggtgggctacaatgcaatgactgacaagtacgagaacctgatggaggctggtgtgatcgaccctgccaaggtgaccaggtgtgcgctccagaatgcggcctcagtagctggaatggtcctaaccacgcaggccattgttgttgagaagccaaagccgaagcctcaagtggcagagccaccggagggagcccttaccgtttaaaacttaacgttcttgaggctgctgtccagacggttcagatctgttgagagggtagaactttggtttgagaattttggttcagatccactgggagttgtagagtaggattgctattttgcagacgaagagtaattttactctggtctgaacttatccgaattgaagacatttgcatcaccattttttaaaaataagctcatggcgatgctggattgtacgagcaagtacagtatgtttttagcctctcaatttttgcgtctgtctcagcttggtttttagtgttgcgtaatctcctttgactgcgtataggatcgttttacgtaagattgtgttaattgaatgattagtgccttcgttaaaccgattttcc

SEQ ID NO: 22091 - DNA, 686 bp, Zea Mays
caatatccccttccactcccgattcgttctggcgcgtggtggtctcccgactcccccattggcccaatccctcatgccctgcctctacctccagtccatgtctcttccctcctagacctaggtgccagtggcggcgcctccgcactacggcctccagtctatgcctccacctccatgctccactgcacggatccggatccggcaacgacgacctccctgcggtcagcggtctgcgacctccattgattcgcaccacatcgttcgccccttcctagcagtgagcatacaaagtataatgaagggttgaccatgtacaccttcgatcggaaataatactcgagcagtgcaagcatgaaaacgaagctgagaagcttcagttccgtgttttggacacgcaacgaaggatcagtaagaggaagcgataagatcttagaggcttggacaacatgtctaatgatggaaaaaacttttatacccttaaaatatcttgtagtttgtgtgcataggactgagtgcatgattgtaatttttacaacactataaatagagatacaatgtcatgcacaggggacactttgtataagatcttcaaggcttcatgattctgtgaattctgtgatgtatatgtgatgattatgtgatatatgttctgtttgtttggatggaataacaaaaacaaataaaat

SEQ ID NO: 22092 - DNA, 3570 bp, Zea Mays
ggaaggcgaatcggtatcctcccgggcccggcagccggctcctgccgtcatattctctccccttctccgaccgatccccacctcacacgatactttccccctccactagggttccccgtccgttccccctcggccgcatcagctgtttgaggcggcaaccaagggccgcggaagcatctgtgtcgagccatggataaggggatcttcaccaacgatggctccttcatggagaggttcaagcagatgcagcaggaggcgcaggagaagaaggccgctgctgcctctgcctcatcggctcccaagcatgcgaaccccaagcaggggtttgctgttgcggcaaacaagaggccattcgagctgaagaacgctgctccggtagcctcagctggtaagctggcctttagtctcaagaaggccaaggtcgccgttgcacctgtgtttgcagccgacgaggaggatgaggatgctgtggatgttgagagggaggagcccgccaaacgccagaagtctgtgcaagctgatgctcctgcggcagctgccgcgtccggggctgttggtaattatttatatttattaatttcttgctgttttactgttagcttgtttagtgaaggcgttctatgggttgtagtttccaattttccatcgcatgattaggtttaaacatgtgataaggcttctaattcagtaaccgagacagaacatcagtgatatattaccttatagcttttcatgcaattagtgttttttcatcgaattcagtcacggatttagattatctcattgaatttgacgcaaatcatttcacacgcatgcgacataccttagtatttttactattgaagtgagttctaatttctgatatctgttcccaaagtattacagctggtgcagatgattgcattatcagtttctatgtagagtttttttattccatttatttgatggtgttgtcctggaagtattgcgattctgaacacatttgataatgaaactaagtaataactatatggtttgaatttaattttcttacatactgattattgaaatctctaaaggaccgtttggatggtcggtaatatttgagttctttatggttactaaaatataccataacatttaaagcttcaaggtgtttcgatacaacgatgtagttttacatccaattaccatgttattttgagttcttgaagaaaacctattcaaaactcattttccccatttttttttaaaaatcaaagcacacctcacattacctttggcaccattgtgagttatgaagcattggcctgtctaatttcatgcgaaagggcctccagctgagttggttaggtggtctgattagcactccttaggtcctgagtttagctccccgtgggagcaaatttcagtacgattttaaaaatcccctcgtctgtctcacgccaaagcacaagtctagtgcttggccctggtcgtggttgttcagcgaggcaggggttcggggggttttctcgacttgtatgaggtattcttagtacaatgtccaaggctgtctcacttccgcaggttgagttttttttttattttcatgcactagcagtacacattcctaatgtatatacttgtattgtgtacattcgttttcgattgtccacagggtacttaagcccttttcgattttccatatataaactattgctatgtatcaaagctagtagtatctatatatatgtctagctttattatttttcttctggtgtttgattatatagtatgatgtatatttgatcacaaaggaaaaaaacactaagccaaaaccacaaaatatgttattgttttttctatgtattattatattgtaaaaacagtgttctttttcacaacctatgtcatttcattactcgtgtattgaaactatgggtttgaaatgttctaatgtccagacattccataaccataataatattgaattcatgcatttatactagtgacaatgaatcttgcaatgcattttagcggtggaatttgtcaacatcgtttaaatttttagaaataaccattgaaattgcttgctgttgcaccaaggtgctgtgaacttttttgtttttgttttatgcatacatttttggtttacaaaagaaacatctccctctcatcatctgcatccattattagtcactattgtcaccagaaagtcgtgaaggttgtcttttttttatgactgcagcttatagttaactaaattgacattgctgggaaggatgtgattgagggagttggaggctctactgcagtaatttgcattgccttgtcatgcactagatattaatcagttctttaagtgacatgcagccccacccccaccaaatgatatgacagtgagacaagtcgctgacaaactggcaagctttgttgccaaaaacgggagacagtttgagaatatcacacgacagaggaatcctggagatacaccattcaagtttctatttgacaaaaactgtccagactacaaatattatgagtttcagcttgctgaagaggaaagggctcttgctcagtcaaaggaggctgaagcatcgaaagctaactctggcactgcaagcttcaaggcaccaggtggtacttatagaagctcatttgaacagaagtctaactatcagacacctgcatcagctttgtacggggcatatgagggtagttcttcccaaggaagctcttctagttatggtgatcatacagctccaccatcagatcctgtagcattgatggaattctatgcaaagaaggctgcactggaagaacggaagaggccaccaaggcagtcgaaagatgaaatgccgccacctccttctcttcaaggtcctcctaagaagggacaccacatgggtgatttcattcctcaagaagaacttgaaaagtttatggcacggtgtaatgatgctgcagcacaaaaggctaccaaagaagccgctgagaaggctaagattcaggcggacaatattgggcacaaacttttatctaagatgggttggagggaaggtgagggtcttgggagcgagagaagaggccgtgcagatcccgttatggctggagatgtgaagaaggatcatcttggtgttggggcagtccagcctggtgaggtcacatctgaagatgacatctatgagcaatacaagaagcggatgatgcttggataccgctataggccaaaccctctgaacaatccaaggaaatcatactactgatgtgggggagttcgtctgaggggagataatgtcaagaagttcgttattcagcatatttcttggaatgccacagatgcaaggcttccgggggttctacaaagctttgttctttgtgtagtgtgtttatctttgtgggtttaaatgtctgttcaaacgtgtatcatgtttcagactgttgtattgctttcttggatcacccttttttctgatctcatttcagttacaagttggaaccataaggtacaaaatttgtgttgggaggggttatattttagaatggagtgtgaataactatagctagcataaggctatctccagcagattagccatcctcacatctaac

SEQ ID NO: 22093 - DNA, 2003 bp, Zea Mays
ctgtactatacctgtacgcttcaagcaaaaccctacctgatcccaccagcgtggtagagtctgctcaacaccaaacttcgacgactgcgccggccgtcggccgtcgctgccgccctattttgaccccatcgccggcgacgataatcgccagctgaaggacaataactatcatggatgctactgcaaattcagatgtgcaaagggctgaggaatttaaacttaaggcgaatgatgccttcaaggcaaacaagttctcgcaggctatagagctttacagtcaagccattgagctgaatagttcaaatgcagtttactgggcaaaccgtgcatttgcacacacaaaattagaggaatacggaagtgctgtgcaggatgctacaaaagccatcgaaattgattctagatattcaaaaggttattatagacgaggcgcagcttatcttgccatgggaaagttcaaggaagccctgaaggattttcagcaggttaaaaaaatctgcccaaatgatccagatgctacaagaaagttgaaagagtgcgagaaagctgtccaaaagatccgttttgaagaagcaatatctgctggggatgatgagaggcggtccgtggcagactctattgactaccatatcatagaagtagagccacattatgcgggaccgagaattgatggggaagaaataacgatagagtttgtcaaagcaatgttggatgaatttaagaagcagaaatgcatacataaaagatatgcttaccagattgtgctaaaaaccttggatttgctgcgatcgatgccttcccttgttgatgtggatgttccaaacggtggacattttacagtttgcggtgatgtgcatggccagtactttgatttgctcaacatatttgacctcaatggccttccatcagaagaaaatccttacctcttcaatggcgattttgtggaccgaggatctttctccgttgaagtcatactcaccctttttgctttcaagtgcctctacccaaaagctatgtaccttgcaagaggaaatcatgaaagcaagagcatgaacaaaatatatggctttgagggggaagtgaggtcaaagctgggtgagaagtttgttgaactttttgctgaagtcttttgttggttacctcttgcccatgtcatcaacaacaaggtctttgtggttcatggagggctatttagtgttgatggggttaagctttcagacattaggtccattgatcgtttttgtgaaccacctgaagaaggtctaatgtgtgaattactatggagtgaccctcagcctcagcttggaagaggtccaagtaaacgtggtgttgctctttcctttggcgcagatgtgactaagaagtttttacaggaaaataacctggatcttattgtccggtctcatgaagtaaaggatgaaggccatgaaattgaacatgatggaaagcttataacagtcttctctgcgcctaattactgtgaccagatgggcaacaagggtgcatttattcgcttcacagctccagaaatgaaaccagatattgttactttctcagctgtgccacatcctgatgtgaagccgatggcatatgcaaataacttcctcaggatgtttcaatgacggaatataacaacattgtttagcaatttttatcagatgagtctgttgtgtgtcagctcccaaatcacatttcttggctaggtttaagtatatgctcccttgtacaacaaatcaaatgatgcaagggattcaactgtcgatttacttggatggtacatccatttttgtgcacgagttgtgattcttgtaactatccgtaaagtcttagatcattagattttagtttacttgtaaaattgctaaatcgtcatttcctgtcttgcttatcagtgagttacacacgtttagtgcttttatcaaattacatgtgtttcagcggtacaattcctaatatctgagtaatccttccattttaacccacaatgttcttacatagtttgg

SEQ ID NO: 22094 - DNA, 3367 bp, Zea Mays
cagggcacctcaaaactggggaggattcacggccgttccgggcacctgtctactctgtgtgactgtgtctgtcctgtcgtcgcgggccgcagcctcggcttcccagttcccacaccccacgcggccacccaccccacccgcacccggcgcctcgcttctttattccgctccgctcagcccgcccgccagagcatcacatgccattgccaacctctcactgctcgtaccgcctctccactccacctgctgcccctgcgccctgaccgcgaggggagggcgctgagctaccaaggaagccaaccggcgcggaccgggtcggtcaacgcttgctgtgcacccgaccgaggaagctaggaggatcgagcacggacatgttggcctcggcgtcggtgccggccgtctaggaaaagctcgcccgcagaggtaatggatgggcggaggaggggcggcggagctatggcgtggctgctgctgcttctcgcctcgctgtgcaccggcgcgtgcgggctcaatgcggacggggtgctgctcatgtccttcaagaacacggtcaccgcggacccgctgggcgcgctggccggctggagctacagcgacgccgcgccgtgcgcctggaacggcgtcatctgcaacggcttcccgcaggacgacaccgcgccggcggcggcgaacgtgacctcggcctccgccgacggcaacggcaccgcgacggtcgcgcgcaacgccaccggagcaaccgcggcggccggcctcggcgcgtcgctggcggcggccacggtgtcgcgggtcatcagcctcgtcctacccaacgcgcagctctcggggacgctgccgcccgacctcggccgcgtcgagcacctgcgccacctcgacctctccgggaacggcctcagcggcagcctgccgcctacgctgctcaacgccaccgagctccgcgtcctctcgctcgccgggaacgcgctgtcaggcgagctcccggacgcggcggcggcctatgcgcgcggcctgcagcagctcaacctctcgggcaacgcgctcgcgggccgcctccccgccgcgctgtgcaggctgccgagcctccttgcgctggggctcgccagcaaccacctcgccggtgagctccccgtcggaggcctcgggacgttggagcttgttgacctgagcgacaacgacttcaacggctcgctcccgtcggacttcggtgggaccgcactccgcctcctcaacgtttcgtccaacaagctcgccggcgctgtgccgaccgagctggccgccgtcgtccccgcgaacgcgacggtggacctgtcgcggaacaacttcaccggcgcgatcccacaggccggcccgtttgccgcgcagccggcggcggcgtacgagggcgccgaaaagctcaaggacttcgaggcgcaggtgcgcgccgtcgcccggttccgccatcccaacatcctccggctgcgcggcttttactggggcgccgacgagaagctcctcatccacgactacgcccccaacggcagccttgccaacatcgcattcagcagtaagttcctccttcgtctctctccagcaccaacgttcattcagatactagaaattgcatcggaaagttgcttgatttgacaccgactaatgatgcacctgtagtacggttcataggctcaaactttataatcatttgcaacggcttggtgagtcttatgaaaagatggcactttactgattgtacgtgctgcaacttaaatgcgcattagtagtactgattcaactattgtctgaaggaagagcttaatcgcattggtcacagtcacaggtactggtagtgcaaataaatttgtcattgctcacacgaatcattgcaattttgctgcaagtcttaaggactcgtccctttggtactgaaagaactgtcctttggttgctttgcttcatcagtcgcaaaatcagtacaactccacaacgcctaacgccttggcgttccatttttacgatcacgaggctcacttcacctgatttggtcatatggccctgtttgtttcggcttctggcagcttctggccaccaaaagctgccgtggactgctaaacgctcagcttttcagccagcttctataaaatccgttgggacaaaaaccatccaaaatcaacataaacacgtaatcggttgagtcgttgtaatagtagtaatagtaggaattcgtcactttctagatcctgagcccgtaactttatgttcctcacacgtaatcgtaatgaccggatgattttgccgcacctcctctgcagggcgcttcgggtcgtcgtcgccgctgcacctgagcctggaggcgcggctgcggatcgcgcgcggcgtggcgcgagggctggcgtacatccacgagaagaagggcgtgcacgggaacctgaagccgagcaacatccttctgggcggcgacatggagccatggatcggggacctgggcctggaccggctggcgtcgggcgaggcggcgccgcactaccgcgcgggcgcgtcggcgcggctgttcgggagcaagcggtcgatgcactcgacgagcagcctgccggacctgtcacagatgcccgggccgggcgcgagcccgtgcgggtcggcgtccgcggcggccgcggccgccagcgccgccccggcgccgtaccaggcgcccgagtgcctgaagaacctgcggcccacggccaagtgggacgtgtacgccttcggcatggtgctcctggagctgctctccgggcgggtctactcggaggtggagctgtgccagtggcacgcggggctggtggccgccgaggagcacggccgcgtgctccggatggccgaccccacgctccgcggcgaggccgacggccgggaggacgcgctgctggcgtgcttcaggctcgccttcgcgtgctgcgccatggcgcccggcaagcggccctccatgagggacgccgccatggtgctcgagcgaacggcggcggcggcggcgcccggcgccgccgcgagcagcagcggcgccgctgtgccctgagggggaaaaaacaactgaccttgtagcgcttggagccgttactgatcgcaataatcttactgcaagtgcacggacggtggtggcggcgtcggcgttgatcgccggtggcgagcttgtgtggtagggcgtgtacgtagatctgttactgattttggaggtgctgcgagaattaattaacctactaatcatctgtgtttgtgattgtggatttgaaagcgatgcatattccttttttttcgatcttgcgtctcggtggatctcaagatgtgtacttactgtgacagtgtcagtgtctgatggccacacgatcaatgggttcttctgaatctgatcgaccaaatcggg

SEQ ID NO: 22095 - DNA, 2341 bp, Zea Mays
tgcgacgtcggctcagctgcagtcctccccagaaaagcagagacgcgtccgacctccgacgctgccaccaacctcttcccccagccacgctccaccgcgccatagccgcaggaaaatatcaaatcggagccgcgatgcaccacagaaaaaaattccctagggtttccaagcaaaagccctcctgaattctccaattccgcgccttcccccgcttcgtgggcctcggatttagggtttatgcatggcttccgaccctcccggcgacggcgccggcggggaagagccgacgccgggccctgcccccgccgtggaggtgcttgctgctcccgccgttccgctcaggccgcgctgggccacggagatcaaggtctacacccgtaagcacccccgcaaaacccctaaacctcctccagaaccagctcccgcccccgcctccgtccctgcccctgcccttgctcctgccccggccccgaatcccctttccgaaaccttatcctcgattcgtcgctccatccgccgcgcggacacggttggcgctgcggcgcggcccgatccggcagcgccggcctcggttcccgcccgggggccacctggggaacgcggtgccgcctcgggggacccctcatctgaggtgaaccgtgtcggcggcggtatttctaacggccacggcgacgaccgggcggcggccgcggctgagaagtctgagaaagcacggaaacgcagggtgaggagtgagttgcggcgccgactggcgggggagctcgaccaggtccgcgtgctctccaagcggctgaaggaggctgccgaggccctggcgcagcaggaggcttctgagcctgcgcctttgcccatggtggtgctgccaacacagcagcaggtggtggatgctgggtatgtgcaactgcagttctcagctggtgatatggcggtgcccatgtctgctcagattgcagctgctgttactcctgcccgttccatgctgcagcgcagaccactaaccgtgtcggttgttcataatgaagcctttgagaaggtgaagcggacgccaaaggccaatcaattgtaccaaaattcggagttcttgcttgccaaggataggatccctccctcagattcacatgtgcgcaagaaatctaagcaccacaagaagaagcataggtccctagaatctcgtggcgcagactttgatgctgagcggcggctgtactctcatgcgttcaagaagtcctcgtcacttctaagccgtttaatgaagcacaagtttgggtgggtgtttaataagcctgttgatccagttgcacttggtttgcatgattattttactattatcaagcacccaatggatcttggcacgataaggggacggcttagccgcggacagtacaggaacccgaaggagtttgctgaggatgtccggctcactttccataatgcgatgacatataatcccaagggtcaggatgtgcattttatggcagagcagttgtcaggaatcttcgaggcacagtggcctgagattgaggctgaggttaactaccttgcatcgtgtcctccattgccgaagaagtttccacctccaccaattgacctgcacttcctagagaggtcagattcgatgagacaccacatggcattggacaccaattcaagaccgatcagtcatactcccacttacacccggactccatcaatgaagaaaccaagggcaaaggatccaaataagagggacatgacaatagacgagaagcgtaagcttagtgagaacctgcagaatttgccacctgagaagcttgatgctgttgtgcaagtcattaagaacaagaacctatcagttatgcagcatgatgatgagattgaggttgaaattgatagtatggatgctgagacactttgggagcttgaccggtttgtggccaactacaagaagaacctgagtaagcaaaagaggaaggccgagcgagcgatgcttgccagacaagatgcagagttgcgtgcgcagcgccttatacaacaaccgcaaccaaccccagtcccccaagaacctgttggtgaaaaatctctaaagcaagttgcaaaagattcactggcaggtgagcaactaccaacatctgcatcagagaaaaacgacgagaatagacagaacgtgagtggttcaagcaattcaagcagctccagcagtgactcaggatcatcgtctagtgactcagacagtgatagctcctcttcagatggatctgatgctgccaattcatcttgagatatagattaacttggagctggctgcctggctgattccttctaaggccaaataagatatttgtagaccttccagtgatgttgg

SEQ ID NO: 22096 - DNA, 234 bp, Zea Mays
gcttttacataaacttacatttatttagaaagtaagatcaagttacttattacataccagagctataaacgagtgctgagtagtattattacacataccaagggaggtaaaaactcctcccaatagttttaaaacgaaaagtcctatatggaggaccacgtcctcccgcatcttcactcttgtatttcttcatttgataccaccttggagcaaaagcaacaaaaatttgtcgct

SEQ ID NO: 22097 - DNA, 3735 bp, Zea Mays
gttggttgtgcattactgcattgcatccagtaaaaaaactacagctcaaccaaatttagccgagcggagacgcacaagccggcgtgggctgcattacacgagacgatcaacaagggcagcggcccagcagcaacgaaccaccgcacaagcgccaggccgccagctcgcactctggtccagccacgcggcgccgctgccaccttcctctcaccgtgtacgtcttcggcgtacacgtctctctctctctctctcctcccctaaaccctacgctgcccttctttccctccccgtctctccctcccgtgcgggcggcggagctgatgagatcccggccatggcgggccccacctcgcggctcctcatcctcgcccgccgcgccgaccgacgcagatgcctcccttttctcgttccccgcgccttgcaggccgcccccccgaccttttctccggcgttgccgctacctccctgcctccccgcctcaacgccggtgatgagctattcaagtgcatttacaagtgtacatggagagaggccttcatcagaatatgcaaagatcaggaaggagtcactggaaacccagtttggaagaatattgggttcaagttcacgcaggcattttgctgaccgtggctttggtccattccttgctctatacagggctgctactatctcctttcatgttgtaaaactcactatttggcatttgttgctcaatgatatgcataaaagagcagaaaagtttcgagagaccttgatacgcttgggtcctttttatatcaagcttggccaagcattgagcacacgccctgatatacttcctagtgcgtactgtcaggagcttgcaaagctacaggatcaaataccaccgtttccaactcgcattgcactcaggaccatagagtctcagttgggttctcgaatttctgatttgtttgctgatatcagcccagagccgattgcagcagcatcactggggcaggtttacaaagctcatctacgatctggagagcttgttgcagtcaaagttcaaaggcctggaatggcgcccttgctgactctagatgcacttttgttccacatgattggaggacaaatgaaacgatttgctaaggctcgcaaagacctattggtggccgttaatgagattgtcagacacatgtttgacgagattgattatattttagaaggaaaaaatgctgaaaggtttgctactctttattcacatggttcaagtggggtcaattctgaagctagtacaagtatcaaggtcccaaaagtttactggaactatacatgtaaaaccatattgacactggaatggattgatggaattaagctaactgatgctgagcgcatcagcaaagccaatttgaacaggaaaagaatgatagatgagggtctctattgctcattgcgacaactgcttgaagaagggtttttccatgcagacccccatcctggtaatctagttgcaactgaaggtggatctctagcatattttgactttggtatgatgggagatattccgaggcactatcgtgtggggcttatacaaatgcttgtacattatgttaatcgggactccttaggcttggcgaatgacttccattcactaggatttgttcctgagggaacagatttacttgcagttgcagatgcgttgcggttttcctttggtgatgtcaggaggcaatcaaatgatttccagggcgtaatgaaccatttgtatgatgtgatgtatgaatttagtttctcccttccccctgattatgcgttggtgataagagctcttggttctctagaagggactgcaaaagcactggatcctgagtttaaagttattgagagtgcatatccttttgtaattgggagactccttgcagaccccagccctgatatgaggaaaatattgcgggagcttcttatatgtgacgatggatccatcagatggaatcgactggaaaggctgtttcatggacctatcctttctgtgaacatgattactaatttgtggtagccctcttgacacatagaaccactaaggtaagattgaagggagtatccagcctatagatgtggaattattaacaacttttactgttgaccatctatttttttgggatcctgtattttgtttgggctgtatgatctgagctagctcagtttgtgggaatactcacaccactcaggttcgagttgtatttggcttgaatatgatcaacctgcaggggggtaagacaactccgggcattgcattaagaagaacttctcacacagagaggattttcctaaccctagactgaatatcctttcttgtgggagtcaaactcaggtcctgcagaggctatcaagtcacataaccatctcagctagagtccctttcacttatctgtttcttcttacttacaacatgacatggttccttctacttcggtcgactttttaaatatatattctgtgcaagtactgcagtgttgctcaaagaaaaatttgggttggtccagttctggtagtggtacctatgatctaagagccacttcataaactacagctatttgttctcctgttaacaccaatcaacgagttttcacaaccctgatggtagtgctgattggtcccaccccttagacagacaagtatgcatcaaccatcctgggtgtcctcatcacatccaggttgtctggaaggacagatgtaatcatgttgccatttaaaagggtgctaaagctgtagttttgtgttactatggtgcaatagttgcagttccttgaaactggtcctaggagttgaagtttgagttaggcacacaaaattgtattctgtgaaataatatggtgttaggatcgtaattgcaattttttaatcgtagtttattgagttaggcacacaaaattgtattctgtaaaataatatgatgataggattgtaattgcaatttttaatgttttaagcttcaaatatgcaacagaggagaaatttcgataatctgaaaattttaatgcaacaaattgggttatctttgctggaaatgggtcatggtctctatcctgttgttggttctaattcttgtgttgggtttgggtagtaacttagtgtgatgagaaattttacagatatttgttttttatttgttcctactaacaacatttggtttttagattgcagctatatctgaacagtcatcagaatcttcaagcgcatcaggagctgactccagtgagaacgccaatggaagtcctgagtggagatcatttgatatgcattctgtgattgcagctacagaagacctatttgatttcattttatcgaggaaaggatggcgggttcgggttttccttgtccaggacatcgttaatgcttcagacgtgttccttcaagaagcgacattcccatatgtatatgcgaaagtgggaaagataggggacctaaatccagagtaagatgatcaggaggctggtgaatactgtgcaatcgttccgccaagctatcaatttggctccagatgcttggagcgccatgctaatccgcactttgttgaaacctgaatcacaaaaatttgttcttgatgtgtttttggccctggctaaccattccagttacaagattccagaaacattctggctatttatgtcaagatttctaaattacttggacaaacaagatatactttaggaacggttaatatatcaattcctttttttttgttatggcttgaatttatttattttagatcgg

SEQ ID NO: 22098 - DNA, 584 bp, Zea Mays
gttcgggtggctataaaaacacccctaggctattagggattaagttttagaggcggtggcggttccctcgggcatgcgagtggcggcaatccccgtggcgagcgacggtggtgcctcgaggcgggcgactggcggcggcgctcccccatgaccgaggacggcggcgcaccccagggctggtgacgacgtcaggaggcgtggtaggcttctgcagcggtggtggcggccatgggagacgcaggtggctccggcggtcgcgcgagacacaatcatctctagcgatggcggccacacgaggcgtgggtggttgtggcgtccttcgatgaccaactcctccgatccggttgcctcggcggcatgctccagtgacgacctcctacaatcctttgtttatgcatgcagttgttggttgagcctatactaagattttttcgttaattatgatgtattgtgtatgtatttatgcaactttctgtaatgatttatgttttgtacgatatcaaccatacaatttttgcgtgtatgctgtggaaataaaaatgtcattcaacatttatgtgcatgcaatgaaaactccacgtccg

SEQ ID NO: 22099 - DNA, 666 bp, Zea Mays
atgacaatgaggccgagtaaagaaaatatcaacaccaatatgctttaatattctgggagtccaaaaaatttgaaggatctacgagttctgctgagccctggtataacacaccattttcagttgaaaatgtcactccttcagttatacaggaatggattgaaaaagctcctactgaaaaactccatcttccaaaacctaatattttcataccaaaggatttatctcttaaagaagtgcatgaaaaggttacttttccaacagtgttaaggaagagcccactttcacagttgtggtataagcctgatatgctgttctccacaccaaaggttcacattatcattgatttccactgtccattatccagccactcccctgaagcagttgttgctactgagctctttgttgatttgttagtagattatttgaatgcttatgcttatgatgctcaaattgctggtttattctattcaatatatgttacttcagctggattccaggtttctttaggtggttacaatgacaagatgagagttctcttaaatgccatactagtgcaaattgtgaaatttgaagttaagccaaacagattttctgcactgaagcttcgagagagctatggattgttgagcccccttatgccgttgagggtgaagtccctggtaggag

SEQ ID NO: 22100 - DNA, 762 bp, Zea Mays
tgcggagtgctctggttcgcccgattgtaatctggcagccctgattaaatcggctggattatgaaacggtatcacattacagccacccgatcccggatctacctcacggatttaatgaagcttgattccctctggatcgctcgattccgcatctacagcccagacatcatcagggtgagatctagtccgatccattcatagaccgatctatggttaggattgcaccaaggtacaatgccaacgcctatctaatctgagccaaaggatcgggagtcaatggtatccggctcatccccttcctcctacgttcagacacggtggcggtccagccccacggtggagcacacactgaatcaccgatgcctaatcctttcacgctatggtgcctaacggactactcgattcggtgctaaacaatcctaaggatgccatgaattctgggaggggctgattaccgcggattggacagggagtgcccctagccacacgagcagcaaagccgcggcgacgatcttcctccggcgaagaattcccgagcccaatgtcgcttgttctgcacgtacggcgaggtcgccactattttccttgcgaactggtggagctcctcggcttgaccctaaggccacgccgccacggcaacgacgaagacacgagggcaagggcgcggcctacttcgtcgtgtctttccttgtggctatcacgtctttgcgaggtgcatgagagctccgttaaatatgcccatgcaataaacctaattggtcc

SEQ ID NO: 22101 - DNA, 1617 bp, Zea Mays
gctgctcctatagttgctccccctttgagtgcgttatgggaagatcttaaagtggctggtcaagatattgttcacctagcaaataatctatcaagcctcacagaggactcctatgaaaagctggttggaagagagagaggatcagatgatgatgagctcaatgaagctgtggtggccaggtctgaaccgaaaaacctagttcaaccaaatgcatcggtacccttgacctcacaaggctttaaccaattattggatcaacccgggccttctgatccttctgttgtatacaaggacagtatctgcaaccgatgtgggaaagtagcaggagctggtagcgttctcaaatgttacaggtgcatgctaccttgccacatttcatgcattgaggctactggttcacccatttcaactggaaggtggtgttgtaaaaactgcagcgctggcactaaggaaccagttgaaggagacatggtcttagcccatggcaatccaaattgcttgcatgaaagttgtgtcgtctgcgacagacttgcggcctgcaggtctccaaaatgtgataactcaagagcattggttatttccagcgtggacccagagattgatacatgttactcatgcaagatatgtggaggcaccgaagaggatgagaagaggttcttgatatgcggcaacgtcctctgccgatacatgtactaccacattgggtgcctcaagtccatgcagatctctaccagtgtagagaggggcagcccgtgctggtactgcccgtcttgcctttgccgagtttgtctgtgtgacaaagacgacgacctgaccattctgtgcgatggttgcgacgaggcttaccatatctactgcataacacctcgccatacttcaatacccaaggggcagtggtattgctcatcgtgcagcgtggagagggcagaagaggggatgagacagtacgagaggaggacgctgaagctccaccggaaggaggatgctggactacaaagttggaattttgatggtgtggacctgctgctatctgccgcggagcagctcaggatagatgagcagctggagactcgtacagattagcgtgttgcacctacactctggtccttttgccgtgctaaagtgagtttgttgtttgaagagcagaggcctgcctcaggatcagagctcgggcaagggcagttaacaaaatttgctgcagtcctctcacgaactgatgaaaatacaaggatcttcaaacagcattcgccttttgagatgcgtgctatatgataacatgctgtaggatatttgtttcgtttatctgtctttttgctttgttgcacttgcacctgcttgagaagatacttaactcgatacaccttactggtatccaaactgcaagggatgttcttaaattcaaggaaaatctccaatttgagagagcaagccgtctttgaaaactgcctcaggtttttgttgaggctgttattatgctttgtggcctgaattattttagacatacaaacttattgcttcacgaccttcttctcaagtcggtctagatacttcttggggcaacgtcgaatgctatgtccttcatccttgcagtagtagtaaacactatttgctttgagg

SEQ ID NO: 22102 - DNA, 1673 bp, Zea Mays
cctcacaactgctcagatctggaattctgtacccttcctctcaaggattttgacttgttggtaaagtggacttcactgtgaggcacctatcttcatcggtccagacatttccaaactcattttctggattctcaagtggccagccttgctttagtccattgactcgtcagtgtgcggcttctactgcaccggctaactcgcaaacaacttggacaatgcgtgctaccttccctgaatatgtggttgctcttactacaattgttggatctgtgcttttcacgatatttggtggtgtcggaattgcctgccttccattgggacttatattctcatttgttcgtcgtccaaaagctgtaattacacgctcacaatatataaaggaagcaactgaactgggaaagaaggccagggagttaaaaaaagctgctgaagccctacaccaagaagaaagaagtgggaacaagggccggaaatggcgcaaaaatgtgaaggctttagaaaaggagttattactcctggaagatgacatgaaggctctagaagagatgtatcctcaaggagaacaggctgaggctacttgggcattcacagttcttgggtacatcgggaaacttctatttggtgttgttgggttaattgtttcaatagcttgggttgcacatattgtcatatacttgttgattgatcctcctctatcttctttcctgaatgaagtcttcataaagttggatggtgtttggggtctgcttgggactgctgctttcgcattcttctgcttctatcttcttattgcagtgattgctggggagatgatgcttggattgaagctagtttttatcacaattcacccgatgaaatggggaggcactttaatgaactccttcctgtttaatgttgggctcatactactttgctccatcagtgtgattcagttctgtgccacggcttttgcctactacgcacaagcaactgcagctcaagagatatttggccacactttgcaatcccttcgtggaattaagtatctttacaagtacaatgttttccagtatggctttgttgctcttgccatcctcactctcttctactatgctatatttggatggagaaagaggaaaccaacaggaagattccagctctcaaattgatttgctctgtaagtgaagtttgacggattcatcatatgtgccccctgagtggtagttcagttagcatcttagaaatgtatatgatcaacaaaaccaaaccaatccaaaccaaatcatcttcccaaagagttgaggaactgcaaatgatcaactctgagaccttaaaggccagaattatcaactctgagactttgaaggcaagaatggggcaactgttggttaccacggacatggatgttaaagtagaacccagttgactttgcaatgtacacatttcttgtatcggctcttcatttacgtctgtattatcgcttttatgattggatgatgatgttattcttgagagatgttcggtgtgtttgggggcgcttagcccccctttgatattcattcgtgttgggagttaggtcaattcattgcttttatatgtgttatatactgtgattacaatgcaagattctaggttgtattaatgatgccttgatcattcatgtgcttgtctgtgatcactgcttgtgtttcaac

SEQ ID NO: 22103 - DNA, 2085 bp, Zea Mays
ctgatccacagctcttgattccggaagcgctgtttgatctgagcccaaggtgggctggcaactgaacattcctgcgtagttggtcaagaactggggatactgagttgaatatgatctcaaatccggtggactggtatagtttcggacccggatagaattggtagggatgcaagattggagggtgcgtgagttcgaaggtaaattcactgatgagtttgcccacagcagtagcaacgaacataaaggtggagttgaggcttctggtgtcattagtagtaagaagttgaagcatgcagttgctaatgagaaaatccaaggtgtcatccccggtacaaatagctcaggttcactgaaacgtaattcagagaacatccaacatgcgaacggggtattatcccagaatataagctgcgctggtgactacaaaaatggctccattgcctttcctttgagagaagaaaatacaataactgagaccagatgtccagatgataactggaactcctgtcagtttgcactgaacaatggttcgtccattctcaataaccacagtgctccccaggatagcctcacttatggagataatgatctaaactacatcgaatggcctggcattgacaattttgaggatgtcgatacattattcaggagttctgattcaacatatggtcagcagcagctggagaatgcagatgggttatcttggattccgtcttcagatgctgtttactctaccgatgttgctttgcaacaagggcttgattcgtcttattcagattatggtattctggatgatctctccgcattccaatgtgcagaagataaatcactacccttggttgatccttcatcagctttatgtgataatcaattcaatgatacctacctgttcagtgaacaaaagaatgtgaatgcatatggtgaacagatataccaagaggatttgatggagttgttgcccactgaccagatatgcagcggacatgaaaacattgatatgttgcaggttggaaaccagtatccatctgaaaatgcaattcaaggtaccgaagataagaaattctctatagcgtcaacttcccagctgagttctcagaatttactgaatcaaagacaccacttagattccagttcaccaagcaatattacttcggagtcctatccaggaaagttcggtccatctagctgttcttctgcacaaagaaactcaaaagctggtgtgacacttaagtgcgcaaatgcagtgcagaagaaaactgtcaacatacaaccaagacagccagcaaatgataatgttatgaacacaagcagagcttcttacccttgtgagaactatgaaactgaaagaagaggattagggaaagaactctgggggatcctcaagttacaatgggtagttcaatggtagtggatggctcatttgtatcatctatgtcctctgataactcagtcgaagaaagcagctttcaacaactgcaggatgctgttagtcagctggatgtgcaaaccaaattgtgcatcagggatggtttataccgattggcacgaagtgcgcaacatagacaagtttttccaaatacgatgaacagcaatggtggtagcgaggacggaaaggaactggagaacgcagaaacttcgtgcaagttcatggaccctcggagcatcgagacgcagacaaacccgatcgatcggtctatagctctgctacttttccgcgagtcatctggcggccatgtccatgtggctgtagcagccgacgatgcctcgtcactgaaatcccctgctggtgtatgatttcctgcctgccacatctcagttccagggccctgctgctaacccaggatgtttctaggcatgtatgtaaaaaaaaaaacaagcgtattgtgtagccaatagtctgtactctgtagtcacattaattttgtcatgcttgtatcctattgctagacggccgatgtgctaacctagtgctgttgactcaaattttatgcgtaatctaaaaaaaattatttcttttcgtggatctctagcataccttcaaactgatgcacgggagtggaaggattcgcttcaacaatcgttagg

SEQ ID NO: 22104 - DNA, 487 bp, Zea Mays
ctcagaggtgatgctgatgtgcaagcatcttcaccttgagttctgccttgccagaatgaatcaagtttattttctcatcctgctccatttgagggatttgtttggcttccaaatggtttgttggtcctaaaatagtcagaatcacatgacatctgtgctatagatatggacctcggtggttttctccacattaggaaagctggaagagcctttttgaactcagtttttttgctaacagtggtgttatggtgaaacagagttttgtgtgtatgtaccaacagctaaaatgtaaacacgacattatcatagttgagtacaggaataattatctcttatatcttattgcaaaatctgaaacagttctcctgtagatggttagcttgcattttacgctacaattacctcagatcacttgtatcttacaccaatttacgaaatttgttgatgcgttttatgacaacctcatgcgttgagagatacattcgtt

SEQ ID NO: 22105 - DNA, 491 bp, Zea Mays
aactcgcaactccgcagctgagcacgccgaaaagctcatcagtgctcatcccctgctggcccgttctcagtcccagtgagaggctccatgaagatcctggtcgcggtgaagcgggtggtggactacgctgtcaaagtgcgcgtgaggccggacgggaggggcgtggagacggccaacgtgaagatgtccatgaatccattctgcgagatcgccgttgaggaggcgctgcggctccgggaggccggcgtcgccgctgaggtcgtcgccgccaccgtaggccctgcccagtccgccgacacgctccgcaccgcactcgccatgggcgccgatcgcgccgtccacgtgctccacgacccggaccctgcgcggcccctcctccctctcgccgttgccaagatccttcgcgccgtcgcgctccaggagaagcccggcctcgtcatcctcggcaagcagattggggtgggaggagacgatcgttgctttgacacact

SEQ ID NO: 22106 - DNA, 1874 bp, Zea Mays
aaaaggaaggagcaggtcataccagtagtacggccactagcatagagtgacaggactgcttgaattgcaacgtacatggcaggaacattgaaagtctcgaacataatctgggtcatcttctccctgttggcctttgggttcaaaggagcctcagtaagcaacacagggtgctcctccggggcaacacggagctcattgtagaaagtgtgatgccagattttctccatgtcatcccagttgcttacaataccgtgctcaatcgggtacttgagcgtgagaatacctctcttggactgtgcctcatcaccaacatatgcatccttctgccccatccctaccatgacaccggtgtgacgaggacgcccaacgatgctagggaatacagcccttggtgcatcatcgccggcaaaaccagcctagaagatagatacacaaaattagtggcatatttgggtgggggagactatggctgtacaaattaaggggaaaagcactgaccttgaccattccggtgccattgtcgcagacaagaggctggatgtcctcaccatcagccatttctacagaactgctgcaggcggcagcgagcgaactcttgcagcggcggcgcgggttccgcccgtgtcgccccgcagaggagcgacggttcgcagcttcgcacagcatgaagggaagggaagagaagaggtgggagtacctggtgggtgctcgctgccggcgaagaggccaacgaaagcctcagcaccctggcttagggcggcggcggcggcaactgtggtctgagagcgaggagagcaagagagcaggaatgcagcggacggaaggggaaagggggaatgcaggaggagcagttgtttgtggcctgcaaccgcgagaagactgccagacccagatgcgattgagaagggatctgttctgtgctggcttgcaattcgacgggtttggcttcttcacaaaataatggacagtgaggggcttttctataaacactttcctccagccgttggatccgtcaacccgatctgcattacagagacaggtgtgtcgtcgtctcctcactctcgcctctcccctcttcacccgtgggccgacgcgccgccgcagcaagcagccgagaggggaggggatgctagccgcacggaggggcgcggcggccgcgtgggcggcacaggccttccactcctcctccgcagcgctctccaaatccactcctcgattccgcttcaccgtccgtgaaaagcgaggggatgcgaagagcgcccttaagaaccttctgctcaatggcggcacatgtcaggaaagcagtaacaaacaaatgaggaagcagaaaggtggtaccgggtcgaaggctcagcgctctgctccaggaaaaaatccctgtggaaaaaataagcgctgaagcagaagaaaaattcagacggtgcgtggaagcgtataacgcattgactcgtgctttcagatcaagtggctaactaccgcgaggaattttgttctttatgatttgaggttttcttaggactcctagtgatgtgtgcgtggctgctggtcttcaggacacagagactgctagaagtgaagttcagagttatggcttcatgttgataacgaaatatataagcataatctttacaaaaaaaacatagattaggccagtcctgccaaatcgtatgagaacgcaaattacagggctcatttgtatgatgatttggttccacacaacgctgtaagtagaaagcaaatactgtttgttccatgctgagattttgtcaagcaaatactcccaggatgaaagtgaataaccgaattgttagtataaatttagtattttaaaatatatatgtatgaaactttatgttatcaagcacattgttaca

SEQ ID NO: 22107 - DNA, 1509 bp, Zea Mays
acgggcttgatttttaattaggtctacaagatctctattggagcggcatgtgccctcacatggccgcccgaccgtattataatccaagtattggatgattccaccgacccattcattaaggaacttgtggagtttgaatgcaaggattgggccagcaagaaaatcaacataaaatatgaaattcgggaaagtaggaagggatacaaagcaggagccctgaagaagggcatggaacatagttacgcccaagaatgtgattttgttgccatctttgatgcagattttcaacctgatcctgacttccttttaagaactataccatttcttgtgcataacccgaagattgctctagtacagacacgttgggagtttgtgaactacaatatttgcctactgacaaggatacagaagatgtcactagattatcattttaaggtagagcaggaatcagggtcatctgtgcatgccttctttggtttcaacggtacggctggcgtgtggcgggtatcagctatcggtgaagcaggaggatggaaggatcgcaccactgtggaagacatggacttggctgtgcgggcaagcctcaagggatggcagttcctgtatgttggtgatataagggttaagagtgaactcccaagtactttcaaggcctaccgtcatcaacagcacaggtggacttgtggtgctgccaacctcttcaggaaaatggccggggacattgttataagcaagggggcgactgtatggaagaagcttcaccttctgtacagcttcttcttcgtccgaagggtcatcgctcccatcctaacgttcctgttctactgcgtcgtgatcccactgtctgtcatggtccccgaagtcagcatccctgcctggggaatgttctacattcccactgccatcaccatcatgacagccatcaggaatccttggtctatccatctggtgccaatatggatcctgttcgagaacgtcatgtccatgcaccgaatgcgcgcggcgctgacggggctgctggagaccacgtacgtggacgagtgggtggtcaccgagaaggtgggcgatcatgtgaaggacaagctcgaggtccctctccttacaccggtgaagccaaccgagtgcgtcgagaggatctacttgcctgagctcctggtcgcgttctacctgttgctatgcgcgtcgtacgatgtcgtgctcggagccgggcactactacccgtacatcttcctccaggccttcgctttcctcgtgctggggtttggcttcgccggcaccgtgacgccctgctcttgttcataagccatcgcgcgcatagcgctagcgcccatggctattttgctgcattcttccctgattcgcctcctctaaagtctgtaactagaaaagagaaagcgattctttctgtaaatcgaacagaataaacgctgcacgcgtgtgcagcatttgagcagtaacttggtttttttgagctgactgcatgtcattttcacggtcgctgcaggccgg

SEQ ID NO: 22108 - DNA, 1609 bp, Zea Mays
atgggcggggcaggtgggcttatgttgctgcgcgcgcggtgccgtctccaactctgtctcggcctctcgcgtggaggtggaggtggaggcggagccgatgagatcgatcgcccgacccccgtcacgtccggggtcgcattctctttccgtcccggggaaaaaagaaggaaaccgaaccttggcagcggcgtgccggcaggcatgtcagcgacggtagccggccacaggtccagattccggaaccgaaccaccgtcccccgcgaaccacggaacagcgaagacacctgggccaggggaagcagaggaagatcgcgaagtactacaagaaacaagagaatctactgaaggatttcagcgaaatggagaccatgaacgaaatgggtggcctagatcagaatgctcctaccgaggaagagcagaagcagttggcgaagagcgagaggtttgccatcaacctgtcgaatgcagtcaacctggtcctcttcgtaacaaaagtcgtcgcttcagtcgaaagcgcgtccatggcggttatagcgtcgacgctggactctctgttggacctgctgtcagggttcatactttggttcactgcgtacaagatgaaaaagccgaacaagtacaactatccaattggaaagaggcgcatgcagccagtgggaataatagttttcgcatcagtgatgggcacacttggcttccaagtgctgatcgaatcagggcgccagctcataactcaggagcacgcggatttcaagttcaagcaagagctgtggatggtcattagcatgtcctctgttgcggtcgtgagttcttcctcatgctctactgcagaacgttcaagaatgagatcgtgagggcctacgcccaggaccatttcttcgacgtaatcacaaactcggtcggcctggtctcggcgctgctcgctgtccggttcaaatggtggatggaccctgttggcgccatactgatcgcgttgtacacgatcacgacgtgggcgcgaacagtgctggagaacgtaggcacactgataggcaagtcggcgccggcagagtacctgacgaagctcacgtacttgatctggaaccaccatgaggagatccagcacatcgacacggtgcgagcctacaccttcggcacgcactacttcgtcgaggtggacatcgttctctcgggcgacatgccgctgagtcaggcacatgacatcggcgagtcgctgcaggagaagctggagcagctgaccgaggtcgagcgcgccttcgtccatgtggatttcgagttcacgcaccggcccgagcacaaggccgaggtctgagtgcgtggttagtggttactgcagagttcagaccagctgtagcgctactgcagatttgacttcatatgctattagttcgtaagatgaatgctatattcatttcccacaactcttcaaaaagaatctagatattttttgtcatgtacgtgcagactggaataaaattttgtatagtcgttcatgaaccggtgaaaaatatattttttaatacatttgactaataaagaattattcatattagtttctttttattttctataaaacaaacataatagatatccaaagtgtatattttaa

SEQ ID NO: 22109 - DNA, 816 bp, Zea Mays
attttgtcggtaaagaacgtgtgaggatggtgcactagcgaagcccttgtacataatggcattcgggcgaatcccccgttccataatggcataattccatatttctccagctgttccgccgagcgaacgacccacaaccagaagccacccattggcgtacgcgaggcgatcggagcatcccgtcccaagaggagaaactccggccggcgacgcgggggaaaatggggaagacgccggtgcggatgaaggcggtggtgtacgcgctgtcgcccttccagcagaaggtgatgccggggctgtggaaggacatcaccaccaagatccaccacaaggtcaccgagaactggatctccgccacgctcctcctcacccccgtcgtcggcacctaccaatacgccatgtggtacaaagagcaggagaagctttcccacagatactaaatgggatgtcctccaagttgctgcggcttgtcgcagttgaattttccatgatgggatgtgaggctgagatggaggaactctgccaccgttcgcgccaggtggagcatcgtgcaatggctagccttgtgccaagcttgtcttaccgcctccaccacccttttttacatccaagatcgcacctcgagattgcctgtccacgctgcaacagcttcaccctgttaacagggcatgtacaaccttacaccgttaaccttacaccgttgcacgatattagacataactaaatcataatataatacggtgggtgtgtctaaacttgtgtcttactatatctattgcactaattagagattcaataaattgaccaatcagttag

SEQ ID NO: 22110 - DNA, 623 bp, Zea Mays
ggaacgtgtgcgccttcctcctccccaagaaatcccgtggatcccaacaacctcgcagccggtattccgcgtcatgtatgcctttcgtgcagaataaagggggggctggacaggggagtcttcgtcctcgcttgcaactcagcacaaaagagaatgggaggagagagagagaggagttaggctctgctttggcggtactccatctggtgctgggacgctagtctggtgacgagccacatttccctaggcgctggactccggagaagaaaaggcggtcgaagaggagctgcctaactctgaggctttcgacttgatctagatggcgtctcctagtcagctttgtggcgctagggactaatatttagttcgctttattttatcatttatttttgtaagacttccgctatgtaataagtacatttatgatatttatgacatttatctctatgcactctattattatatgtgttgtcttctctagcgcatatatgagatgcacccgcctttgttccttaaatccgggtgtgacagggttgccgaaggtatcaactactacgacaacgactcctagaaagaggagaatggctagtgttttggatgctgttttacaatttactaagacg

SEQ ID NO: 22111 - DNA, 1512 bp, Zea Mays
agggccagttccgtccgacgcgtcgcaacaacccccagggctcaattgacgcgcgggggcgtttcggtcatccagtcatccccctcccctgccaaaggcgaagagcagaagcagaagcagcagcagcaggcgaagaggcagtggtagacatgccaaggtcatcagccggggcgtcatgcacagcagttgaccattctgagcagagcagaaaggatgatgaatatgagaggctggttacaagagctcaacatgcaacatctgatgttggcacgacaattttatctgagcaaccaaagtcaagatctttcatttggtggatgaaagttctgcttggctgcttccttcttatattagtgggctatgtcttcgtgaaatggggggtcccctttgtctttgagaaggttctcttgccaatcatgcaatgggaagccagtgcttttgggcgtccagtattagctattgttctcgttgcatctttggctctctttccagttattctagttccttctggaccttctatgtggttagcaggaatgatctttggatatggttggggtttcttgattataatggccgggagtactattggcatggtggttccatattggattggttcattgttccgtgaacgtctgcatgtatggctgacaaagtggcctcagcagatagcactaataaaactcgcgggtgaaggaaattggttccagcagtttcgggttgtcgcgcttttcagaatctcaccattcccatatacaatttttaattatgccgtgactgtgacagaaattaagttcaacccttatctatgtggttctgttgctggaatggtacctgaggccttcatttatatctacagtgggcgtttaatacgtacattggctgacatgaagtacggcaactataaaatgacaccagtggaaatagcatacaacgccatttccttcgtcatcgctatcgccctcacggtcgccttcacggtgtacgcgaagagagctctgggtgacataaaaagtccggacgatggcatcggtaaagacgaagaagatcacggcccaaatggctcaggggtgcgtatgaatcgtcgtcaggagcgtgccgacgcacgttacatagaactagatgatatgtgatggtgtgttggcccggatcttgcttggaaggaggcaccagtaggtcattaggtgcacggctacggtaggtagctagctatagtttacaagaggaggctaaaataatccacacccagctgacgtggtttgcgtgattcgtttcgtgtgctttgcctactgcactgccatactgtctgaatctgaaggtgcagggctactcactactgagttactgaccgagcgatgctgctctcaacgatgtttctgtgaccatcagcgtatcaatcagtccttgatctgaagcctacactggagcttcatgttgaagcatacattggacttgagtagtacatttgtatataacgtaactgctaatagagttagcatatgatctaaaaaagaa

SEQ ID NO: 22112 - DNA, 2399 bp, Zea Mays
ccccaccccaccccacccgcgccgagacggattggaggaggaaccctaccatatcaatctcgcttctcgcctcgtttcgtctcagctgcattccaattccacctgtaagcggagagccttcgtggtccctgctcggttcatcagaatacaggaggctccggagctttaagattgtgcagacacataatttggatgctcctgcctatgcaagatgtcaaccaccagagatattgtttagtgctgggaaagttatgcagttttggatcataaattctaaatagacaagataattatggaccgtgcagacacatcagggtttgtcagtggtggttgctttgtgggatgctcagcgccaagctctacggtggagaacatgggccaaagcacactctgtatggatggcctgaacccagcaattgttagttgcagccatgttaatggaaatacacagataatgaatgacataacagcgagagatgatggcagcaggttagtccttggtttgggtccaacaccgaatttttattctgcagtgtccactggctcaaaacaagctcagagattgtcaggccagagttcaactttcactgattcagggatgctgaggcttggccttcacaccgatggtgggggagcaattcaatgtctgcaaggaccgaatggagcactccattctttaggtattgtcgacgaggcttcgacatctactactgtaaggagcatgggtggttacatgccatccctactctttgctccccgctccaatcctactgtcaacgagacacaagtagaaatcccagattctctaaacctcacgcacagcaccagcaacagtcagcatattcaacgtcacctccagtttagccctgaaccctctgcaatgaccgagtcttcatttggtgtgagttctgatgttgtcaccgcaacaactacatcagaacgtagccattctcgacatcctaagaaatgcaggttcaagggatgttccaaaggtgcaagaggcgcatcaggattgtgtattgctcatggaggtgggcagagatgtcataaacctggatgccataaaggagccgagagcagctctgcatactgcaaagcccacggtggcggtcgtcggtgtgaggaacttggttgtaccaaaagcgcagaaggaaaaacagattattgcattgctcatggtggaggccgccgctgcgaacatcctggctgtcctaaagctgcccggggtaagtctgggcggtgcatcaagcatggtggtgggaagaggtgtttggttaaaggttgcattcggagtgcggaggggaaggctggattgtgcatttctcatggcggtggtcgacggtgccagtatccagattgtggcaagggggcacagggcagcacattgtactgcaagggacatggtggtggcaagaggtgcgtcttcgatggttgcagcaaaggcgcagagggtagcacacctctgtgcaaagcacatggtggcgggaagcggtgcatgtttgaaggaggtggtgtctgtgcaaaaagtgtgcacggggctactgaatattgcgtggcgcatggaggaggaaagcgctgttccgtgcccggctgcaccaagagtgctcgtggccgcactgactgctgtgtgaagcacggtggcggcaagcggtgcaaggttgagaactgtggcaagagcgcccaggggagcacggacttctgcaaagcccatggcggaggaaagcggtgcacatggggcacaggctgtgaaaaattctcccgtggcaagagtggcttctgtgcggcacatggtaccttgatggccaggcagcgagaacaagaggcggcgaagaatgtaggaagcatgattggaccaggtctcttcagcggcattgttgtgtcatctgccaccgcagcaagcagcatgacgaacgagcactcgtcctctggtgtcagcaccgcttccgactgcgacggcactgtgaggagccaatcaatgattcctccacaggtgctggttcctcgctctatgatgccttcttggtcgactgagcctgtagatggaggcagagagggaggtcatgttgttcccgaggggagggtccatggtggtggcctcctgtcactcatcggtggcagcttcaggaacgccgatttggagaagcttcaaagctagtgcttttccatcagcagattcggtcagtttgtttgtacataaacaggccgcgtttcggcctattgtattcttattgtaccttttcttgtctagataaacatttcaaccttcatgtactggtttaagtccattgtaaatggtgactgccaattgttgtgaacgcttttggcttgttggttcagctgtagtcagtactgcaataatttcgtgtgttgtttaagctgctcttatttgtttgtgcata

SEQ ID NO: 22113 - DNA, 2572 bp, Zea Mays
aaagcaatttcgaacaagcttggacatggtagagagcgtagaagaagcagaatgccgtagagcatatgattctgctgctgaggtttacatgtcatctttcagccacatcaaattagctgaagaagatgctttaagggatgaatatgaagctgctttaaggaaggcacttgatgcatacaatactactgctgttggaactggcacttcacgtgcccattatgagaaagttcttaacaatttctgcagaaaggcgtttcaggattataaaaagaatgctttcttagaggctgacaagcagtgctcaaatgcgaagcacaacatggagaagaagatccgagcggcatgcactgctcctggtgtcaaagtttctgctgtgattcaggtcctggaaactgcacttgctgaatatgaaacatcttgtactggcccagccaaatggagaatgcttgctgcctttttaagacagtgtttggaaggacctatattggacctctgcttgaagttaataaatgaagtggaatcagagaagacttccttcactttaagatgccggtcaaatgaagaccaactagaacttctaaaaaagcaacttgaggccaatgaatcacacaagtctgaatatctaaaacgctacaaagctgctataaatgagaaacagaaagcctctgttgatcttagtagtaatcttgcaaacctgaggaccaagtgtagcacattagaagaacgatgtgtaagcatatctaaagaacttgatcatgtccgacatgaatgcactgattggagggtgaagtatgagcaatctgtttctcagcacaaggctgaacaagatagatttgtcgctcagttggcatctcttgagtctaggcatagctctgcagaaggaaagttgggagcagctcgggaacatgcagcatctgctcaagatgaggctgcagaatggaagaagaaatatgaaatggctgccgtgcaggctaaaactgcattggagagactagcatcagtgcaagaacaaattaacaaaattgcacaagaaagggaaagttctataagggcagaatttgcctcacatttggagggaaaggaagaggaaataaggaaattagttgctaagattagagaagcggagagtgaagaaagtgtattgactgaacgcttgctggttgtggaatcaaaaacacaaggccacaacaaggaaactacaggcttgagggatgaaatcaaagaactaacaagcaagttagagtatctaagagatagagcagtatcatatgaaaagcaagctagaatgctcgagcaagaaaaaaaccatcttcaagagaagttcttatctgaatgtaagaaatatgatgaggcagaacaaagatacaagtctgcagaaagggatgcgaagaaagctgttgagttggctgatgcagctcgaacagaggctattgcataccagaaagagaaggacaaggcacagcagttatctattgaaaaggtagcagttatagagagggttcaaagacaggtagacagactagagcaggaaaaggttaatctattgggcgaagttcagaggatgcataattctgaatctgatgcctggtccaaggttactttgcttgagagtagggttgctgagagggagaaagaaatggatgatttactgagccgtagcaacgaacaaaggtctagcactgttcgtgtccttgagagtctgttggcaacggaacgtgcagctagagctgaagccaataagcgtgcagaggccttatctctacagctacaatctgcccaaggtaaacttgatatactccatcaggagctgacatcgattcgccttgttgagactgcacttgacagcaagctcaggaccactacctatggcaaaaggttgagagataatgaagtacgactgtattctatccaagatatggacattgatcctccagagaggagcagaaaaagaaccaaaagcaacactagccccttgaagcctgtccaaactgaggatggtggttctgttcacatgagagaagacagcgttacagttagcacggatgtaaaagatgacaatccagatggttacaaaaagttcaccatagctaaactgaaagaagagctaactaagcatggatttggcacgcagttgttagagctcaagaatccaaacaagaaagatatactcgcactttataagaagcatgttttgtgcgagtaaataatggccacgtgaagttccagtcttcaacacataatctatccaaactagggaaacaatagagtagtctgtcagtatttttaacaagctgatgcctcattgttctccaggcattcgtttctgctgattggtttgtattttggtgttaacatcgaattagttccggtttgtgtctaggctttgtatttcttagcttgctggttggctgggtgaagttcttaggacttctgagtgctaaatgacctcgaccaacgctagtcgtgggcaagtttgtggtacgtttgtatatggtatattgctgtgtaaagagtgctttatccaattcaaatatgatatactcttcaagtctgcatccagcataccagcaga

SEQ ID NO: 22114 - DNA, 926 bp, Zea Mays
agaaaacacaagcttttgtggtgcttggagtaatcaatgagcacataacttttgaagtatctcctgggcagtcctcattaatctctgatgatgctgatgttgttgctctgattgggacaagtaaggacttggcaaaacaaataaatcagaaggaagtacattgggggttgcttgaagattctgttgaagagcaaatggagaaggcactagcagaatctgataaaatagaagctgaaagcaacgatgctgatgcagaagataacaagaaggtggaaagcaaaatacttctcttgtgtggggacacttgctttcagctgcgaaggagcattgcttgcatcggggtcggctgactgtactgttaagctctgggatgtcgctttcagcacaaaagccctgaagacagaggacaccaaaggcagctcatcagctaaccgactgagactgcttaaatctctgcctacaaaatcagctcctgtctatagcctgcggttttctcggaggaaccttctgtttgcctccggtgctctcgcgtaagctgcgtgtttcgtagaatacagctagaactgttccggttttgacatggagtagtgaagttggcatttcgcagactccgctgtggatcctattgtagagctaatattttcgttagcaatctcaacggcccagcatgtatgcacagcggaattgagcaccgcagatgctttgtagcgtgcttgcaacattgtgacattgttattaggtaaatacgtcgtgtaattttttttaggttgtgatcttatgatttataaacgccactaaatgtacatatgcctgataggagatagcttgtaagggatgaccggatgatttggtgacaaaacaatgcattttatctacttctcaaacatgtaaaatatggatcatcctatacctttgacgaagcaacc

SEQ ID NO: 22115 - DNA, 351 bp, Zea Mays
tccacaacactgcctgaaccagaccaaccgtatcagcatcagcgtaccggccgcggaggagccatctctctctctctctctctctctctctctctctctctctctccaggcgcatcaagccatggctgctcccaagaagacgatgagagctctgcggtacgacaagtatggtggaggagctgaaggcctaaagcatgtggaagtgccggtcccatccccgagcaagggggaggtgctgctcaagctggaggcggccagcatcaaccccatcgactggaaaattcagaagggcatggtccggcccttcctgcctaggaagttccccttcataccagaacaacgtgttgatca

SEQ ID NO: 22116 - DNA, 1330 bp, Zea Mays
tcacgatccttctgctgttataagaagtacctgatctcatcctccatggacaaaactgttaagctctgggacatcactaccagtacctgtttaaaaacattctcacatacggactatgtgacttgcatccagttcaatcctgtggatgacaacttcttcattagtggatcactggatgagaaagttcggatttggagtgtccgtgaccgtaagattgaggattggaatgatcttcatgagatggttaccgctgcttgttattcccctgatggacaggttgcaatggtgggctctcacaagggatgctgtcatatatttgatacatctgagaagaagcttctgtacaaaagtcagatagatttaagaattaggaaaaagaaatctggccagaagaagataactggattccagtttgctcctggaagctcatcggaagttctgattacttctgcagattcaagaatacgtgttgttaacggcgatgaatttgttcacaagtttaaagggcttcggaacacgagtagccaaatctcagcttctgtagctccgaatgggaaatacatcatctgtgccagcgaggattctcacgtctatgtgtggagacatgacaacagttcccaccctagtaggaacaggatcacagttgatgtaaccaactcatatgagcatttccactgccatggcgtgaccgtggctgtcacatggcctggtgctgaagcccggggctcgtttggatctcgaagcagcaggcacagcgattcagatggagcagtgaactctggccgagacatcccagctgagaacagccagcacaattctgacgcaggcaccagtagacatccaggcgatagagcatccacatcctggcctgacgaaaagttaccgtcagccaagagcagccctggtcactgctcgtccgatctttgcattggagctatggatgtccagcgccggtctgcgtgggggttggtgattgtcacagctgggcggggaggcgagatcagggtgttccagaattttggcttcccggttcaagtgtaaagctagcgtgagtgagatcatgcagatagggtttgtttggttctttactgtatataccatcggtagatgtagattgccgacagttttacgaaaacttccctgtgtttctctgtctccttgggtgcttcaagattgtacccccagaaccacactatcatatagttagcaatatcacttgttgatacaatacacagagctctgtaactgtatgcttagcacacatcaacttaatttgttctcatcatgtatttttctacacacagtgatgtacaaaatgaaaatatttttc

SEQ ID NO: 22117 - DNA, 1122 bp, Zea Mays
aagcatggggccaatgctgatcttgtgaatgctctgaagctggtccaacctatcaaggacaagttttcaagtgttacctatgcagatctgtttcagcttgccagcgccacagctattgaggaagtaggtgtccctaaaatccctatgatctatggaagggttggcgttattgcccttgacaatgcgcgccaaagtagcctgcttccgacccgcacatctccctccggttctcgccatgggcgccggcgccaacaaccacgaggagtcgagccccctcatcccagctgcggtcgccgcccccgcgtacgagaagcccgtgtcggcccacgccttcggcggcgtcccgcgggagagctggaactccgggatcctctcctgcctcggccgcaacgacgagttctgcagcagcgacgtcgaagtgtgtcttcttggaacggtagcaccatgtgtgctctatggtagcaatgttgagaggcttgctgctggacaaggcacatttgcaaacagctgtttgccttacactgggctgtatttgcttgggaactctctctttgggtggaactgccttgccccatggttctctcatcccactcgtactgcgccgcagggttccccaccctggattcaacaatgggcactccgtctttgtcatgatgccgcccatggagcagaccatggggcgtggcatgtgagctattccaccaccttccctaccctagttttatctgtgcttcccgtggtttatcatctgctgctgttggccttgatgtgtgatgtgtcgccgtcagtaaatacgagtttgtgatatgaggtcgtgctgggaactttggattgtttgcttcttatcgactgcagtttggattctggacagtcacttatctcctgtgttactgtgtttgtacggtggtcctcgatgggcctgtcaatgtgaaatgcatttcgtcgtaccttattctgaatgtttttccctccaaaatatgagccccatacactaatatggcggtagctctcgtcacaaaccctcggatacagcagcgtttgtgcgtggaaagaaaaatcgggtgtcttaggtatgttcggttatgtctggattaaagtagattgagggtccgttcgttaaac

SEQ ID NO: 22118 - DNA, 2766 bp, Zea Mays
atggctccgttcggcgacggcggctggggtggcgacggaggggaggcgctgctggggcgggacccgctgcgcagtggcagcgcgccgccgacgatggaggccggcgcggaggcagcggtggcggcggagagggtgtttggcagcgttggtggcggcgcctcgttcttctccggtatcgacgggcgcgggttgggcgcgaggatggacgaggtcaccatgcgccacggtgctgccggagttcaggaacattttggcaattctgcatctttatctgttagaccacatggccaacagtttaatggtacaggagacttggatgaacagcagtttggactgagcagagttcatagtggtggtgttatggcaaactactctgcatctgacatgggtcccctttggacagatatgaatccagacaatgttgactattgcagaaatatccagaatcgctccatgtcaaacattggaaagatgaatgcttatggcaatagggatcttagtgcttcctacatgtttgattctaatcttttagatgctttatctgggctgaggctgtctaatagtctagtaatggaccaatggaatcatggggaagggcaactagacgaaatactcgagtgtcaaagagatttctcaaaaattggtgatgaaaatcgatcacctttggttggtaatgtttttcgtgcatctaggtcggatgtgcatccactgccaatatatggacatggcatttcacagaggcagaccagtgcattagatggttccaatgtttcaaggttcagtcgccatcacataaagggtgttgatcacttatctttggctgctgaacgggtagctgcaatgcaatcaggcaacctgcgtagaggaaccaatctttctcgcaatgcgtatatgactaatatggtcaaccccatgagcaacagatactacagtaatacagacttggatttggttagtagtcgaagggcgttccttgatgatctacttgcacaacagtatctgcaggaggataatctgtcatatgatgatagtaggatctatcatggcgagcctcgtttttcctcttcaagaatgcaaagacctggatctcatttttatccaaattcgaggaacattctatcccatggtgatcggcaatcacggttcttctccctcaatagaaaggcaatgggtagaaatattggatcacaggtctatcatgacaatgcattagcaaactacctggatgtgccttctttggataatgcagatagaaatggagctgattcagtggagttaattgatgtagtgggccacgttaaggaagttagtatggatcaatatggaagccggtttattcaacaaaaacttgaaattgcatcaccggatgaccgggaaaaaatatttccagagatattatccaacgtcattgttctaacaactgatgtttttggcaattatgttatccagaagtttttcgagttcgccacagaaagtcagttaatccaattggcagatcaactcaaaggtcgaattttggaacttagcctccagatgtatggttgcagggtagttcagaaggttttggaggtagttggtatggatcaaaaggtcgacattgttcatgagctcaagaattatattctgaaatgtattggcgatcaaaatggtaaccatgtgattcagaaatgcattgagtgtgttcctgaagaccgcattccatttgttattgatcctatactttcacaaatccttgttctgtgtacccatcaatatggctgcagagttattcagagagttctggagcattgccatgatcctgtgactcaaagtgctattatgaatgaaattatgcagcagaccttccatttgacagatgataagtttgggaactatgttgttcaacatgtgttggaacacggaaagccagaagagcgttccgtcatcattcaaaagctgtctgggcaagtggtcaccttgagcaagcaaaagtttgcttctaatgtcattgagaaatgtttggaatttggaactcctgaagaacgtgatagccttattggggaaatcatttcttctggtcaaacatttcaggagctgatgaaggatcagtttggtaactatgttgtacagaaagtccttgagacatgtgacgacaaatacctagagatgatcctctcgagcatcaaattgcacttgaatgaactgaagaactacacgtacgggaagcacatcgtagcacgtgtggagaagctaatcgttacaggagagaatcgagcaaggatggcgtccatgagtggccagcatcagcagcagcaacctaacaactgtacagctgtagacgaacactagtcctgtgtatgcgttggcgtcaaatacggactgcacactaatcccttgttaggcattggcgtcagatacgacgagcaggtggtataagtgactccggaggaatctggtttttaatacatggtttatttaatagggtacttgcagataaccagggatttatgttacctgtatctaaccaggcgtggtgtttttcgggaactcaggttgttagatgagagcagctgtaaatccttctggccatgtacaagtttattacagtggataatagatgtacattgtgctggagcattagcttttggtagtaggtgagatcggtgctgtgtaatatgtttctgttccagtgctgttggttcaaatcgtatgctcgtttttttctttctttcatggctatctttcttgactgtgaaagattgttccccgttaacgtttcaaatgcac

SEQ ID NO: 22119 - DNA, 4942 bp, Zea Mays
gagatagggataggaagagagagtgtgtggaagctagggaagagagagagagggaggggagatgcacacgcagagacgcaagcgatagaattgctaaacaaacaaaaaaaaaaaggcgagcaagagagagagagagaaggcaggcgaaccaaaccccaaggaggccaagacgcggacggcagcaggcaggcagccatgccgcggtcgccgtcaccatcgccgtcgccatccccatcgccggagaggcgccagaaccagcaccagcccgcgcgccggagggccgccgccgcctcgtcccagatgctgctgctccaccaccaccaccgcggcggcggcggccgctcgccgtcgccgccgccccgccgctcgctccgcccgcgccgcgccgccgccccctcctcccgcccgctcgtcgacgacttcttccccttcccctcctcgccgtcctcctcaccctctcgcccccgccagcgggggctgtcgccggagccgtccagctccgactccggatgcgacggtggcgccgccggctcctcggtctccgaccggcgccggcgcaagctcaagctcgtcgtcaagctctctcagctgcccccggaccagaatcaccgccgggccccactccccccacagtactctgacggctccgacggggctgatgacctggccggggacggaagcggcgacgaggagcaggtcaagccgcccaagaagcgccggatcgagccgcgcgccgacagatctcgccatcgcgaggttgttgctggtggtaggagcgaccccgcgagcgcgccgcggacgaagcggtcttcggtgccagggacagcgaggacgacgccactgccggaccggaaggcgctggagatgattctcgagaaacttcaaaagaaggatacatatggagtgtttgcggagcctgtggatccagaggagctgcctgattaccacgatgtgattgagcacccaatggacttcagcaccgtcaggaagaagcttgccaggaatgcatatcgctcgttcgagcaatttgaggatgatgtattcttaatttgcagcaacgcgatgcagtacaatgcacctgatacaatttatttcagacaggctcattccatacaagagctggcaagaaagaagtttcaggaactgagggatgaaggcatacctacagaaaatccgataaagagtgaacagaaaagtagaccaaatttctgcagtggagaacaggttaaaaaacctgttttgaggtatctggatgatgatctagacttcctgtcccgcaaagatcaagataaaagatccaattcaaataatgtgaatgatgacatgagcttcaacggtcatgttaagaaaaccttgtccaagaatgcaccggatcaaagttgcttattacagaaagagcggattaataaacccatctccagaaattcagaggacaatttaagttcctcattccacaaaaagcagcgtaagaaactgatctccagacattcggaggacgacctgaactgcccatctggcagagaccgagctaggaaagtcatttcaaaaaattcagaaaatgatgaaaactcccctttccacaaacatcaagtcaagaagtcagctccgcagagatcaatcgatggtctctcattccaggaaaagcacattaagaagccaattgatggaaatggagaagatccaggtttttcatcctgcaaaagacgcatcgaggatcccttttgcacaaatgttgaagatgcaagcttctcatctacgaaaaggctgtctgagaagcccatgtctgagaagcccatcagtataaacaaagaagaggaccttgaccattgccaccaggaatcatctaagaaacctagttgcagagttgagcaagatgatcatggttactcatgtgatgaagaggctgttaaaaagccgggttgtatggatagccacgatgcccaaggttcagatatctctgctgcaactattgcttctgttggagatggctctaatggtttaagcatgccacagcctaataattctgaacctactggttgtactgtcgccaatggggttatagacaaagatatcagctctccactagatgaaataagatctgagaagactgacgatattttggccaagcctagctacaagacaattgtggtagatgagaacagacggaaaacttatgatgcatctgaaggacagtctccaatggaatctgatccagtttttgatgttttctctgcggaaccaaaagagctcgtgaatgttggccttgatgctgaacactcatatgcatatgcaaggagtctggctcgttttgctggttcatttggcgctcaaggctggagaattgcttctgaccgcattcggcaagcattacctgctgatgtaaagtatggtcgtggttgggttggagaatatgagcccccattactgcctattcttgttgtgaatgatcaacctagatacctgaagagctctgagacaaatagacaaaggaatgcttctctgcctagggataatgaaaggctcagatcaacagaaacaaataatccgaaggatatgagacggatgaccactgacaacaatgtagttggagtgcctggacaattagacagtccagaatttaagccaagattatttggtgtttccaatgagcttcaacacaggagcacaggcacattatcactgcatgagaaccatagagtatctggtaatgttgcgaaaaccaaaagaacaaccaatgagaaaacgagaaaaggcacttcatcttccagtgcccgacctcgtgaaatgcagctacagaaaggagcttcttctggtgcacttgataaccttgcctcaaacaaaatggctggccagcctagaccgtttttgcaaccaccagaatcaaatagaacccagccaatgagaaaaattgactcatcaaaaaacaaaattccaattgaaatggcaccacagcaagttgagtgtgcaaaaggtgctgcttctggtgtgcatgacactcctttgtcagatgggcagcctaaacacttcttccagtcacaagcagcagcttcctctggtgtgcatgatatgcattcctctaatgggcagcctaaacactacttccagtcacaagcagcagcttcctctgatatgcatgctatgccttcctcaaatgggcagcctaaacactacttcaagtcacacgcagcagtttcctctgtcgtgcatgatatgccttcctccaatgggcagcctaaacaaattttccagtcacaagcagtagcttcttctggtgggcatgatatgccctcaaatgggcagtctaaacccttgttccagtcccaagaagcaactatactacagcccaaaaatgaagcaacgtgggtgtaccatggacgacctggtgatggaaaggttggaacatcaaacaaaagcagaccatcgaccagtattgggttcatcaataaaaatcatcaatcagtaaatgctgcaacttttgccatgaatttgaatggacagaagattgtcagtgaccatgcaaaatcagcaggcacaactgcaatgcctgtccaggtaaatataccaaacagaggtcttgatgctcctcggaacatgttctcagcatttccagctgctgttagggagaaccatagcattccaccagctccaatggctcaatcttggatttcatttggtgctactacagagaacaaaccaaccattgtcagcccaacttcccttgacaataattgtggctggaaaatgccatttgctaacgtccaaccttctgatgataccaaaataaatgccgttcctcagttatttaggcatcctgtccaggtagctagagagaactcggttcaaagcaagggtttggtaatatttccccagttggtgcagccagatttcgcgagatcacaagggcaaccacagtggcaggggctggttccccacatgcaacagaagccaggcaaggatgtactccgcccggacttgaacatcgggttcccatctccacgttcaccaccagcccgacaatcgtctggcatcaatttggaagcacagcagccagaccttgctttgcagttatgagctggggatagacactaccgggatttatgctataatctctaagcatgtaaaggcacgatgagctgaggtgtgaaagaaagcgaggacaattgggacatccggtacagggatcggtgatgatcgattgggatgtaggccttacatgccacatggcatcatcgcagctcatcaactcatcgcgtcgctgtacaaaagatatcagaaaatggatggatggacactgcttgaaatgagatcatgtctactgggggcattgtgataggagttcaaatcccagcattcggagaaatgctttgggagtttgggtggcatacatgtaggtagcatactagcaatgcccatgatcagaatactttggaggaacctctctgaccacaatacagctttcttcggtggaaattttggcaccagaatttaggctttcatttggtagtgtagacccctgtgtaatgcccgtatcgaaatgtatgttggttgtaaatggttttgcgttgaatagattgttagagtagggcagtggggagtggcctttacccccgtcttctgaatgaaattgcttcttttgtccatgatgtatgtagtagcaggaagccaggaactgaggtctgtgccctattcagttcaaatggcatgctgaagctaaaaaaggttgccaattctctcgttgcgatgcactgattcgtttgtccttgcatttgattctagccttgaagctgggatgtcattaatgatgagcaacgccaggcatgactttgctgataaactcttattcactggacataagtttgtttgaaactggaatgtatgtttttctctgaacttcagacatggtagtacaatgctggggttcgctgctcacaccctccatcct

SEQ ID NO: 22120 - DNA, 3013 bp, Zea Mays
cccacaccagaaggagccaaccccccctcaggccccaacccttttcccacttcccgccggagcgctctcctcttcgccgctccatcaccgcctcccaatcccatgggcgacccgcaccccctctcctccgcccacctcaccgctgctgcctcctcggctcgagaacaccgtggccccaccaacgagcgcctcgccgcgtccgatccttccacgtccttcgctaagcgtcctagggttgcggcggagccgtccgattccggcggctgcgttccatgcgtcgaggcggacgtacgagctcttgtgtcggtgtccggaggaatttacccgctggcgcgggcaggagcgctccgtggactcaccgcggtccttgagaaggtcgacaccagcagctgtgtcagcgcagcgatcacggactgttgctacaaatgcgcggtggagctcatgagggacgacgacaatggcgtcaggtggacgcgtgtgctcgaaatatttcagcgagattggattttgatgccaatggctatggtgacctgatggacatgattttcctacaggtgagaatggaagcattcgctgcacttggtaaaatgcaacgagtttctgagggtgttctgctacaatcgctagaaaagaaggtcatgaaaactgacaggatgggtgtttctatcatcaacggccaaaaattacctcctaaactaaaaattccctgtgctgctgggattttttcccatggagttgaagatgaattttacgaggtgagaagaactgcctgcaaatcattaggagcgctggcaaagttttctactcagtacacagagaaggccttggacttgttgatggacatgatgaatgatgatacagaagcagttaggctgcaggctctggaagcactatttagtatggcaacatatggatgtttgagtgtgcaggagaagcacatgcatatgtttcttgggttgctggttgatgccaatgtcttaattcgagatgcagcacgcaagatctttgggttagtcaacatgccaaaacttcaaatattcaaatctgcagttgatggtcttgttacaagtttggagaagtatccagaggaagaggatatatatggtattatgttttccattggtaagaaccatgggagcttttcagctaacatagctaaacatttggccaaagagattactatggcatctgacggagagcttatcttggacaaaccaagggtcaaagcattgttaatagtgtctatttcagcacctttttctgatgataagcacaagcagctgggtataccttcgattatcttctcgtatgcaattcccctactggagaagatctcatgcgcactaggagaggttgatcaggattcactcttatcttacttgtatcataaaggtggaatgccattttgggaaaacaggtcagtatctgcagagtttggagaatctgaaagctgcaatgttgaaacagtgaaaattggtgcccatatagaaaacactgcaaaggaagccaaatgtctagatgaagttctggtaatgaaatccatactagaaatagttgaaggagtctggactatgagaatgtcgtgcaatgtttgtgaagttcgaactattttcagaacatgcaaagaagagctgagattattggcagaaaattcttctggatcaattggtgcattattgagctttctgagtgagtatcttgatgcaatattattcattgttgaaatatggcagttgattcagttggacaagccttatacttgtggcctaacgtcacttgatattttactggagaggttggatatgtctgtaaggaggatgaaatattgttatattggattaaatagagtattggaggtccaagttttggagctttctttgatagctcatttatgtagactctcaaagattgcagtgtgttccaaggtagttctgggtaaggtgctctgggtaattaatcgcttagaggatctgtgtgctgatgggtcctgtgaactgtctgacttcagtggagaaattaagaaggcctgtgataccaaccgtattggagataatctgattggcaacatcaacaatttgtttcaactcttccatctgaaaccaacaacagactttggaatgcttaaagtgataagtgcaatgttgcgggtctgtgataacgattctgaaaatccattacaatacatttgtggattaccggtgggtgtcagctttaaaatatctctgtggaacatatctggtcaccatcgactgtggctccgcatgaccattggtgaatctgtgcaacataccttcctagaattttctcgttttgaaggcaatgatgaggtgatgagtggctctatggttgttcctttgtatgctactccaaagacatgttcatttgtgcttcgggtatgtctggtaatggaatgtccatctgcagggatcagcacccaccagggtggacatggaggaccgagtgattgtgtggttcaactctctgatgaactgaatgtttattttgttagtgctagccaatggtgatgattaaaataagcgaccatatgctttccatgctcatcgtcttaaaggcttttgcttgagtggacattcttgatccaggtctcttctggggaaaagggttcagttgtgctgaaatttttgtagttatggcaaaagcaatgcagatgagctgcatgctccatgaccgtatgcatagtgtggagtgcaagtgggttttaacctggtcgaagcactttgagttcgttaggagctacaacttcagacggaaagtgaaggcgtgaagctcaccaagtgacgatggagaaagtgcagcgtgggggtgaagctgacgatggagaaggtgcggcggaccacgctgcgcgggtttttttttgtcaccaatttgtgtggccttggccggcggtgagtgagaaacagccgggtcagaaattcgcaatcctgcagtacggttcatattatattaataatacttccgttttcgaaaatttatcttgtagttcatttcttca

SEQ ID NO: 22121 - DNA, 510 bp, Zea Mays
ccatggtctgctaatttggtggatgtgtgttgtcttatgaaggcaatgaagtatggatctgtgccagtacagttaaacttttccagcgatgaatcaagggagtcaaaggggcatgagtgccgcaatacagtaatgtctcagtacatcatctcaacctatggagatttgtctctttctcaagcacttgatgactttaaaaatgacccttcgcattgggatcgacagatcaaggatgggatggctaggggttcttcatgggacgcaaagtgctatagccttcattgggaggcttattcatccataacgaagctgtgaactgggcatctgctagagaagcacatgacctacatgaggcaccatctccccaaattaagggaacaagcatgaacagtgtcagtgcacttggcacatacacatcattctggacaaacaaacagtacccctccgttttaggggcctttttaaagcgtttttcaaggaataagaactcggataatagatttgcctcgc

SEQ ID NO: 22122 - DNA, 3681 bp, Zea Mays
ttttttcccaacccactggcgggaatagtgacacgctgacagtgcacgatctctctgtcgcctagaactagacgagacggtggaaatcggaatccattcccacttacaagcaggacgcaggagaaatttctgcaaaggtgcagagtcacatgcgccggatttcggggtgaggaaggcaggaggtggaagacaggaaaaagagggggaaagaaacaagtgagggacaggagagcgaggtccttcttgccttctcgttcgtttgctctcctcgctgttcttgcggttacttcctccttttgctttcaatgctaccgcgttactgctggatctggcacacccaccgcgtccgccgcctcctcagctaatcttggtcccggcctccccaagattctcttgttcttttggaattgcgtcttcctttgctgcctctgcttcgcagcagcatccgcgtgcggcggcgtggaacaaggtgggatcttggctcagtttctagagtgttggaattctttctatccatcattgttttgtgttcaagagaggctatctttgtctgcgaatgcagtgctgtgcgtgccaatttgaacttctcgtgcggtactcgaggtgagatttcacctcgtccacgttcttcctcaccgccaaagacccaagggggagaaggaagggaagaggcggaatttcgattggttggttgctgcgtgaatccgcgggattcaggctcgagtctcccttgaattgcggcgtgggccatggttctctcctccaattccaccaccaaggcagcagctcagctgtgaaagtgacagcccgcagtgtagtgctctctagcagcctgctgctggcctgggctccaatggcgtcctcaccttcgccttccccgatcaccatcagagccacctcgccgccttccaccgcaaccccgtcgccggcaaccaccacgcccaagccggattccccggccccggtgacgcagcccaatgctaccccggccgaccctccctcatcgccggccgcgcctcctcccctcccgcctcccgcgtccacgccaccgccacagctcccttctccaccgccctccttgcctccgccccctccggacgccgtgccaccaccgccggttgtcgttgccactccgccacccgccccagcagccgtagtgcctccaccctcgtcgcctgctgcagtacccccaccgcctacacctgctgccccgccaaaggcgtcgcctatacgcccccctgcggccgcgtcgccacccccatccaatctgccagcgcccaacccgccggcggacccaacgccgccgacagtagcacagccacctccgccacggcgccggccaccaagatcgcctcagacagaacctccacccctggcaccaccaccttctggaattcctgtcgaaccttccccaaccagtccctcaccgacgtccgcagatccttcgatccccactccctctagcccctcgtctccagggacgacaccgtctacaccaggctctgatggcactccatcggtgccagccccagcaacgccaggtgactcagttagcccggtaacaaccgggggccaaggttccaacaagtcgtcgagtccagcctcgcagagcagcagctcctcagtagacagtggtggactgtcttctggtgcaaaggcaggcattggggtagtcgttgccattattgtgcttagtttggttggagcagcattttggtacaagaagaaacggaggagagtgcatggataccatgctggttttgtaatgccttcaccggcctcgactcctacacaagtgttagggtattcggccaaaacaaacttcagtgccgggagtcctgaatcgaaagattcaatgccagagttcagtatgagcaattgtcggttcttcacttatgaggaattgtatcagatcacaaatggcttctcatcacagaacctgctaggggaaggtgggttcggatcagtgtataagggttgcttggctgatggaagagaggttgcggttaagaaactgaaagatggcggcgggcagggggaacgtgagttccatgctgaggtggatattatcagtcgtgtgcatcatcgccatctagtttctcttgtggggtattgcatttcagatgaccagagattgcttgtctacgattttgtgcccaacgacacacttcactatcatcttcatggacgtggagtaccagttttggagtggccagctagggttaaaattgcggctggttcggctcgtggaatagcctatcttcacgaagattgtcaacccagaataatccacagggatataaagtcctccaatatcttgctggataataactttgaagcactggttgctgattttggtcttgcaaggttagctatggatgcttgcactcatgtaaccacacgagtgatgggaactttcgggtaccttgctccagagtacgcgtcaagcggcaagttgactgagagatctgatgtattctcattcggtgtcgtcctcttggagcttattactggtagaaagcctgtcgacgcatcaaagccattgggtgacgagagccttgttgagtgggtaagctataccagtttttagtaacttgattcacgaaaaggttaccagttttcttacccttcagtagcaaatggaaagtaaccatatcttaagttatctgcataattcaaaatcttaagtagacttataactcattcactggttacattcaattcagtatgggactgtatccagccctcgaagtgtgatatttctggagaaattataatactggtaaaccatgtggaccagcaatttttgtgacagcacagttatttgcaggctaggccattgctcacgcaggcgcttgagaccggcaacgccggggagctggtggacgcccggcttaacaagaactacaacgaagtcgagatgttccgtatgatcgaagctgctgcagcttgcattcggcattcagcatccaggagaccgaggatgagccaggtcgtgcgggtgctcgacagtctcgctgatgtcgatctaactaacggcgtgcagccaggcaagagcgagatgttcaacgtcgcgaacacggctgagatcaggctgttccagcggatggcgttcggcagccaagatttcacgacggatttcagccagtccagctggaacaacagccagagcagaggtcttgatgcctctggttcaaggccattgtaatcctcctcctcgtcgtcgtcgtaaatttcgtagatctaactagctagggtgtttcgtgatgatttttttacctcgtgtaattctttctgagtggatcaatagtgattgttctttcgccatccctgtcttctacccactaacatagatcatggattgaggtctgcttgcttgtgcaaatactcgttgaccgatgaagagagaccgctgcgtttagtccctactagtgaattgctgtatcgattttttctctttcaaggttttgcaatagtcatgtaatcagcagttcgctttgaaatcggggttttggcaagaaactcttagttcgagttgaacttttgggcaaagtttattcagatgtgcgcctttcagttttttttttaccttgttgtctgaaaaagatgcgcatgagcttcttggctacttggttaggtatcacgtatccaatctgtttggaatctgaagtctccgggcga

SEQ ID NO: 22123 - DNA, 661 bp, Zea Mays
gcctccctcgtgagggctgttcttgagccagcaatgcaaggaaaagacatgattggccgtgctcgaacagggactgggaagaccctggcttttggtattcctatcatggacaagatcctaagctacaacgagaagactggaaatggcaggaatcctttagccataatcttggcaccaacaagagaacttgctcggcaggttgagaaggagtttagagaatctgctcccttggacaccctctgtgtatatggaggtgttcctatcaatcagcaaatgagagctcttaactatggtgttgacatagtggtcggaacaccaggtcgagttattgaccttctgagaaggggtgttttaaacctttcacagatccagtttgtggtcctagatgaagctgatcaaatgctggctgtgggtttcgatgaagatgttgaggtgatcatggagcaattgccacagaatcgtcaaagcatgctgttctctgcaacaatgcctagttggataagaaaaatttcgaacaagtacttaaaggatccagttataattgacctttcctgcattgaatagatcttcctgggtctagaaacattgctgaagcatctgatgaacaccaacactttcatttctaaaaagtataccaaatcagcacctggacattatctga

SEQ ID NO: 22124 - DNA, 973 bp, Zea Mays
ccgttgtgccgcggcttcccgcccccttctcgttcgcctcccgcctccgcccccttcctattgggcacgattccgttcctataaacccctgccgcacgcccgcagtggagaaatccccccaaatcacaatccccgtccctcgtctcccgccgccaggacagccatggccaccgccgtatccacccccgcggacctgtcgccggcgccggtcccgagacggcggggccggccgccgaagaaccccgcccccgcacccgcccccgcccccgcccccgccgtggcggaggtgattggggactacgagcgcgagagggccgcgaggatccgggagaacatggagcggatgcagaagctcggcatcctcgacctcgcgcagaccctcagctactccgccgccggctcggctcgaggtaccggcagcggacgtcggcgccggaagcccgtggacccgggtcccgctggcggggccagggtgaagcccgcgtcgccggcgccctcgcggaggtcgctcaggttgaaggacgtggaatcaattagctattgtgaaactgaacctaagaaagagaaacactccgaagttggcaaaattgaggtagtagaggtaggagccaaggaagaaatatacactgaagagcatgacaggcttctgggaacatgctacactccttggacactctttgtcgatggttatggcaaagatggaaaacgcatctatgatcaagtgaggggccaaacctgtcatcagtgccgaaaactcttggtcatcatacaagctgctgtaaatgccagattgttcaagggcagttctgtggagattgtttgtatatgaggtatggcgagaatgtgttagaagttaagaagaatcctaactggatatgtccagtttgccgtggcatctgtaattgcagcatatgcagaaccaagaaaggatggtttcctactggtttctgcgtataggaaggtatatctaata

SEQ ID NO: 22125 - DNA, 220 bp, Zea Mays
accaaatctcacacatatgatgaatagtggtacaaaaatgaatgtcacaactttattatacaataggagttctatacaaaataaataaataattacatcataaagagacaacgattcagcaacccaaagttgactgggatacgatgacctagacctctcacgaacacatcgcagcaacctccatgcgcctcatcctgaggtatctgttcttgacctgtgg

SEQ ID NO: 22126 - DNA, 1597 bp, Zea Mays
tttcattttgcatcccaggttttagggaggacaattgatctaagaagcataattactcagagaatgaacaaaatattcagggaaaatattgactttctacttgagcgctttgaaaatggagatctttgtggtgttgtggaactgcaacaactgctggatattttggagcttacacaccaatcaatatcaagatttcttgaattggattcttactctcttatgcttagcgagatgcaagaaaatctttcgttggtttcttattcaagtcgcatctcttctcagatatggagtgagatgcagacagatttcttgccgaatttcatcttatgtaataccacacagcggtttgtccggtccgcaaaaggaactcaccactcttcgcatagatcaagcgcttctactgggaaaccttacttctattgtggatcacatagacaaatcgacactacacagttcatgcagtcagctccgtggctaggattggttccaggaaatgatgggcaagtgaagcatgcctactctgataatactccatttaccacacttttaagtgctgcctctaatgctgtgacatcaagccctacatgcccaaatccatctacgtttcttgtcatgtcaaagcaagctgaagctgcgagtctgctgtacaaatcaaacctcaactctggtagtgtgctggagtatgctcttgcattcacaagtgctgccctggatagacactatagcaaatggagcgcaactccaaaaacaggctttatcgacattactacttcaaaggatttctatcgcatttttagcggtcttcagtatagttacttagaagatagcattaacaatccttcgaagaaacaagaaatgctgggtgattctgtagcctgggctggctgtacgataatgtacttactgggacagcagcagcacttcgagctttttgatttctcctatcaatttctcaatgtggcagaagtagaaagtgcgacagtatcacactatcaatcttcagagaggactaaaagttcaaatttcttgcaaggctacgagggcatcctggaagcgatgaggaaggctaggaggctcaataaccatgttttctccatgttgagggcacgatgtccccttgaggacaaggttgcatgtgctatcaagccaagtggggcaccgcttcaccggatgaagtttatgaacaccgtttctgcattcgagacattgccacaaagagtcacctaaccagcttccaggcaatgtgcagaatgtactcttgtatgcggggttatatgttatgttgtaaggtaaatgtatattatgtagtcacaagtcacaaccatcaaccgtggatcctggacctgaacaggagaatgtgtttgcttgctatatatgaaaattaggtgggtatgttgaagttgaccctgagttcgcaagtttagctttcaactttgagactatctcgctgaaccaaatatgtaaaccagctggagagttgagccagaggacacgtgctagttagctgttcttctcgtgtctgtatttctcagactgctctcaaagtatatttaatgtatgacgattcagattagcttaaaaagttgtgttatccgag

SEQ ID NO: 22127 - DNA, 226 bp, Zea Mays
tgggcgttgttatgaaacaacggcgtatgacggtatcaacacataaactaatgcctgcatctaaggttagatgattagatacaaagtacaaaggcccactatagtacaccatggtttggggacctctgcccatgattttatatactataggtttctctgtcaaacgaaggcaatcaagcatgttcatgacaatctgtttgaactgataaataaacaagaataaaac

SEQ ID NO: 22128 - DNA, 1603 bp, Zea Mays
tgcacattctgtatagttaatggcaagatggcttttcttggttaagagttctgagaaactggtatcgaaagccatgaagtatgtcagacggctttactacgcttgtccctctgaggtggtctctgttctattggatcttatggaactggatgctgcaggctttgaaagcagtgacatgcaagaaactgatagtttgtctgttaaccactcatctgacactcaattatcaatcagtgacatgaaaactatcatactgaaactttcagagaaggaaccaagactgctgcttagtgtactaaagtctgtaattgaaatgattgacgccaaggaagatctcgcatataaagatgaatctcgttcgtgtctgccagctgggccatccaaagcgaaaggattatgtcccttggttctatggcttgtcacaaacattaaagagcataaggattcaggctacattggacttgttcacgagaaaggggtactttcttcagacaagaatgcaatccctcatttttgccttgcaaaacttctgcagaagttattgaatctatccactacaagtgaaagatatctcatagacgcagcatggttgttgattgaaatggtcaacgatagtaatacgaaggagaaattgaggaaacttcctgtgttgtctctgggaaggatggctaaatcttcttccctcccagattcaagaaccatatgcaacgaacagggatcagttgaaaacgcaacagagacactcgaattattcaaagtgcagttgaagaggcagaagaatggtggcactgaaggatcattcagtacgagcaccccaaagaaacatgacaggtggtccatagcaaaatcatggactccctgtccaataggaacagcaccctgttcatttagttcatgtgctgttcttcctgcctttgacagcatcggtcatgaacaaaattctacattagaacatgggacctttgaggaggttgatcattctgaaaggtttgagcctcagcccgaggagttggaggatgaaagcattctggaaatgccaaggtcatcaccagaaaatgaaatttcagacgttaaagaattgatgtgtcctttgaagggtagattgttggtcggtggcttttggaaaatggtagacgaagaggagctgctcttgataaaatcgaagatgaaaattttgttgtaatataatcttcaatggttgaggaccgggcgtagtccgggtggtgaaggcggcgaggtccccttgaccaggttggggggttcgacccccctgattgctcaccaaaaaatcccctcgtcctcacccacacctgggtgggcctttgcagtgtgggcagcctgtgagtcgacacgttagtgacaggagttgttggattcgggggtttctcgtcgggaccgttcgctgcgaccttctacccatgaaaagccacgagggtggtcttattaccctcccggtcgagttttaatcttcaatggttgtgaccaaacaatgttgtgggtcttgagtttcttcactatttgttctggttctcaaatttttgtttgttacttaggggtgtttgaatgcactaaaactaatagttagcagctaaaattagttgag

SEQ ID NO: 22129 - DNA, 740 bp, Zea Mays
ataaatagcataaaacttatcatgcagcacagcagcagctgattgagtatgaaaagaagctttttggttctaatgatggcagcataccagctcaaccttttgctccagtggattcgctcccttctcttggatttggttttccaaaaccaccaggcgacatccaagcgcctacctttaatcagcaggctccagcatctatctttgagcgcgttaccccgaacagcttccctagtaatttcatattcggagccgaaagaactagtgatagtgatgcgaaacttccagatagcaacaatttcggcgtggtaaactcgtctgggagtgatagcatgatggacagctcctaggatggttttgccttcaccaaggctatctccagcagcttaatcctcaattcctcatctctcgtttcaaatttcacttccactcttgtacaactatagcctgatatacaaaagaaatgactcagtcgcaaatttagtcaggtttctcgggatgtttttttatttctgagaaggaaacgcatttttgtaatagtatgttgtaatatttgccagtattactaaattgctgctgtgcattttaacaatcatgagtgtgcttttttatgtaacttttctagggtaattcacgataacaaattacgctggaaagtttgaataaaaggttacacatgtgcttgttaagatgtacagatttgtgggctcggaaaatgtaattcacgataacaatcatgagtg

SEQ ID NO: 22130 - DNA, 1409 bp, Zea Mays
ccgagaacccggtccacgctacgccatcttcctccgctgacctctcatcgtcgacgaaggaagccttacgcctgttcaagacgtcaggtgttggtatttgggttgcaattgagtgattgggaaacctgattggacagaagcattgttggtcaaccaatgggaagcaatgaccctagcacaccctccaaggcttcaaaggatcaacctccagctaccacatccagtggaacagtttcagtttaccctgaatggcccagctttcaggcataccaagcaattccaccacatgggttcttcccccctaccgttgctgcaaatccacaggcccattcatacatgtggggagctcagcccatggtaccaccttatgggactccaccaccaccttatgtgatgtatccacctggagcagtatatgcccatccctctacacctcctactatgcatccgtttagtcattaccctatgccaacaaatggacatgctgaaactcctggaaccgcgccaagtgctccagaaatgaatgggaaaagtgagcctggcagaacatctgctccatctgccaatgggattacctcgcacagtgagagtggaagtgagagtgagagtgaaggaagtgatgccaattatgaaaatgattcacattcaaaggacaatgatggaaaggaagatggcaattctcagaatagcatatcttattcagcatcacaaggagtgttaaaccaaaccatggcgatgcttccaatacaaccgggcgcaatggttggaggagtttctagctccacagctaacttgaatattggagtgcactactgggaagctccaggttctgcagctgtctctgcaacgcatggcaaagcaccagctggttcagctcggggagaccaatgggatgaaagggaactcaagaagcaaaaacggaagcagtctaatagagaatcggcacgcagatcccggctgcgcaagcaggctgagtgtgaggagcttgggcaacgtgctgaaactctgaggtcggaaaactcgtctctcagggccgagcttgaacggatcagaaaggagtacgaacagctactttcgcagaacgcttcactcaaggaaaagctggggggcagcagtgacccgattcctgatatgaatgaacagaacgacggcaacggcagcgacaagaagcaatctgattccgatgcccagcctgggagcgagtcttgacccgtttagctcaggatccttgggaatgcacattgctatttattttctcgaacatggttgaacagaacataggagaaaaagaattgtttatgtaactcttaccccttgactgcctaatgtctctgacggcatgtatataatgtatgccctcactgctgaactagtactagtaattgaggaattgcagatattgacagctt

SEQ ID NO: 22131 - DNA, 1751 bp, Zea Mays
cgccgagcactatatagcacgtgttcgcgtgcaccggcggcaaccacagcccaggctcgagactacaacgttacagcacaacacactgctgcacgtacatacgcagatagagaccagcagcaagctcgatcgagactcgagaggcatggggagtgtaccggaggagaaggccaagctgggcttcggcggcctggtgggcgacctgagggaggtgtacgagagcggcaggacgcagggcctggagtggcggcagtcgcagctcaggggcctcgtcaggctcctggaggagaaggaggaggagatcttcgacgtgctccacgaggacctggggaagcaccgcggcgaggccttcagagacgaggttggggttctgaagaagtccgtcgtcgacaagctgcaaaacctcaagaactgggcggctccggagaaggctcacacgccgctcgttgccttcccggcgaccgcgctggtggtgccagagccgctcggggtcgtgctcgtcttctcatgctggaacctcccaataggcagcagccgcgttgggcgccttatcatggcccaggccgccaagcacctcaccccggtggcgctggagctcggctccaagtgcccctgcatcgtcgactggcttgacagcgacagggacagccaggtagctgtgaatcgcatcatcggagcgaaatggtccacctgttccggccaagcctgcatcgccatcgactacctgctggtggaggaggagtttgctccgattctgatcgagatgctcaagtcgacgctggagaggttcttcaccaagccagagtacatggcgcgcatcctgaacgagaagcagttccagaggctgagcggcttcctggccgaccgcagggtggcgtcttccgtggtccacggcggccacttcaaccccaagacgctgtaagctagcaggcacccaagcacgcttcgatcgtcgcctttcgctcccatgccaacgatgcttgacgccgtgcatgttccccgttgcggttgtgcaggagcatggagcccacgcttctgctcaaccctccgctcgactccgacatcatgacggaggagatattcggcccgctgctcccgatcatcacggtgaagaagatcgaagacagcatcaagttcctcaggtccaagcccaagccgctggcgatctacgccttcaccaggaacgagaagctgaagcaacgcatcatagacgagacgtcgtcggggagcatcacgttcaacgacgccatcgtgcagtatggcctggacagcatcccgttcggtggcgtggggcacagcgggttcggccagtaccacggcaagtactcgtttgacatgttcagccacaagaaggcggtgctcaagaggagcttcctcgtcgagttcatgttccgctacccgccgtgggacgagaccaagatcggaatgctcaggcgcgtctaccgcttcgactacgtctcgctcttcctcgcgctcatcggcctcaggagatgaagcagacggcggagagtgcgtgaacaatcgagccaacagaatttgcacccacacccaacacacagttgctagtggtcaattgtcgttcatactgatcgatgaatatgtaattgtcccttctgtacaccaaaacgtctgtagtgtcgtttactcgttttatacgtgtctgtctatttatcgcaccaaaagatatttaataataatggattattatctttctagtttgtgctcttcttgaacaatcgccacattccgac

SEQ ID NO: 22132 - DNA, 815 bp, Zea Mays
cagcagcccagcccatttggcccatctcaaccgaaggaggcaaagacgcaacgcgaggtctcatgggcgaccgggccattcgtcgtctccgttgtctttgttgcagatcggtgctcctctcaccaccaggccgccacagctcgccggctttcccctccctgccatcgagcaccacctgagcaaacagagcaaggaaatagtttaagaatggctgcgcggagcagttctatggttgccgaggatgactacgagacggatcagaagaagcaagctgctgcagatgttctttttcactattcacaatttgttatggtttgcattggtgaggatgttcgccctactgatctcaggttacatcttatgaaggaagtttcaggaatgtccacttctctgaaggagcctcaacaggctgctgcctcaccggcttccagtggggaaccgtcttcctctggaacgatgaaaggtgacaagaatgaaatctcctaagcttcataaattattatccaactcaggacttcttctgttccttacgcactgagaagattgtaatgttcagaacttcggatgatgaggcttacttgcaatataggaatgtaaatatgttaggaacattgttcatagctgtctgctgttctgctgctttagcttctttcgtgacagcctgcttcatgtatgaaactttgaatccatttttattcagggggcagtaacgtaaatgctgctgtatttttttttaaatggcaggtgaatattgtattctgaataagtcatgtttactagaatcgttgctgtggctttgattggatcggctagga

SEQ ID NO: 22133 - DNA, 885 bp, Zea Mays
actcaatcttgatgtcaatgacaagatgattacaggtgatcaacttgctattgggaaggaaacaacacgtcgtttgggaatgggtactaaatgtaaggatgagtcacttgcttcattgccaattgatgaattgaccgagaaggctgatggctttgctagagtctttccagcttggttttatgcttcttgcgctgatatggaagtttgacttcccaacatttaccgtccagatcattgccatcctcaatgacgtacaagcagcatattaggtaaactaacaacatcaacctggcgacatgaataagtaccattgtggctatctcgaaggacatagtaaaaccacctgcacaacctgacagttggaagttatttggtcgtgatgactgtcattttttcttctgggctacgtacaagactgacttcttctcgaatgccactctgattgttgtatatgccaactgggcatttgctgctattaagggcattggatggggctgggccggtgtcaaatggctctacatcattgtcttctacttcctgctgcgcatcatcaatttcctcatcctgctatacgctgagtaggagggcatggaacctcgtccttatgtatatactaggtgtgtgcccgtacgttgcaacgggagtatgttaggatgagcatcgacacatatttgatcggatattatattttttgggatctggagaaagtttgctcggaagccaaacatgttaagacctgagcatgtgtatgatatgcaaaggctggggctcgaacgcgcttgtatgagtcttgttaatttgcatgtctcgtgcatagtctctcaccatctattcactataatatacaaaatctgtgtctatctatatttattttaagcttctaac

SEQ ID NO: 22134 - DNA, 3609 bp, Zea Mays
ggcgaggatcggcgccgccatgtcccagatcctccgccaccgcctgtcggctcactaccacggagtctgcggccactgctgccgccgcctcagctccgccgtctacggcggcggcgggagtcgccgcgccgtcgccgcgccgccgcaggacggcgagggcagccgagcggtgagggtgtctgtgtggtgggacttcgagaactgccacatccccaacggcgtcaacgtccaccgcgttgccccgcgcgtttccgccgccctccgcgccgccggcatccgcgggccgctctccatcaccgccttcggggacgtgctgcagctcgcgcgctcctcccaggaggcgctcgccgccacgggcgtctccatctcccacgtcccaagcagtgggaagaatagttctgaccgctcttttatggctgatcttgtctactggattgctcagaatccgccaccagttcattttttccttatatctggcgatagagattttgcaaacatcttgcatcggttgagaatgagcaactacaatgtactgcttgcttgtcctagtagtgctaccagtgtactgtgcagtgcagcaacaatcatgtggccttgggaaggcttagttagaggagaggatttgtcaccaaaacgttttaacaacccgccggatggtttacatggatcttggtatggtcactaccgaggagcccttgacgacccccccctggagaaggaatcagaggaacccatcaagatgcaattctggaggcgctatgttcatatcctgaagggatcaacctttcactactccaggaagagcttgcgaagaaaaaaatttgtcttggtccagatttttttggccacaaggatttctcttgccttatacaatcaataccagatattgttgaattagtatgtcctcaaactggtggacaactatatgcaattgctgtcaacagaagatcactgcagcctggtgacggaagtactaagacccttagctcagctcaaggtaatgccagggagaataacccaactggaacagctcacagtaataagaagaatacactaagttctcttcgaagcatttacaagagcagaagcttcacagagacactaagtgaacatccacctacattttctgtcttaccttccccgtcaaatgggctatctgaggaccaaactgagtgcccagtggtggatgtgaatgggtcgacagagtcaccagcaaagcacagggaagttggtgaaatgactacccctggaactccctcttcctcaggggtggaaaatgctgctaatgaatatggcttctttaaaaggatctggacaatgtggaatggtcccaagaatgttaagtctgaggtttctcaaaattgtgaaagcacttctgctgaagtgattgatgatttgcaggtttctcagaattgtgaaagcacttttgctaaagtgattgatgatttgcgaactcctttggaagagtataatggtgatcaccgtataaagcttttgaggaggatacatgaaacctcttccaaaaatgatcgctcagatggtactgagggcatgttagcagtaagtgataatttatcgatttcattaggtgatgatcattctgaaaaaataaagagagatccatcaattcctgaaaacccagaaccatgcagaaaacctgctgctgtttccatgattaaatctggaaaaaaggatgatatttctgaaatgaataggggcatgtttaactgggcttcaaggtggtggccatttgggaaatcagatgcagatagtagtacaaccaacataaatgccactgatgaaccgaggactgactctattgaagaatttgaatcttcaaacgctccaactaatggaagtgcacaacaggtggttcatgaaatatttacaaagcctgacttgtggtctgttttggagcaacagttatcagaacctcttgggtctgaggttgttttgaaagcaaagacaaggcaggaattggcacacagattgcagaagttaaattgctggcctttgaaaggcctccttgataaagacctgcatcacctggtacatctgttaatttctgaaaagaaatggattgaagaaacttcttccagaattttccctttccgtcttaccctccctcgcaagagaagatgtgtcccatcaagttccagcaaatccaacggcctcagttacattttttcaagtgggaagccacaaaagggcagatacgttgacaataacagtaggaaaagcaggtccctcactagagaggagatactatcagattgtcacaagctggtgaaggagcttctttctgagcatgaatatggattcaacatcggaattttcaaacgccgtttttcccaggagtatggatacgagctcgaacaccggaagctcgggtatctggaccttgaaacgctgctgcatattatgcctgatgtaagggtgaaattcccaagggtcatgcgctcagaacacgggaacgggcaggctggcagcaagggagacggaaaccgaagcagcggcgatgacttgatctgggaggagcttggtcctgtatctgccacaactgaaaccgccgccgccgccgctgatgcaggggccgacaaggaaacatgctatcgtcctcccactccttcagacgacgagttctcggacagcgacagcataaaagaccggcagcctagaaggaacgccgagcagcagagctcgcttctccagatcattggagcttggaacagcagcaagggtggcgacgtctctagcaacaagcctcaggacatcgacgggttggtggactgttcgagaagcagcccgggcagtgctggcaccagcgcagcttcaggaaaggtgcagacgtcgtctccgaagctaccgcacaagcagtactccttcgtgtcggactccggagaggagagcgatccggataagctggtggagagcgtcttggacagcctgcagaaagcacggggcggctcgaagctgcacaactgagcgtctgctgccatcgaattattgtttttgcaacctaacgagtcgtgcttatggtggtggccatggctgactgtcaaggacagcggcgcctgcaagcatcagccggagagactggtgaataaagctcgtcttttacttggactaggccgtagtacaatcggaacagtccttggtaattggtatgttaacattggctagagaccgcctcccatttctgtttcttgtttctttcttttcatgcaggatggttgtccgcccaatctacacgctcattttcttaacaaattggttaacacggcggggcttagacggtcgttcgtcaccagtgttggtattccaagcccaatcttttttttgcttgtagtatagtaaacataaaatgacatggcacatgctggtgtctagagtattgctgtttctggagtcccaagcattcatgtgatggcacattggaatgccagttgtactgcaatagtgccaatgaatcctatctaacactagacctggtcacgttggtcaactgttgatggttgtgcttttctgtctgttgagtgccatctagtctagatataacaaacaaggcatcctgacattgcagcagcacattcacaggaccaggtggat

SEQ ID NO: 22135 - DNA, 250 bp, Zea Mays
tttaagagtagagaagaaaacactggaccgccttcaccctgcttttcgtcttcctttcaccccgcttgcgctctctctccctctccccacctctctcctgcgccaactgggcgaccgccgccgccggctgccgggccgccgcacgcctccaggtgcccaggtcttcgtaggtcccttagctcggccttcgtcagggttcggggtccttcgctggcgacgatcacccatcagagttcatctggatttcgag

SEQ ID NO: 22136 - DNA, 2162 bp, Zea Mays
cccccctcgcctcgtccttaccgttataccccgagtccccgacacaggtctcgctcgctggtcgcctccctcgtccctcgcatcttctccctctttctctctccagcccagtagcctgtagccccccccccctcctctctctctctcttcctcccccactcgcacagtgcccaatgccgcacaaaccctagtgcccccactcccaatctcgcgcggcggccatgggaaactgctgccgctcgccggccgccgcggcgcgggaagacgtcaagtcgtcgcacttcccggcctccgccggcgggaagaagaagccccaccagcaggcgcggaacggcggccccggctccggggagaagaagcgtctgtcggtgctcggggaggaggggtgcgacgtgggcgccggcgggatcgaggagaagtacgcgctggaccgggagctggggcgcggcgagttcggggtgacgtacctgtgcatggaccggggcacgcgggagctgctggcctgcaagtccatctccaagcggaagctgcggacccccgtcgacgtggaggacgtgcgccgggaggtggccatcatgcggcacctgcccaggagccccagcatcgtgtccctgcgggaggcgtgcgaggacgacggcgccgtgcacctcgtcatggagctctgcgagggcggggagctcttcgaccgcatcgtcgccaggggccactacacggagcgcgcggcggccgcggtcacgcgcaccatcgtcgaggtcgtccagctctgccaccgccacggcgtcatgcaccgggacctcaagcccgagaacttcctcttcgccaacaagaaggagaactcgccgctcaaggccatcgactttggtctctccatcttcttcaagcccggtgaaaagttttcggaaattgtgggaagtccatactacatggctcctgaagtcttgaagaggaactatggacctgaaatagacatatggagcgctggtgttatcttgtatattttgttatgtggtgttcctccgttttgggctgagactgaacaaggagttgcacaagctattcttcggggaaatatagattttaagcgagaaccctggcccaatgtttctgacaatgctaaagatcttgttcggcagatgcttcaacctgatccaaaactcaggctaacagcaaagcaagttcttggttattgctgatcacttgtcagctgaagaggttgaggacataaaggatatgttcaaggtgatggatactgataatgatggcatagtttcttatgaagagttaaagagtgggattgcaaaatttggttctcatcttgcagaatcagaagtgcaaatgcttattgaagctgtggatacaaatggtagaggagcactagattatggtgaatttttggccgtctcacttcatttacaaaggatggcaaacgatgagcaccttcggcgggccttcctatttttcgacaaggatggcaatggtttcattgagcctgaggagcttcaggaagccctgatggaggacgggggagctgataccatggacgtggtcaatgacatattgcaagaagttgacacagataaggatggtaaaattagctacgaagaatttgtagcgatgatgaagactggaacagattggaggaaggcgtcgcggcattattcaagagggcgcttcaatagccttagcataaagcttataaaagatgggtctgtaaaactgggtagcgagtgaggttgtagcttgctgccgatgctcttctccacgcattgtagtctgcctctcgggcccgctaagcagaaacccccttccgtttgctaatgattattttgtctgggatttaggtagttggagcctccctgattggtttactcgtgtaattagtagcccttttcagtatcgctgaggagcatctgctgtaggatgcacgcctgcctccgtctgtctgctcatctcctccggtgtacccgtcgctcaaatggaagtgttgtaaaatgttttggtgttgacctcaaatgcaatttgctggtttcgtgtactgacacccaagattcatttgcgcctataaggctaactgtgaaaatttacgtcatttgatgaggaaatgatgaagcgctagctgatttgtcttgtattctgtttatgcggtgtaaagctagtttgag

SEQ ID NO: 22137 - DNA, 3045 bp, Zea Mays
ctcagaggcaggcgtgtagtacgcagtacacacccacaaagtcgcaactcgcgagcaatggacgcagcgggaggcgccaaagggagggatggcgtggacaagaaggaagtggggagcgggagcgggaacggcggcggcgacgccgggaagaaggtgccgttcacggggctgttccggtacgccgacggcacggacgtgctgctcatgctcctcggcacggtgggggcgctggccaacggcgtctcgcagcccgtcatgacggtcatcttcggccaggtcatcaacgccttcggcgacgccaccatcgacgacgtcctcaaccgcgttaaccaggcagttctgaacttcgtctacctaggcattgcaacagcggttgtttcctttcttcaggtgtcatgttggacaatgacgggagaaaggcaggcaacgcgcattcgatctctgtacctcaaatctgtcctgagacaagagatagcattcttcgatgtagaaatgacaaccgggcaaatagtttcaaggatgtctggtgataccgtgctagttcaggatgccattggtgagaaggttggcaagttccaacagcttgtggcaaccttcatcggcggtttcgtgatagcattcgtgaaaggatggcttctatctcttgtcatgctggcatgcatccctccagttgtcatcgctggcggaatcgtctcaaaaatgcttgctaaaatatctaccaagggccaagcatcgtacagtgacgcaggcaatattgttgagcagacacttggggctataaaaacagttgtctccttcaacggggagaagcaggctattgcactgtacaataaactcatacacaagtcatacaaagctgctgttgaagaagggatcaccaatggttttggcatgggttctgttttctgcatttttttctcgagctacggtttggccatatggtatggcggaaagttggttcttagtaaaggttactctggaggagatgtcatcaacatcttgtttgctataatgaccggggcaatgtctttaggtaacgcaacaccctgcatggcagcctttgcagaaggacaatccgcggcatacagactgttcacaacgatcaagaggaaaccagagattgacccagacgaccaaaccggtaagcagctagaagacatcaagggtgacgttgacttaaatgacgtgtacttcagctacccggcgagaccagaacagctaatatttgatgggttctcgctgcatgtgtctagcggcactacaatggccatagttggggagagtgggagtggcaagtcaactgtgataagcctcgtggagagattctatgatccacaggctggtgaggttttgattgatggggttaacattaagagtttgcagcttgattggataagagggaagattggtttggttaaccaagagccgttgctctttatgacatctatcaaagataatataacatacgggaaagaggacgcgacgattgaagagatcaaaagggcagctgagcttgctaatgcagcaaatttcatcgataagttgcccaatggctatgacacgatggttggtcagcgtggtgctcagctatcagggggacaaaagcaaaggatcgctatcgcaagagcgatcatcaaaaaccccagaattctcttgttagacgaggctactagcgcactggacgtggagtcggagcggattgttcaggaagcgttgaataggatcatgctggacaggacaacacttgtggttgcacatcgcctgagtactgtgagaaatgctgattgcatatcagttgttcagcaagggaaaatagttgaacaaggtccccacgatgagctggtaatgaaccctgacggtgcttattctcaactcattcgtctccaagaaagcaaagaagaagaggaacagaaaccagagcggcacgtgtctgattcaaggtctaaaagtagaagcctctcactgaaacggtcgataagcagaggttccatggggaacagtagccagcattttttgaccctccccattggcatgcctggctcagttgaattgctggaaggcaacgatgagaattgggaggaggacgagaaagagcaggctcgtgacggtgaccgtgaggccccaaagaaagctccgatgggacggctagccagcctaaacaagccagaggtaccgatacttgtgttagggtcgctagccgctggagtccatggagtgctcttcccgttgtttggcctgatgatctccaacgccatcaagacgttctacgagccgccgcaccagctgaaaaaggacgcgagcttctggggcttgatgtgtgttgtgcttggcatcgtgtcgatactgtcaataccggtggagtatttcttgtttggggtagccggcgggaagcttatcgagcgcatccgtgccctgtcgtttcggagcatcgtgcaccaagaggttgcctggttcgatgatcccaaaaattccagtggagcacttggcgcaaggctgtcggttgatgctctgaatgtgcgacgtctagtgggtgataacttggccttggcagttcaggtcacctcgacgctgatcgcgggattcgtcattgcttttgtggcagattggaagctcacgttgattatcctgtgtgtgatgccactgtcgggtgtgcaaggttatgcacaagtgaagttcttgaagggtttcagccaagacgccaagatactgtacgaagacgcaagccaagtggccaccgacgcagtcagcagtatcaggaccgtagcttctttctgtgctgagaaaagagtgacgacgatttacgatgacaaatgtgaagcctcgaagaaacaaggggtcagaacagggatggttggaggcctcggtttcggcttctcgttcttgatgctgtaccttacatatggactttgtttctatgttggagcgcagttcgttcgtcacaacaagtctacttttggggacgttttcaaggttagaaaaaatgcatcttatcaccagcgttgctctctctctctctctctctctctctctctctctctctctctc

SEQ ID NO: 22138 - DNA, 3281 bp, Zea Mays
ggaaaggatttgcttttgcgacattgcgcaccagctggagtctgtgctcggttaactgatgagagtatgatcagagaaaggaagcgcctccctacctccagctccaataaataggggaagagagagagagagaactataagcctgctgctgtatgtaacccagatccaccccattcgcatctctgcttctttctgcttgggtgccctctgccctgaccacagggcccaaccatatcttcttcctcacacagagacactgagcgagcgagcttgagatcgatctcaggaggcggccggcggcggcagcagcagcagagcttgttggcgccgccatggcgataggtggcttcgtggaagcccctgccggcgccgactacggtggccgcgtgacgtccttcgtggtgctctcctgcatcgtagccggtagcggcggcatcctcttcggctacgacctcggcatctcaggtggggttacctccatggagtcgttccttagaaagttcttcccggacgtgtaccaccagatgaaaggagacaaggacgtgagcaactactgccgcttcgacagcgagcttctcaccgtcttcacctcctccctctacatcgccggcctcgtcgccacgctcttcgcctcctccgtcaccaggaggatactccttggagtaggcctcggattcacaaaccagtccatcccgctgtacctctcagagatggcgccaccgcagtaccgtggcgccatcaacaacggcttcgagctctgcatcagcatcggcatcctcatcgccaacctcatcaactacggcgtggagaagatagcaggtggatggggctggaggatctctctgtccctggccgccgtgccggccgcgttcctcaccgtcggcgccatctacctgcccgagacgcccagcttcatcatccaacgccgcggcggcagcaacaacgtcgacgaggcaaggctgctcctccagaggctgcgtggcaccaccagggtccagaaagagctcgacgatctcgtgtccgcgaccaggacgaccaccacagggcgtcccttccgcaccatactgaggcgcaagtacaggccgcagctggtcatagctctcctcgtacccttcttcaaccaggtcaccggcatcaacgtcatcaacttctacgcgccggtcatgttccggaccatcgggctcaaggagagcgcgtccctcatgtcggccgtggtcacgcgcgtctgcgccacggccgccaacgtggtggccatggtggtcgtggacaggttcggccgccggaagctcttcctggtgggcggcgtgcagatgatcctgtcgcaggccatggtgggagcggtgctggccgccaagttccaggagcacggagggatggagaaggagtacgcgtacctggtgctcgtcatcatgtgcgtcttcgtcgcgggcttcgcctggtcctggggccctctcacctacctggtgcccaccgagatctgcccgctggagatcaggtcggcggggcagagcgtcgtcatcgccgtcatcttcttcgtcaccttcctcatcggccagaccttcctggcgatgctgtgccacctcaagttcggcaccttcttcctcttcggcggctgggtgtgcgtcatgacgctcttcgtgtatttcttcctgccggagaccaagcagctgcccatggagcagatggaacaggtctggaggacccactggttttggaaaaggattgtagacgaagatgcagcaggggagcaaccgagagaggaagcagcaggaaccatagctctgtcgtccacgtccaccacaacatagtcatcatcaacaatactcatggcatgggcctgccctgtatagatagataattaactagctgcaccgcacagattgtctccgactataagctagctagctagttggatgcatgcatgcatgcattctgttatttctgtgaccatgaatcaaagggccttccaacagaacagaatatgagatgagatgaatcttatttgtgactgagtgccaagccaaccaagcagaggcagcgtaacaatccaagccactgtcggaagcccatgcatcaaatcaaaacagcgtcatcaccctctgccagtgccagcccaagcacagcgtgccaaatggcaactagcaaatcagaaaccgtcaccgatgcctttttgtttgtcaggtaaggcacaatgtacttcttcatgtcacctttggagataccaagatgacctcccggcacagacacaaacttcacccgccctgcttcatccagtgtcttcaaaccaatccagtcttcctcatacagtttcgtctgcacacacagagcttgccattgtaagcagagcacacatggaggaggacccaactcacgtgcatgaatcaattctaccttctgaggtggtagaactggatcaaaggctccatcagggtagtaaccaaaccatgccgtttctcgtggtatcaggactgcatcatcctgaaactgcaaataacatacatacatacatacatatattaagataggtcaaaagaattcaatcgattttggattcagaccatgtcaagcttaccataatcagaaccaaattctctaagctactgaatctttccttgtaggtggcatttcttttatctggaatttcattgttaagttttggaagaaacctacaactcttcagataatctgccatatcagttgggattttgaggtagccactaggtgcaagatgttcctgtaattcaccatgcctcaagttatcgcgtgatttttttttaaaaaaaaataataaagtgtttaccatgacaaaaaaatcaagttcgatttaagccaatgcattcaaacctgcacatagtctgagtagatctccaatttgatcagagcatcaacaataatgcaaaaaaatccagactgcatatataatatacagatatcaactgaatcatacaggctgccatagaatatgcggatgttaaaagacaagtacatttaaacaataatggtgttagtctcagccaatatattttccttaatttttactaagtgtataagtcatcaaacaaatgcatgaaagcatatttaaccatctattatactacacaaacttgtcaccatatcatcgaattattagtcaaaacatggcattaaaaaaccacatagtgattggaaataatgactgatgagattaacttacaccacaaagaggcactgaagcggtaccagcatgaggacctcctagagagatgaaattcttgacctgccaggtgcgatctggatcataa

SEQ ID NO: 22139 - DNA, 2195 bp, Zea Mays
ttgaattattattattctcctctttgcaggggctggctggcttcctcctcttccacctccctccatgcatgcagaggagcagcaccttcattactccacattactctccctccactccgactccgggagaagtcacccaccacagtctcacatctctggtacatgtacatccacagttctgcaagcaaaccattcactcctccctctgcctgtattcttcgtttcgcccctgggatcctcgtcacgactcacgccatccgcccccaccgccaccaccagccacaccatctctgttctccagtcacgccagacggccagaacccacaattttcatcacaccaaaccatccactcctcacctttccccccaaacaagtccaatctttacaacgacattgtcgccaactacaacccctttcccttctgggtgcctcaccagattacccactcaaatccagctaccaagcacaaaagctgcggcatttgccatactgtttcatccgcggaacccaatcttgccgcccgatccttcgcaaaatccaccgtacgtgcttgctgcccctgttccagtccagactctagacaatgctgtctgcgccgtggaatccgagcgttgccagctaattccgctcgggaacacgcacgaggagatccgccagttcgcaagaagcgatatccatccacggcgttgccctggctgctcgcgctccgccagctcccatgtcggacacggagctgtcccagagcacggtggtgtttgggctccgcatgtgggtgctcgtcggcatcggcgtcggtgccgccttcgtgctactgctcgtcctcatctccgtcctctgcctcctcgccttccgccgtcgccgtcgccggcggcagcggccggccaaccccgcgcagcagctccccaccaccgccccgcccaagaatcccacgaatgccaaggcagagaaggaattcaaggttgaggtcgaagcgatcgggcgtgtgcgacacaagaaccttgtgcgccttctaggatactgtgctgagggtaatcagaggatgcttgtatatgagtatgttgataatgggaacttagaacaatggctgcacggggatgttgggcccagaagccctctcgcctgggatgacaggatgaagatcatactgggaacagcaaaagggttaatgtatttgcacgaggggcttgaaccaaaggtggttcaccgtgatgtcaagtcaagcaacatccttctggacaagcaatggaatgctaagctctcggatttcggacttgcgaagcttcttggttcagaaaggagttatgtcaccacaagagttatgggaactttcgggtatgttgctccagagtacgcagggactgggatgttgaatgaaacaagcgacatatatagttttgggattcttataatggagataatatccggtagggtaccagtggattataataggccaccaggagaggttaatttagttgattggcttaagacgatggtaagcacccgaaactcggatggggttgtggatccaaagatacccaagaaaccttcctcaagagcactgaagaaggctttgctagtggcgctgagatgcgtagaccctgatgctcttaagagaccaaagattagtcatgtcattcacatgcttgaagtcgatgatttcccatacagagatgatcgccgaggcactagagcaccaggacaagcaaggttaccagaaacaccggcaggcggatcaggtcgacctgagactgacagcagtggaaacggcggttccacacaagctgaacccttcagatggagaaacccagaggcttagtgttcatcggactactgaaaggaaagccaagccctcttgatttgtgaagcaacaagccaacaatggtgtccactgaagtcgtgaaactctcatcttgctgatgataggcaaaggcatccatggatactgttagatcatctgtaaatgtaaaaaaaaagtaatttagccctagtaattctttcctgcttatatttatataggtggaggtatctatctatgacaaacccgttccattaaaggcaaaaataactttatttaaatctctggggtgcctctggttaacaaatggtctgcatctgctcagcatagctgaacttgtcatttatgtaaattttttaacaccgactcggcaacttcggtgtgaatatgttttgtttt

SEQ ID NO: 22140 - DNA, 5362 bp, Zea Mays
  misc_feature (3843)..(3850): n is a, c, g, or t
ctctagtagcaaaagggagaggcgaaccagctcagagccggcgaccgccaccccacaccgcatctcccgactcccgctgctgtagtgctgtgcactagccaagccagcttgcatattccttctcccccacgctttcccgtgcttccattccaccaccagggccgcggaacgccccgccccgcccggcccccgcgcctcccctttccacctgttcgtcgcgtgcgcattcgttcgcgcagccagcgagccagccaccaccggcccccaccatcgatcgatatcctcctcctgtctctcttgctgctagctctcgcagttccgtccgatcgactatactgatccagctcctgctatgcgcggcggctagctcctcgacgacgagctgatcaatccgacaatccgagtccgccggcgcggatcgtcgatcgatcggccaccagaccatggggactccggtgaacatcatcgtcggctcgcacgtgtggctggaggaccccggcgaggcgtgggtcgacggcgtcgtcaccgagatcaaaggcggcgacgccaccatcgccaccaccaacggcaaaacggtcgtggcgagccttggcagcgtataccccaaggacacggaggcgccgccggcaggagtggacgacatgaccaagctagcctacctccacgagccgggcgtcctgcacaacctctcctgccggtacggcctcaacgagatatacacgtacaccgggaacatcttgatcgcggtgaaccccttccagaggctgccgcatctgtacgacgtgcacatgatggagcagtacaagggcgccagcttcggggagctcagccctcatctcttcgccatcgcggacgcctgctacagggcgctcatcaatgaccaggcgagccaagcgatcctggtgagcggcgagagtggcgctggcaagacggagaccaccaagatgctcatgaggtacctcgcattcatgggaggacggtccggcaccgagggacgcaccgttgagcagcaggttctagagtctaacccggtacttgaagcatttggtaacgccaagacagtgaagaacaacaactcaagtcgattcggcaagttcgtggagatccagttcgacaagcatggcaagatatccggggctgccgttcgcacgtatctcctcgagcgatcgcgagtgtgtcaggtctccgatcctgagaggaactaccactgcttctacatgctctgctccgcgccccccgaggacgtgaagaggttcaaggtgggagacccaaggtcgttccattacctgaaccagacgaactgctatgaggtggccaacgtggacgacgcgagagagtacatagaaactagaaacgctatggatatcgttggcatcgatcaagaggaacaggacgcgatcttcagagtagtagcggcgatcctccacctaggaaacatcaacttttccaaagggcaggagatcgactcgtccaagctgagagacgataaatcggtccatcaccttaaaacagttgcggaactgctaatgtgtgacgagaaggccctcgaagactccctctgccagcgtgttattgttacgcctgatgggaacatcacgaagccccttgatccaggctctgcggcgttaagccgtgatgccttggcaaagacagtgtattcacgactgtttgactggatcgtagacaagatcaataactcgattggccaggatccagatgcgaccaatataataggcgtgcttgatatctatggatttgagagcttcaagatcaacagtttcgagcaattatgcatcaatttgacaaacgagaagctgcagcagcacttcaatcagcatgtgtttaagatggagcaagaagaatacacaagggaggaaatagactggagctatgttgaatttgtagacaatcaggatgtgctggacctgattgaaaagaaacctggaggaataattgcactcctggatgaggcatgcatgtttccaaagtctacacatgagacatttgctcaaaagatgtaccaaacgtataaggtccataagcgcttcagcaagcccaagctagctcggacagcctttacgatcaaccattatgcaggggatgtgacgtatcaagcggatcagttccttgataagaacaaagactatgtggtagccgaacaccaggccctactaaattcttcaaggtgcccttttgttgcaaacctcttccctccattacctgaggaaacctctaaacagtccaaattctcttcaattggtactcgctttaagcaacaactgcaatccctcatggaaacactgaatactacagaacctcactacatcagatgtgtcaagcctaatgctgtactcaaacccggcattttcgagaactacaacgtcttgaatcagttgagatgtgggggtgtcctggaagcaattcggatcagctgtgctggttatccaacgaagaggacatttgatgagttcattgatcggtttggaatgcttgcaccggagcttgtcgacagcgatgagaaggccgcctgtgcagcgatatgtgatagaatgggtttgaaaggatatcagatagggaaaactaaggtattcctaagagctggtcagatggcagagctggatgctcgaagagcagaaattttggctaatgctgcgcgactaatccaaaggcgtattaagacacatcttatgcgaaaggaattcatcaaattaagaaaagcctcagttcaatctcagaagttctggagagcacgactagctaaaaagatttttgagtatatgaggagagacgctgcttcaattaggatacaaaagcacgtgcgtgcgcattctgccagaaaagcgtacctgcaagtatatgaatcagctacagcaatacaaacaggattacgagcaatggcagctcgcaacgaacacagattccgaagagagaccagggcatccataattatccagactcggtggcgccaacacagagcttatactgcttacaaacagcaacagaaagcttctttgattctccaatgcttgtggagggcacgcattgcaagaaaggaacttcggaaactgagaatggaagcaagagagaccggcgcactgaaagaagcaaaagacaagctagaaaagagagtagaagaactcacatggcggttagacgtcgagaagcgtttgagggctgaccttgaagaagcaaagagccatgaaattgaaaagttgcaatctgcactacaaaaaatgcaagaaaatctcgaggaagcccatgcagcaatagtaaatgagaaagaggctgcaaagttagcgattgaacaggcaccaccaaagatagtagaagtgccggttattgacaatgcgaaacttgaggagttgacaactcaaaataaagaacttgaggatgaactaagtacgtttaaacagaaggctgaggatcttgaaaataagcttattgagttccaaaaacagtctgatgaactgtcacaagagacacaagaacaagcatccaaagttactgaacttcaagagctggtcgaaaggcttgaagcaagtttatccaatatggaatctgaatacccttttctacgacacatactcatgtcctatgagaaagtctcataaactaaaaataataatacatttagcttggaaagcaagatcgccaccttggagtcagagatagagttgctccacagcaattctgcactagctattcaggccgtggttactcctgaaatgaatcagacaacagtaatcgaggaatttgacaagggacaccagcttgaagaagtaaaacggtcaatgtatttgctattatttttacctggcaaacatttatacagtttaagataannnnnnnngcttccacaggaaaaccacgacgccctgattaaaagtatggtagaagacaggagatttgacgacaaaaaatccgctgcagcatgcattgtctacaaatcactcctacactggcattcatttgaagcggagaagactaacatatttgatcgaatcatccaaataattaggtcatcagttgagggagcagaaagttctggagagctagcctattggttgtcgacaacatcaactctcctctacttgttacaaaacactctcaaagctagcagttcattaagtaaaggaacaaatcgcagccggaccacaacaggcagtctgttcagtagaatggtgcagagtgcccggacatcatcaggcttaggcatagctagtggatacagtggaatggtgggaaggcctgacactgatgcatcgatggtagaggcaaaatatccagcacttcggttcaagcaacacttgacagcatatgtcgagaagatatacgggataatcagagataacctgaagaaggaaataagtccgttcttgacaatgtgcatacaggctccaagagctaaccgtgtgaggccatcacggggatcactaaaaagcatacactctaatgcactagctaggcaagcatcaagtctgcattggcaaaacattgtcaagtgcctggatcatacactggaaacgatgaaaaaaaactatgtagctccggtgataatcaggaaaacatttaaccaagtatttgcatacttgaatgtgcaactcttcaacagcttactgcttcgtcgggaatgctgctcttttagcaatggggagttcttaaaggctggtttacaagacctggagcagtggtgctctaggacaactgaagagtatgtagggacgtcctgggatgaactgcaacacattaggcaggcagtcgggttcctggttttgcatcagaaatcacacaaaatcctggaggaaattacgaatgagatttgccctgttttgagcataactcaaatataccgcatagcaacgatgttctgggacgacaagtacggtgcacaaggcgtatctcaagaggtcattggaaggatgagaacgatgacaacggacgactcagtaactactccaaacagttcgttcttgctggacgacgactcaagcataccgatatcgttggatgacatagctcggctgatgcttcacatcgatccgtccgatgtggaaccgcccccgctactgaggcagaattctcagtttcactttcttctgcagcagcacacggactgatatcttctacagataaagagcagaatgaatggtacagttacttgtggagttacagggaactgaagatttttttttaggagtgcacagattgagttgtgattttttttcccttccttttttttatggttttgggtgggaaatggctacaaagaaagggaaatatagggtatatcgtgatatcattcatttgattggtttgattgtttggaacagagagatttgtaattatttgaatatgtatataa

SEQ ID NO: 22141 - DNA, 2276 bp, Zea Mays
agagcgcacggcccagttgggcccaatactcgacacgactcattgaccggcccattacggctgaagggagtcgctcgccgccgcgttcgaggcgttccctcgtcgcgctcgcgccgtcgaccttcaccgctcgctgtcaggtctgacaatgatccagcgagatactacgatggatatagcagattaagaacatgggcatacagttctcttgatcaatataagcacgaattacttcgcgtcctttatccagttttcatccatagcttcatggatctagtggcagaaggacatatgcaggaagctcggtcatttttccatacatttcgggaagatcatgaggtgatgcattcaagggatcttcagaagctggaaggcgtcctgtctccttcacacttggaggaaatggaattggcccggtcttttaggaaaaataaatttaaaattaaattatgtgagtattcgtatgaattgcttctccagtatctccagaaaacacaagcccttgtggtgcttggagtaatcaatgagcacataacttttgaagtatctcctggtcagccctcattaatctctgatgacgctgatgttgttgctctgattgggacaagtaaggacttggcaaaacagataaatcagaaggaagtacattgggggttgcttgaagattctgttgaagagcgaatggagaaggcactagcagaatctgataaaatagaagctgaaagcaaggatgctgatgcagaagataacaagaaaagaaatgcagaaggtggaaagcaaggtgcttctcttaagaaagccaaaaaggacaagcttgttggtgcgactggaaaaagcgtcagaactgaaacaagcatggtttctgtggcacctcgagtgaaaccggagctaactcttccagcaacgcctgttgaagttgaacaatcaattcttgaggacctacgaaaccgtgcacaactgaatagtgtggcattgccatctgttagcttctacacattccttaatacacataatggattaaactgttcctcaatatcacatgatggatcactggttgttggtgggttttctgattcgtcagtgaaggtctgggatatgtcaaagatgggccagccagcaaaaatatcaagatcacagggtgagaatgggccttcccagggtgagcgcatatcaacattagatgaggggaaacgaacctatacactatttcaaggccattctggaccagtttattctgcggcctttagcccgtttggggatttcctcttgtcatcatcttcagactcgacaattagactatggagcaccaagctgaatgctaatcttgtctgttacaaaggacacaactacccggtttgggatgtccaattcagtccagttggccattactttgctagtgcttcgcacgacaggactgctagaatttggtcaatggataaaatccagcctttgcgaataatggctgggcatctttctgatgttgattgtgtccagtggcatgtaaactgtaactacattgccactggctctagcgacaaaactgtaaggctatgggatgttcagacgggtgaatgcatacggatgtttattggtcataggagtatggttttatcactggcaatgtcacctgatggacgatacatggcctccggagatgaagatggaacaatcatgatatgggatctctcgactggccgttgtgtttcaccactactaggacacagctcttgtgtgtggacacttgctttcagctgtgaaggagcattgcttgcatcgggatcggctgactgtactgtaaagctctgggatgtcgcttctagcacaaaaaccctgaagacagaggataccaaaggcagctcagctaaccgactgagactgcttaaagctctccctacaaaatcaactcctgtttatagcctgcggttttctcggaggaaccttctatttgcctctggtgctctctcgctaagctcgtcgtaagctgtgttttttttttgcagaaaactagaactggtcctgttttgacattgagtagtgaagctggcatttcagagactgcctattgtacagctaatattttcattagcaattccaacgaactcagcatgtactgccgaattgagcaccgcagattcgttgtagcgggttgtgatattgtaacaatattattaggttgtgaccttatgaacgcaactaaatgtacaagtgctgacaggcgatagcgtgaatgcaatggtctatcaggtctggagtttggtttagtgaccaggtaattc

SEQ ID NO: 22142 - DNA, 3533 bp, Zea Mays
cccagcactccggccgcggaagccgcgctggggaggcggttggtgtggtgccccgccggcttagattgatgaatcacagcgcggctcggtcgcgtggactcgacctcgtcgcctttagtacaagttgcgtcctgcgggacatagctctcgtcctccgtttcctagccttgccagtttccacgacagagagagagagagcgagaggaggaaagaagagtcatcgcagacagaagagggtgctccagcgtgcatctcgtcgcccgccgtcggcgtgattgcttggcagcaggatggaggaggccacgcggcgccgtatcacgccgacgacgacgctgctgctggccctggcggtgctggcggcgagcgttcccgccggcttctgcgccatcaaccctcaggacgcttctgctctcaacgccatccagagccaatggacgaacgcccccttgagctggtcctcggcgagcgacccctgcgacgggggctgggacggaatcatgtgcagcaacggcagggtcacgtcgctgcggctgtcaagtgtcaacatccagggcacgctcagcgacagcgtcggacagctcacccagctcatgtacctggacgtttccttcaacctcggtctcaacggccgaatgcccgctacaatcgggaacctggcgcagctcaccacgctgatcctggcaggctgtagcttcaccggagccatcccacagcaactcggcaacctgcagcagctctcgttcctggcgttgaattcgaacaagtttaccggcacaataccccctacgctgggtctactctcgaacctcttctggctggatctggctgacaatcagctcactggatctatcccggtctccacagcaacaacgccggggctcgaccaacttacccacacgaagcacttccacttcaacaagaaccagctgtctggaacactcacaggcctcttcaactccaacatgagcctgatccacatactgttcgacagcaatcaactgactggcccgataccagaggagctagggggcatttcatcgctccaagttctccgactagataggaacagccttaagggaacgattcctcctaacatcagcaacttggtcaatctgaacgagctgaacttggccagcaaccagctcactggaccgttgccagatctaagcagcatgaccaaattgaatgtcgtggatttaagcaacaactccttcgccgtttcagcagccccaaactggttcacaactttaacatctctaacctccgtatcaatatcttctggaaagctttctggcgctgtccctaagggtctcttcaggttgccccagctgcagcaatgtgctgagcaacaacgagttcaacgggacacttgaggtcacaggcaacatcagcagtcagcttcaggctatcaatctcatgaataacggcattgctgctgccaatgtcaccccaagctacaacaagactctagtgctactagggaacccgggctgcgtggacccagagttgaaagtcttctgcagcctcaagcaggagagaatgatagcgtacaacaccagcctggccaagtgctcctctacggcctcgtgttccagtgaccagcgcctgaaccctgcaaactgcggctgcgcatacccctacgccgggaagatggtattcagagcgccgctcttcacggacctgacgaacagcgccacctttcagcagctggaggcgagcttcacgacgcagttgtctctccgcgatggctccgtgttcctctccgacatccacttcaatagcgacaactacctccagattcaggtggcgcttttcccgtcgtctggggtgtccttcagcgtggcggatctgatacggataggcttcgatctgagcaaccagacttacaaaccaccgtcgaattttggaccctattacttcattgcagatccatacgctcttttggcaggtgcttcttctcgtggcagtaaaaaatcacatatcagcactggcgctatcgctggaattgcggtagccggtggaattcttgtgattgccctcattggcatggtattatttgcgttgcgacagaaaagaagggtcaaggaagtgacaggacgaaccgaccctttcgtttcatggggagtttcccagaaagacagtggaggggctccacagcttaaaggagcaaggttgttctctctgaatgagctgaagaactgcaccaacaatttttcggacacccatgagataggctcaggaggctatggaaaggtgtacaagggaacactcgttgatggaacgcgggttgccataaagagagcagagcgcggatcaatgcaaggtgtggtggagttcaagaacgagatcgagctgctgtccagggttcatcacaggaacctggtgagcctgattggcttctgctacgaacaaggggagcagatgctggtgtacgagtacgtctccagcggaacgctgagagagaacttactagtgagaggaacgtacctggactggaagaagaggctcaggatcgcgctcgggtcagcgaggggacttgcgtaccttcacgagctcgccgatccgcctatcatccaccgggacgtcaagtccaccaatatcctcctcgacgaccacctcaaagccaaggtcgccgacttcggcctctccaagctcgtcgcggacacccagaagggccacgtctccacgcaagtgaaaggaacgctgggttacttggatccggagtactacatgacgcagcagctgtcggagaagagcgacgtgtacagcttcggggtggtgatgctggagctggtgagcgggcggcagccgatcgagagcggcaagtacatcgtgcgcgaggtcaagctggccatcgaccccaacgaccgcgaccactacgggctgcggggcctcctggacccggcgatccgggacaacgcgcgcaccgccgggttcaggcggttcgtgcagctggcgatgctgtgcgtggacgagtcggcggcggcgcggccggccatgggcgaggtggtgaaggacatcgaggccatgctgcagaacgaggtctccgggcccgacggggccaccagctccgccggctcctccgccaacgacttcgacggcgccggcggcggagcgaggtcgcacccgtacagcgacgtcgagatcacgagaggctcgtacggggacaacgcgtcggactacatgccgtacttcgaggtcaagcctaagtagaccttccagtttcagacttgtatagcttgtgagatacattgtatagatttgtattatatttcacgtttatattttttggtttctcgagcttaatttttaccatgctacttccgatctatcatgacgcaaactgtacattcctcgaaattttccaagataagttgttctgttcttatttagaagtcagattttctctcaccgtttcaaacttatggactagtttggaaactccattttccttatatgaccagtgatttcccagttcaaattgctatattttgggttcatgaatgattggcaaaggcagtggccgattcaca

SEQ ID NO: 22143 - DNA, 2544 bp, Zea Mays
ctcgtatcctcccgtcgccgcctcgccttcccctgcgctaccaccgccgctatctgaaccccagcgcctatccggtgagccggaggggaccgccgaggatgttttactcgcacacgatcctcgcgcggaagagcccgctgggcaccgtgtggatcgccgcccacctcgagcgcaagatcaagaagccgcagatcgatggcatcgacatccccacctacgcagggcatcttcttctaggtctagttcgcatttattcatggaaggtgcaatatctgtttcaagattgtaatcgaatgctaactacaatgagaacttcattcgcttctgtccaagtcgatcttccaattgatgcagactgtgctccatttgagtccattacactaccatcaacactaaatcttgacgccttgaacttggatgacgcaatttctctgatggatacgccagataatcatcagaagactcttgatcagattaccttgcctgaaggagaatatgtgatgatagaacttgatgaggatgccagagtagagcaatcaggtcctgctccatcattacacatgggacctacagcaatcgaggatgagacgtcccctccatttcatgatggttttggagctaataacgatcctaatgaagaagctcccatagatcgtcccataggcaattcaccagtgaattccaacatagcaaatctgacagatggagcactagatccacctgaaaaaatgcgtgaagctccacatgagtttcctcacctgaaattaacagagtccatccttggaaatgatgaccccatggatttggaccatgattcttcaccttttgtgcaaaacaaggctatcacccctccagttattgatgaaacaacttctgctggtcgacaagtacctgggagatccatttccaatttacgtgcaccaaacacctttgatgcttttgcagatgatgcacccctaaattttgacattcagttacctgaatttcggcttgagccatctccacgtccagtacaagagaacaaggataatagaagaccaaaagcacaagttagcaatagaaataggaagagagggatgaaatttgattacaaaattgtgctctccaatgactgtatgagaaagcaaattgatggtgctgaactagatgagttgatctgcaagaggagaaaattaccccagacagcccttgatgtgtggagattcagcagaactaacagacagggcagcttcttgcttgaacctctgctgcatgggacgtgcagtgatcttcaagaaacctatgagagaaacttcccttgtgtcagtggccttgatgctgagtgtagcaatgtggctggtgtagcaaatgatgatccggatgcatcacttgaacggcagctaagcccaaatgttcctagaactgcggagctgtcttaccatgagctcaccccaacgtctccaggaaatgcagaggcacagcctgaaccacctctgccaaccctaaagtcaccaggagctgcaggtgcagtgccagacgatgatatgttgcctgagttgccccggttctcaccaatagatgtgccatcttcaataagaggaaatgatactccttacaaaactcctggcggaactccatcttggctcggaggatctgctgtttctgaaataccatcatctgatgggaactattcattacctggacaaagtactcgtgactctgataacatgtcattcctttttccaatcaatgaagatgatgaacacccagagatccctggtctcatgagtacacctggaggggtatctagtgtagctactggaactaccggattaggaagcatgtcggctaggacaagggctgttgcacttttctttaaggatcatgcgtcttcaccctcagatgatcagcctggaaaattcagtttgaacaaaattttggaagggaaaacaaggaaacaggctgcaaggatgttctttgagacaacggttctgaagagttataattacattgatgtgcaacaagaggatccatatggagccattgaaattttagttaaacccttgctgtcagctgccaaactgacataagttacttggaatcatctgcaggacctcttgtccatctgcaaaaagatagaatccccaaaggctacctgaatattgtttccgggtgatcctggagaaggggtcaaatgggcgtaaacttctgttaaatgtcggctagggactaagttagcttagtgaatatcagtgcgaatactagtgtgacatcttatacatgtttatgtctattacttttccttttcgtccattaagaaggttttcatgatattctgtaatatgacctgtttggtcgctgcctagcttgccacattttacctaacttttctgcttaatgttagttctttaattcgaacgactaaccttagccaaagtgtggcacagttagccacgaaccaaatagacccataatccttctgtttggttggcgtgggcagccatgcgacaaattaaagcgtatgctgtttggttcactttggtcatgtttggttcaacttttttc

SEQ ID NO: 22144 - DNA, 3279 bp, Zea Mays
ccggctccaaatcctcctcgtgcttgccgatgtccgggcgttagaggaaagcggcaccggtgctccggccatatggcctctcgccccctcctcctccgcccatgaccgaccccacccggcccggccctattcttctactactccctactccacggctacgcccacgcacatgcctcccacaccctcatcacttgcattgagcaccacgtcgtcgagctatctgagcacaagtgctactaagctagtagccaccacctgctataggagtataggctataggcctatagctaccagagccgccagctgccagagctgtagctcagctagctagtaggagagtagggggtcgtcgtctgggtgttgctggccgctcgatcgagtactcagttgttggctgctgtgccattgcgacggcggccggcgggccggggagcgagcgcgagtcggaggcagatggtgacggccaaggaggccgcggcggcggcggcggccatggacgccagcaagtacgtgcggtacacgccggagcaggtggaggcgctggagcggctctactacgagtgccccaagccgagctcgctgcgccgccagcagctggtccgcgactgccccgtcctcgccagcgtcgaccccaagcagatcaaggtgccgggagaagcagcggaaggagtcgtcccggctgcaggcggtaaaccggaagctgacggccatgaacaagctgctcatggaggagaacgaccgcctgcagaagcaggtctcgcagctcgtctacgagaacggctactaccgccagcagacgcagagcgcggggctggcgaccacggacacgagctgcgagtcggtcgtcaccagcggcccccagaacgtggccgcggtgctgccacaagcccagccgcgcgacgcgggccctgccgggctcatgtccatagcggaggagacactgacggagtttctgtccaaggccaccggcaccgccgtcgagtgggtccagatgcccgggatgaagcctggtccggattctattggaatcattgccatctcgcatggctgccccggtgtcgccgcgcgagcttgcggcctcgtgggcatggagcctgcgaaagtcgctgaggtcctcaaggaccgcccgctgtggctgcgagactgccgatccatggaagtggtgaacgttctccctgccggtaccagtggcacagtcgagcttctctacatgcagctctacgcccccacgacgctcgcgccagctcgcgacttctggctgctgcggtacacctccattctcgacgacggaagcttagtggtatgcgagagatcactcggcgccaaccagggcggcccaagcatgcctctcgtccagccttttgtcaggggcgagatgcttcccagtgggttcttggtccggcctagcgacggcggaggcagcgtcatacacatcgttgatcacatggacctggagccttggagcgtgcccgaagtcgttcgcccactgtacgagtcgtctgcgatggttgctcagaagatgtcaatggcggccttgcgctatctcaggcaggttgctcacgaagataccgcccattctgtggtaaccggcgggtggggacggcagcctgcttctctacgggctctgagccagaagctcaccagagggttcaatgaagctctcaatgggctcgctgacgacgggtggtctgtggtcggaagtgacggggtggacgatgtctgcgtctctgtcagttcatccccgagtagagtggtcagctgcaatgcaactttcagtaacggacctgtagtcggcactggcagcagcagtgtgctctgcgcaaaggcatcgatgctgctgcaggacgtttctccgccagagctcctgcgcttcatgcgggagcagcggtcgcagtgggccgacagcaatctagacgcgttcttcgcttctgcgatgaaaccggatttctgcagcttgcctattcctcctcgccttggagggtttggtggccaggtcatacttcctctagcccacacgtttgaccctgaagaattcctcgaggttataaaagtaggaaatgccggtaactaccaagacgcgctcctgcaccgtgatctgtttctgttgcagatgtacaacggggtagacgagaacatggcaggcacttgttcagagctcatctttgcccctatagacgcatcgttcagcgacgactcgccactgctcccatccggctttcgtatcatcccgatcgacgctcctcttgacacgtccagccccaagtgcacgctggaccttgcctccaccctcgaagccggaactcccagaagcaggacaagcgggagcggcggccctggaactgccgccgccgcttgtgccggctccaaggccgtgatgacgatcgtgttccagtttgccttcgagagccatctgcaggacagcgtcgcagccatggcgaggcagtacgtgcggagcatcgtcgcgtcggtccagaggatcgcgctggcgctctcctccgcgcgcctggtcgtccctcatggcagcggtgtcagccacggtgctcctgctgctggtccggaggcagccacgcttgcaagatggatctgccagagttacaggttccatttcggggctgagcttatcaaatccgcagacggtagcggctgtggtgaagcagtgctgaaaactctctggcaccatgccggcgctatactctgctgctctctcaaggccttgccagtgttcacgttcgcgaaccagtccgggctcgacatgctggagacgacgctggtggcgctgcaggacatcgcgctggagagagtgttcgacgaccaagggaggaagaacctgtgcgcggagctccccggcgtcatggagcaggggttcgcgtgcgtccccggcgggatgtgcgtgtcgggcctaggccggccggtgtcgtacgagaaggcgctggcgtggaaggtgctcgacgacggcagcggcggcgtgcactgcgtctgcttcatgttcgtcaactggtcgtttgtgtgacgcgtctgctaccaggtccgtcgcgctcaggggaaaatcagttgatcggtgacgtgcttgagggtacgtacgtctcaaatcgccctttggttattgggatgtaaaatggtttcggttttttttttgttttttttttgaagaaaaatgtgaaatggtagaaggaaggacctgaatagcagtattgtacacggatggatcgtgtgatgtcaaacaagaatgactttttgtttgatggtgaagctagcatggcccctcctttatggttttga

SEQ ID NO: 22145 - DNA, 2157 bp, Zea Mays
gcaacgatggcatgagcacgagtgcacgaccgaagccgaagaaaccaagccattgctgcgacgccgtgcccccgagtttgatttgatggaagcgaagacgaaccaaaccagcggcgaggacaggccgcagccggcgatggactcgccgagggcggcgcaggcggcgacgcgccgcaagaagatgacgaagcagctgacggggaagcgcgacgacacggcgatgcacgcggcggcgcgcgccgggcagctcgagtccatgcggcagatgatgtccggcaaggacgccgaggagctcggggcgctgctgtccaggcagaaccaggccggggagacgccgctgttcgtggccgccgagtacgggtacgtggccctggtggccgagatgatcaagtaccacgacgtcgccaccgccggcatcaaggcccgcagcggctacgacgcgctccacatcgccgccaagcaaggggatgtagacgtcgtgagggagctgctgcgggcgctgccgcagctgtcgatgacggtggactcctccaacacgacggcgctgaacacggcggcgacgcaggggcacatggacgtggtgaggctcctgctggaggtggacgggagcctggcgctgatcgcgcgcagcaacggcaagacggcgctgcactcggcggcgcggaacggccacgtggaggtggtgcgcgcgctgctggaggcggagcccagcatcgcgctgcgcacggacaagaagggccagaccgcgctgcacatggccgccaagggcaccaggctggacctcgtcgacgcgctcctggccgccgagccggcgctgctcaaccagacggacagcaagggcaacaccgcgctgcacatcgcggcgcgcaaggcgcggcacgagatcatcaggcggctggtcacgatgcccgacacggacgtcagggcgatcaaccggtcccgcgagaccccgctggacacggcggagaagatgggcaacacggacgcggcggaactcctggctgagcacggcgtgcagtcggcgcgcgccattagcccctgcggcggcggcggcggcggcaacaagcaggcgcgcgagctgaagcagcaggtgagcgacatcaagcacgaggtgcactcgcagctggagcagacgcggcagacgcgcgtgcgcatgcagggcatcgccaagcgcatcaacaagctgcacgaggaagggctcaacaacgccatcaactccacgacggtggtggccgtgctgatcgccacggtggcgttcgccgccatcttcacggtgcccggggagtacgtgcaggacccgggcagcctggcgcccgggcacgatctgggcgaggccaacatctcccaccagacggccttcatcatcttcttcgtcttcgactcggtgtcgctcttcatctcgctggccgtggtggtggtgcagacgtcggtcgtggtcatcgagcgcaaggccaagaagcagatgatggcggtgatcaacaagctcatgtgggtggcctgcgtgctcatcagcgtatccttcctggcgctctcgttcgtcgttgtgggccgcaccgagcgctggctggccgtgtccgtcaccatcatgggcgccaccatcctggtcaccaccatcggcaccatgctctactgggtgatcgcgcaccgcatcgaggccaagcggattcgcacaatcaagcgcaacacgctcacccactcccgctccttctcctgctccggcatgtcggagggcgagtgggtcgacgaggatttcaagaggatgtacgcaatctgacgacccacgctacctgcatgtgtttgagatcatctcgtgcaatggccatcgcgttattgtcaacttgccgtgcttcggaccgggctaacattcttcttccgtcactccttagtggcgattgaagtattgtccaaccgaataaacctacctgtgcgccgcctgcgagagagaagtaataagttttgtcttcatagaaaacgaaacaaaagaaaagtgagttttgtcttaatagaaaatgaaaagctagacttactaaaaactcctgcactccgtattacttttagcttgtcgatcaagccgtgcttccgcaacgtctagagtcttaaaaactatttaaaaaatacaagtactcaatcttttcataaatatatgacaccatttaa

SEQ ID NO: 22146 - DNA, 6143 bp, Zea Mays
cttaaggttagtatgctactaggaaaaacctagacacgaagtccaacccaaatctcaatatcccaaccctccgatccccatttccatccactccgacaccaatcctccgctccgaccaccgccggagaaatggggcggcgccgccggttcgcgcagctggacgatgacgacgacgacgacgaagacgtgcccatcaatttcaagccctcgggtggcgcctcctcctcggacgccaaacccaggaagccccagccgccgccgcagcagcgccgcgagcaggaggccgagacgaagactcgccgccgccggggacggcccaagcgccgccgcgacccggggagcgaggatgaggagcccgaggagctagagctgcaaacggaggatccccgtgaggaggagatcacggaggcggtgcccgtagctgtaggggacccggtcaagatcactggcaaggggaagaagcagaagaagcactatgcttccttcgagtacgagggcaacagcttcgagctggaggaccccgtgcttctcacgcctgaggacagcaatcagaagccctatgtcgccatcctcaaggatataacagaaactgatgggagcctatatgtaactggccaatggttttatagaccagaagaggctgacaaaaaggagggtggattctgggtagcacgagatacacgagagctattttacagttttcatactgatgatgtgcctgcagaatcagttatgcacaaatgtgtggtccatttcattcctcagcaaaaacagattcccagtcgaaagcagcatccgggatttattgtccagaaggtctatgatgcagttgagaagaaactgtggaacctaacagacaaggactatgaggataacaagcagcaagagattgatcttctggttaagaaaacaatagaccgtattgggcagcttcctgatctcgaacctgaagagacacctcttgagaacaattatttgtcaaataaacgaggcctgcgtaagaaacctgttaaccctatagatgtaacaagagaacctccagttggcaaatccgagcagtttgcaaaagcagagacacctggaagtgataagatacggaattatgatacccttgttaagtataaagtacttactggacattctcatcgtgataggtggctcgataaattgatagaaagtattccgcttgcatcaaaggagaatgctggaacatctgctgatgctaattctacagccaaaagttcaatcagtggttcacctgcaaaggatgttggttctgctgaaaatgaaaaatcatatggacttgatgttgttgttgagataatgactgcattagaaagatctgcatatgaagctcttggaacagattttgggaaatataaccagaaactgcgacaactacagttcaacatcaagaatatctctaaacttcgcaggaggctgatggacaaggagcttgatcctccagttcttttaaccatgtcccccgatgaattaaaggagaactgcgtatcattatattaagaagcaagaagggtctaagatagtccgaatacaaggtgccacaattggcggccctctataacctggccaccaaaagtgccaccaaaaggcaactccctagctacaaaccacctacaaagacacccacaaactcctaagagcagaagctcctgcaataccccttaaggtcaccaagatgacagtggagttaaaaccttttctgtgaattttctgcatatctccaccaatcttggaacaccttatcattaactgtagacgccagatgctgcaaacccactttactcagaatccggaatcaaatttccctagcaaatacacaagatacaagaatgtgctgaactgtttcctgttcctggtcgcatagcagacatctctgggtgatccatgcctcgttgtgcaagactgtgcaagacgatcagcagtccaacatctattgagggaggccaaccaaataaaacatttacaccgaggtggaacccagctcttccagatcctattggctggctcaaaggatactgcaccagcaaggaaatgctcatatgcagatttcgcagagtactctcctgaagatgttggcagccatcggtgttgatcaggaaccgcaggctggagatgaacttcctgtaatatatcccagaccatgaagaattccagaataacctgtattggtagactaccagagatgtcttgaacccatctatgctcctccaaagcctgctggactgttttttttcttaattcttatagagatacgggtagacaaagctggagcaatctgagtcagggacatcccattaagccaattatccgaccagaacatagtggaggtgccaaagcctgctggactgtttttttttcttaattcttatagagatacgggtagacaaagctggagcaatctgagtcagggacatcccattaagccaattatccgaccagaacatagtggaggtgccgttaccaactacagaacacattgatgctgcaaataaggctgcagccatagggtgtgtcctaacctcaaattcagcccaaggcctattcggttgagtcttcttaagccaaagccatctaatatttagagcccaacccataatttccaagtcatgaatacccagacctccttgagcaagtggtctgcatacccttgtccatccaacagaacaatgcccacctttgatactgtcctgcctttccacagaaaacccctcctgattttatcaatagccttgacaacccatttagggcattgtagagctataaggtgatagacgggaatggcagaaagcacggatttaactaacacagctctacctgccgggtgcagtagagccgccttccaccttggcaacttatctgcaactttgttaatgaggtccaaaaaaacactccttggaagtttcctaacagaaagaggaagacccaaatatttgcaggaaaaagtcaataccctgcaggggagaaaaaaaactgtgcagcaataatatcctgctcctcacactgaattggtgttaggctgcatttattcaagcttgtgatcagacctgaagccataccaaagatccatataatttctttgatcacagcaaactcttcttcctttggcttcaaaaacaggactacatcatctgcatatagcgatacccgttgaccagagcctcttcttaacaaaggctgcagcaggcccaaattactagccttttggattagataattcagcacatccataacaaggataaagagcattagggagagaggatccccctgtctcaacccacgctcgtggcaaattagatccctaggttctccattcaccaacactctagtcgaggaggagtgcagcaatttagcaatcatattgcaccacaatgggccaaaaccaagatgccggagaacttcaaacaggaatggccaagagactgagtcaaaagccttaccaatgtccaatttaagtagggcaaccggatccttctgcttgtggacggctctggcagtttgctggaccataagataattgtcatgtatgctcctccctttcacaaatgcactttggtttgaggaaaccagacccggaagcttgagcgcatgcctaccggccataattttattgacaatcttagcaagggaacacatccggtgcacatatggtgcacatgaactaacaaagttcacaaaaaattctgaaaaaaatcatacatatattttttttccattttactccaattatatacaaaatttcaagttcaaattcattatactttagctgtaataaaaatataaattttctgacaagtttaaattagaaaatcagctaaaatgttatcttttttattacagataaaatataacgaacttgaacttgaaattttgtatataataggagtaggatggaaataatatgtatggttttttagaatattttgtgaactttgttagtttatgtgcactggatatgttcactcttagcaaagctatgaattaggctaatcggccgaaaatctataacctctatggcctcctgtttttaggcagcaaaatcacataagcagagtcaaggagctgcagtttagaaacatccccatggaagatcatccctaaggcagccataaaattgttcttaataaccggccaagcatagtgctggacctcggatcgactggctaagcgagggttaccccatcaagcagcatccctttttgtgatcagtcagaggaaaccatacatcacatccttttctcctgtgtgctgcccagagaagtttgggatgggattttgaggaaacttaatcttgatatggttccacgccccaattcctctatcccgttttggacctggtggtgtaaggccactgttgctatccacagattttaaaaaagaatttcttggtcattttagtctcttgggagctttggaagcacagaaatgcgtgcatgttcgatggagttcaacctcagccacaagcgatttttgctcaatcggctgttgaatcccacatgtggtgcttggctggggcttctaaccttaagaagctcctcctaagggaggctccttaggctgggggtggtcgtttaggtcgtttgcagctgctgtgtaaagtgttcgagtgctcctctccttttattttttttctgccttaatgaaatgacacacagttctcctgcgtagttctaaaaaaaataaccggccaagcacatttataaaaacgaccagtaaaccatttggacctggggctttataagaaggtaggagattaatagtactccacacctcctcagagatcaaaagatcaagacgcaagaggtcgatagatggtcgatggaaggcctctaagtttagagacaattccctgtgtgtagcagttcccaacagattattaaagaaatcccaaatcacagttttcttatcttcctgttcaaccaagattctgtccccaactttctattttctgatgaagtttttcttctttctatatcttgcgtgatggtgaaaataggaagtattagcatctccttccttcatccaattaagctcacttctgagcctagccatggttctcttcatagaggacaacccccataaatgctgtttaagacggcagcgcagccactcttcattaaaggataagacccttgagtccctggccatctccagacgatgaataatctccttggccaaaaacagttgtcgtttgaccagcccaattcttttctcactccatgactgtagctgcctcacaaaacttttcagtttatccacaaagcgctgcagtgaacaaaccgcatctaccggctggctgatcccaagaagagcacacctcatccatgaaaccatccaatctaactcaaaaactttcaaaatgaaacgtctcttgtcttgtgtgagttcattcattctaacagaagaggacaatgatctgagatcaaggaagcagaactttctaaaaactcggccggggagggaaagaccgccctcccggtattatattaagaagagaccgaaacaatggtcccggccgagaaaatccccgaaccctggcctccatcactaacgggccggcgtcaactgtacactctacaacgacccagccggagggtggcacacaggacatcgtaggacatcgtaacccgagagtggatggggcataacgtgggaatttttttaaccaagcctgaaaattcgccccagagggggatcagactcaggacttggaggtgctacttggaagcccttaaccactaggctagaggccctttcgtgaagcagaactttctagaacagaatctggaaaaagatcccccaatcactggtatggaagacccgatccaaacgaacaagagtagaagatctctcgttggaccaggtgaactttattcccagcagaggtaactcaattaaatgcaaatcattaataagcttcctgaatctccccatcatagctctgttgagattgttattgttcttgtcctcagaacgggaatatgaggttaaaatcaccaccaatcgtccaaggaccctagcagaaagacctaaccaagcaaagctcttgcaaaaactgattttatttttctcattctggggcgataaaccccagtaaccaccacggagacccattaccatat

SEQ ID NO: 22147 - DNA, 123 bp, Zea Mays
tttcttgtagattcattagactacaatttgctttctgtatcccaattatgtcaaacgggctacaactgtctatttactgatacaggtgttactgtctttagaagaagtgatgattcaattgca

SEQ ID NO: 22148 - DNA, 330 bp, Zea Mays
tcgtgagtatattatgccatatagtttactattttgtttgagcatgtagaacctctcctataaaagaccagtatgatatttctgtatgagttcaatgttatgtcgactaaggtagactgttgtgttcgaggtcctcttttattactgttttcatagtttgtgagatgatcatgatttcatattttggtttttaaatttgtacagtcacagcaattgtccttttgcctacctgtatcattctgtcatactatctgcaattcagctatgcacagaactatcaaaagcaagcaaagatgctctagagtacctgaggaagaaactgattgtgtg

SEQ ID NO: 22149 - DNA, 2073 bp, Zea Mays
gcaagtggctgcagaatgtggtatacgtataccccttacttctagaaggttgctgtgatagctcctaatgtcccggctgtctatgaagctcacttcggtgtcccaatgtcaggagctgttgtgaactgcgtcaatattcggctaaacgccgagacaatagcattcctccttgaacactccgtggcagaagttgtgatggtggaccaagaattctgcaccctagccgaagaatcgctgaaaataattggcaagaagaagacatcggctttcaggcggcctccaatcttgatcgtcatcggcgacccaacctgtgatcccaagtctctacagcatgctctgggaaagggagccatagagtatgaagagtttctgaaaaccggtgacccggagttcagttggaagccaccgaaggacgagtggcagagcatcgccctaggctacacttctgggactacttccagcccaaagggcgtcgtgttgcatcaccgcggtgcttatctcatggcactcagcgttgccatcgtgtgggggatgcctgaaggggctgtctacttgtggactctgcccatgttccattgcaatggttggtgctacacttgggcgctggcagcgttctgcggaacaagcatatgtcttcgccaggtgagcacaaaagccatatacgaaggcatcacgaagcaaggagtgacgcacttctgtgccgcacctgtcgtccttaacaacctgatcaacgctccggcaagcgagaccttcctgccgctgccccgcgtcgtcagtgtcaacgtggccggagccgccccgacgccgtccctgctgggcgcgctgtccatccgtgggttccgcgtcacgcacacgtacggcctgtcagagacgtacggtccctcgacggtgtgcgcgtggaagcccgagtgggacgagctgccgctggaggagcggtcccgcctgcactgccgacagggcgtcaggtacatcgcgatggagggcctggacgtcgtggaccccaagacgatggcgcccgtcccggccgacggcaagtcgtacggcgagatcgtgctgcggggcaacgccgtgatgaaggggtacctcaagaaccccagggcgaacgcggaggcgttcgcgggagggtggtaccactcgggcgacctcggcgtgaagcaccccgacgggtacgtcgaggtgagggaccggatgaaggacgtgatcatctccggaggggagaacatcagcagcctggaggtggagaaggtgctgtgcgcgcacccggcggtgctcgaggtctcggtggtcgccagggccgacgagcggtggggcgagtcgccgtgcgcgttcgtgacgctcaaggacggagcagcagccgacgggtcggacgaggcggcgctggccaacgacatcatgcgcttctgccgggagaggatgccggggtactgggtgcccaagtcggtcatcttcgggccgctgcccaagacggccacggggaagatcaagaagcacgagctgagggccagagccaaagagctcggccctgtgaagaagagcaggatgtgagagatctgggggccgacggcgatagcgtgtgatgccatggcaacaactcagaatcttgctccaagtcgcgcatataaaattcatgagttctgaagatgcctaataacttgagtgctttgcttgtatcgttctgaaaccagaagttcagaccagatccgatatataagtaagaactgtatcagattgtccggtttgcaggaaacagatgcggaggtgatgacgtttcttgacaagaattaacgccaaccgtcgcacgcgcgtgaagaagtcggaatcctgatgctctctccgtcttccttggcttctccccgtgttggaacaggtcacacacaggggcacaaggcgcatcgtttgggtttcgtctcgtgaaggcgaccgatagatccttcccaattttcatgtttgcaattaagtgccttttggttcacgaaatgtaacgtaaatggtaatgataacgattcacactcgaataccagcggtaacaaatttgaataagcagatatccatttatagtgtgatatcgattac

SEQ ID NO: 22150 - DNA, 3828 bp, Zea Mays
caaaccctagtccaaggacgtgaggacagaaactgactcttgcttcagcccggccgcacagactcgatgccgcgcggtgctacggtggccctcttcgccggtccatcgaggaggcctgccgtggtgctctcggcggtctttgattccacgcaggaagagccccgggcggtgcgcgcggcgcggatttggcggcggcctcatggcatgaacgtttgcagcggcactcaaggcccctactttttctcgaatcccaactcatttcttcctcctcttctggattatcatctgggaggcaaaggggtgacttgtcgtagagcattttatgtcaaagatgccctgctttaccgacggagacagaaaattagtgaagacagagatatacaccatacaaccaccttcgatggacgcgggggatgacattgcttgacatggactgcgtggctgaggcaatcggcatacagtacttgcagcctgtactactatacatagacagttctgttttcctccaaagtgctttatccttagaccattctcttctgtcatatccactcccgctccactccatactgagcgtgcgttcttgatccatactgagctctgccgagtgctcgctccaatggctgaacttgcagccagcctggtggttgccccactgctgtccatgttgaaggagaaggtgtccagctctctcctcaaccagtacaacgtgatggagggcatggagaagcaccacaagaccctcatgcgctggctgcctgccatccaagaagttatcgctgacgccgagaggcagacgtctcgccgcggcgtggagaaatggctcgagcagctcaagacgacagcgtacgaggcgaatgaggtctttgacgacttcgagtacgaggcgctccgccgtcgagccaagaaaaatgggcacatcgccaagcttgccattatggcaagggtaaaacttttccctacccacaaccgtgttgcattccatatcaggatgagctacaggcttcgcaggattgttgacaccttcaaggaccttgtggaagaaatgaacacctttggattcaacaagcttgagcccgaggcaacaacgacatggaaggagtggcgtgagacagattctattatcgttgatcctgaaaatattgttgccaggtctagacatgatgagaggaagaaaattgttaacttattggtcaatggtcatgttaccgatggtgatcttatggtcgttcccattgttggaatgggaggactaggcaagaccacactcgctcagctcatctacaacgaccctcaggtcaaggagcacttccatctactaaagtgggattatcagattgatatggacaagcttatccaactatggatggccaatggttttatctcagatcaaaaaaaggtacctgctgaaaccgtaggtaaaaggattgtcaatgagctggtctcgaggtcatttttccagtatgaggagcgaagttggatggggtacaattctacaacttttttgaagattcatgacctcatgcatgatcttgcactgtctgtttcggaaaaggaatgtgtctgtataacaagggaattgattaaaaatagtgagttgcttccaagtgctgcccgccacatacttattcaaaattggataggtaaagagattcatggttatttatatggttctatgaggaaaatgtctcggcctatccaaacatttatgtttgatgggtctagtgaagctgccggtgtgcaacatttatcaagatatagttctttgcgagtactttctgtgccaggaattgggtttcatttaacaataaaaccaaagcatcagtgccaccttaggtttcttgatatcaaggacagtgtcatcaaagaacttccagatgacattagcgtcctttataatcttcagacacttttcgtcatctgtacacagatgggtgcacaaggttggagggcatgcctccagagcttggacaaatcgcctcacttcgaacaattacatggtttgtagtgggaagtggcttgagttgtagtagtcttggagagctgaaggaattaaatatcggtggttcgttaatgctaaagcagcttgaaaatgttcctgtagggaggaggagtgcaggagcagccaaccttaagaataagaaggaactgagacaactgtcactagagtggacaagtggtaaggaggagggactacagtgtcatgaggtgctagagggccttgaagctcatgatggactcctggctctaggaatacattactaccaaggcaccagttttccatcttggatgggtatgttgaaaaacatactcgatcgaccttcggttgtccgattgtagtaaagtagaccggcttccaccaatgtgtcagctagcagaactgcaagtccttcatttgaaaagattggaaaatttgcagttcctatgtagcaggtgtacatcctccacgtttggaaaactgaaggatcttaagctacttgatcttgacgtttttgaaggattttgtgaggcagtgcatggatgtgcagtagcatttcctcagcttgagttattggaaattgacagctgtaaaaatctagcagctctaccagaagcatcgatgctgggagaagcatattgtggtggagatcatacagtggcgcgctctgcatttccagaactgaatattctcgtattgcaaggtttgcgtagctttgagagatgggaggctgctgccctttaaactgaagaaagacatgcaatattccctcgggttaagaatggtcctgagcaggcaacatgaggaatgagccagccagttgcttttgccccatctagagtctctagagatatcggggtgtgaaagtctggtagaggaggtattcaactcctcccctgctatgctcttaagagtatggatgtgataggatgtcacgggttgttgtcatctctagaatctctaaggatacaacactgtcacgggttgtcaatcttccctcgtccctcagggtaatagatactacggttcatgtcagggcagctggatgcactcaatacctgtcatcactggaaatcctccgtctgtctcgttgcaaaaacctgtcgtgcttgcccagtgcgcgggcaggaggacgacaggaatactcatctcttcgtgagcttacaattacggtagcagggagacagagccgaacatcaaagcagaaagaaaaatgatccttattaattggttgtacaatacaatatggttttggagacatttttcggagggttcaagaccaggaaacggatcgacgccgcgtctatgcaaatttttttttcttcttattttcattggagttttatgaacaggattgcgttttgaggtttatagcctgtctattgggtgtcgtgtttatttttatgcactctatgttgtgagtgctagtccatgcagttatgtggagcgagcccaacaacgataccagcctagcaagttggtctcgttgtacccccggaacaacgacaacgtgatggtggtggcgatgcgcaacgccgcggagccggcgtggcgacagcggcatcgtttcatggggaccccgatgccagtgacagaaggaggtggatacagggtcagggagaaaatgtcacttgctcctctctatctttttgagggattgattgataggagctttcgagggattaagaaaaaatgtaggacaaatggttgagaaaaaaaaagtatatgtttggtttgtaaccatagattgtggcaaaatctttcgcttgctgtgctagggtctactgcccaacaagtctgtcacatgcttatacaatcaacaccatagctaagagaaaataaaagatgagcca

SEQ ID NO: 22151 - DNA, 2299 bp, Zea Mays
agtgagagctttggagtacgggggagctagcgaatcgcatgcggtcgaaacagttcggtctctccaattaactagggagtgcggaagtgagtacgctcaagctggaggaggacaagaaccagttgtccaagggcttggacccttggagcaaccctaccgccgccaccagcaccctgcactacctgctccaggagaaggagagagcgcaggcgcatgagcagctccagatctaccaccagcaaggattcagctacctccagcaccgccggaggcagcagcagcagcagcagcagccgagggctgcaggagctggcagtgatggcgtcagcagcggcgagtcgacgcccgtggacgccctggcgaccgcattcgggagcggccgcatcgtgcggtctgccgccgggcgcaaggaccgccacagcaaggtgtgcaccgcgcgcgggctgcgcgaccgccgtgtccgcctcgccgcgcacacggccatccggttctacgacgtgcaggaccggctaggctacgaccgccccagcaaagccgtcgactggctcatccgtaacgctaaggccgccatcgacgagctttcggccgaccgggaagaggggcagcctgccgcggaggcagcggatgccactactaccgagccggccgagcaggtgacctcgacgtcctacgggttcgccatcggtggtgtggccggctccttcatgccacattcggtcggtgccgatgacgtctccggctccggctccggctccggctccggcaacgtcaagtctttgttcccctcgtcgtcgacaacgagcactacccccacccaggacgagtacaggggctccccgccggaccttctgtcgcgcacgaccagcagcaaccagcctcaggagctttgcctcactctccagtctaccaataaccaccaccaccagcagcagcagcagcagcagatcttcagccatgtgtccccgaaccaccacggtagtatgatctccgttgcaggcgtccaaggctggccggaggcgcacggccagagaatgccgccgtggcatgctccagagaacagcggcgcgggagacgacgggcgcggggccgccggaaatggcgacagttacatgttcggcgtgcccggcccacggcaagggttagaccacctgcagggccagctgatcttctcccaaggggaaccccttcagtccagtggcggcggctggccgtcgtcgtctgcccgcgcttggctcgaccccctcgtcgcgatccaccagcaccagccgtcgacgatgtccgggcaggtcggcttcggtcatctggttggcggcgccggaagcgggtttatggggttcctcgcgccgccggcccagcggctgcagctgcagagcgaggacgagcaaggaagcgaagcaatgagggagtgatgagcgtgattagctactactgctgaggtacggtgtgcgagcttaccacgcactgctctccattgatctgctcagttatatgtcattgtcatttcatgtaggagtttgtttaggtgatggaatttcgcatcattaattattagctgctgcaatattcaatcatgcctctgtataagtcgtccttggaacctgacagcgttactgttacattagtggctactactacgtacttttgtttttttatttcattctttttttttccatttcatggttgtcaacatggataagatgtgtggtgatgatgagatagacgggacgagatgtgatctcgatggggtttcccctctttggaccattatttaatgtttctcttatcacaccctagatcatatcctgctgattccataaagcaggcaaagcagcagccgatgcaatctatcagaggggggcaagaagaagaaagaaagcagcggcaaaaggatggagcaaactaaagacgaaataacaaagaacacgaaccgggccggcaggggcagcagggattcaaaatcagttcagtgtccctgtagcagttaggagagtgcaagcgctgtgctgtttgcttctgagttctgactctccatgacgataatgataggggccgcagggcaggcagcagaggaagaagtggcccggggcagacggccgcggtgggggatctgtgtgaactgcgaaagtaatttttagcaggccgaccaaatcattacccgagacaaatgaccgtctccattattggtcacaggagcatcagaacaatgttcgtcttcgaaaattatttacgcagacgagcgttctaaggtgttcattttcaaaaaccatcaatcaacaaagacggtccttcatcaacgaag

SEQ ID NO: 22152 - DNA, 2090 bp, Zea Mays
cggcgaggtggcattagagattggaaggagggagggaggaggcgaggtgagagaggacgaagagggcgcatcgtgggttgggtgatcacggcctgatggggtcgtggcgcaaggcctacggcgccctcaaggactccaccaaggtcggcctcgccaaggtcaacagcgaattcaaggaattggatattgcaattgtgaaggcaaccaaccatgttgaatgccctcccaaggaacggcacgtcagaaaaatactcttggcgacctcagcaaaccgccctcgcgcagacctctcgtactgcatatacgcattgtcaaggagattgtccaagacaaagaactggatagttgcgctcaagacattgatagtggtgcataggcttctgagggagggcgatcccatgttcaaggaagagttcctggcctactcatccagagggaacatcttgcacatagccaatttcaaggacgactcgagccagtcagcttgggattgctccgcatggattcgcgcctatggatgcttcctggaggaacggctcgagtgcctcagggttctcagatacgacatcgaaaccgagcgtctcgtcagatatccccagacttccagcaaggtacatagtaaaaccaggaccctgcctagcccggaactcttggagcagttgcctgcactgcagcagctgcttttcagggttgtcggcgtccagcctgaaggcgctgcctgctcaaattaccttattcagtacgcactagccctggttctgaaggagagcttcaagatctactgctcaattaacgatggcatcatcaatctcgtcgatatgttcttcgaaatgccgaagtacgacgcaatcaacgctctggcgatttacaaacgagctggcctgcaggcagagaaccttgccgagttctatgacttctgcaaacagcttgagcttgccaggacgttccagtttcctactctcagccacccgcatcgtttcttgcaacgatggaagagtacatcagagaagcaccccgaccctcgatcaagagtgaggagagcgaggagccgaagctactgacctacgagcaagaagctccagaggaacccgaaaatgctgtggaagaggagaaagaagaaccgagtcaaaaaccagaacctcagcctgtgcctgatccagaaccccacccacagcaaacgactggagatctactaaacctggaagcagaggtgaatccttcggctctggaactcgaacaaagcaatgcattggcactcgctattgtagcaccaggtgactacaagccgccagcatctcaaagtatgtttgatgtcaattcgtctgggtgggagctggcactggtcaatgctccaagcacccatacaagccaagcagttgagaccaacttggctggaggctttgacaagctgctacttgacagcctctacgaagacgaggccaggaggcagcagatcgccggcgcgacctacaccggtagcctaggagcagccaaccctttctgcaccaatgccagcgatccgttcaccatgtctagcagatttgcaccaccggctaatgtgcagttggcactgatggctcagaaccaacagcagtattaccaggcgcagcagtattaccaggcgcagctgtatttccagccacagcagcagcagtattttcagcagcatcaacagacgttggcaatgccaatgccaaacatgtatcaccaccagtatcagtactctgtgcctacatctggagcttcgaacccatttggtgatcctttcagtgaccttgccccaatgggtgctcctgcaaaacagagcaactcagtttttctctgaactggttgctacttctgagtctgatcattcaattggtagagcagcaaacctgtacagcacttgttccttcgctaagtggaggtgttgtatattgtctttcttttgcaatatccaaatcttgaaatataacattagtaccagtactatgctgaatagtttttaatgaactagaagttccggtgtactataatgtaaccatgctgtcatactcatcacaagagtaaaactgtcactgtaactcacaagaccaggttaaactattagt

SEQ ID NO: 22153 - DNA, 246 bp, Zea Mays
tagacctatcactatcactatgacggattggaacaatatcatgaattggaacaatagcacaacatgactgagtactatcattatgactcgagatgaacatgtgagtattgtgaaataagtcgacctatgtgtcgttgcctcgttggagagttgtaaaagaacttgtatttgagtattgcgaagttcgctggttatttgttgcatgagaactggagtttatggttgcatatatatgttgtatgttat

SEQ ID NO: 22154 - DNA, 2105 bp, Zea Mays
ggaaattggtgttgatgatgatgttgagataccaccaggagcattaacttcaacagatgcaatcaatttcttctgagcttgaggtacttggcaggcatgatcacccacgtctaactgttccatttctgaaggcagtttctgagatttccaaggcatgtagacatgaatccacttgtttgccagatgaggcacaatcattttatgagaaggtcagttctgagggtcaagaagtaaaaattatgattgagaagagaatggaatccagtgcaatatctgaaagaaagaatgttgatgctcgatcttactttatgaccttggaatactgggaagatttattttgtaagctaaatgagatgagaagatataggagaatagttgggtctcttgcgggctcttgtttatcagctgccatcccacttctctcttccaataaggaaacagcatgccttgtggcccttgacattgtggagagtgctgctatatctattgccaatgttgaggaggcttataagtgtgaatgtcaaagcaaaggagtcattgaggaggccatccagttttgttcatttgacgagcttcttgatggtacagatgccaccgaagatgttgatgaaaataggctactcccagcaatgaacaaactgtggccttacttggttatctgtctaaggaacaagatctcagtgccggttgttaggaagtgcaccgaaatgttgaggcgagcaatttgcatatctggcggcgatttttatgtacgcaggtttcataaggatggacctattgtttggaggttgctggctttatctccattccgacgtctgtcaaagatggatgaaaaagcaatcattttaccatatagggatacctcacttaactcagaggaacctatggctgagatctccagccaaaagattcagattgcagtcctggacatgatcgctgcaatatcttcgaacaagagaagtgctgttgcactagaaagcgtactaaagaaggtctgtggccttgtggtaggcattgcctacagtagtttgacaggtttgcaggaagctgctataagggcattggcaggccttgcctgcatggatgctgatcttgtctggcttctccttgcggatgtgtactactcactaaaccaaagggaatctttacttcccaaccaagatctagccctggtatcagatcttttgccccctccagtgtcttcgagagaatacctctttgtacagtatggaggtgagggtgtcaggtgtgatgtagatccctcatctgttcattatgtgttcagaaggatgcagggtgtgtgatcttgtgtgacctgaaaatcaggttcctgatactgtgtatttgtaatcttgctgagtttctttggtcatgctagcaccctatgtcacacattgaacataatatcacctgctacagagaatggtaaactttttcatacgtgttctcgcactgaaaatcatcaaggttggtcacatgtctgaagaatgattatgacaagtctttaccactttgatcataattatattaagcaaacatcaggactcatgatgacaatgaaggatgtgatgggtttgtatctgttagccatataaggttgcacgttaagcatgcccctgacttgccggacgagcagcaagacttcgggacctagattggctaaggcactaagaatagaatagcttatctaccgatatgtaaagtcttatttccacctttcgaattcttttcctcggtagctaagcttatttagttgcctaatggtcgatgtaatctttttattgtgtgattcattccactttcatggtatttccgctcttgttacctccctctaccgcttcttcatctacatctaacctcatgcctggcgacctctaataagtaactgttgatccggccacataattggaatgccttcgcgtgaggttgccggcctttgtgtcagtcactcaacatgctctcaacatgctgaggaaggtcgttgttgtgccgtagccgagcgacgcaacaagtggctgttcagaacacggacaaggtgatgttgaacgtgtagaaacaacggcagcgtgatgcggaacgtctgaaacaacgacagcgtgatgccg

SEQ ID NO: 22155 - DNA, 1092 bp, Zea Mays
aaaaaatacgaggaaacaaacagggttcgtcacatcgcttgcgcctctctctctcggggacaactgcttcacccctgccgccgccctacgcttggtgcctaggtcttcatcggatcgttcaccgggcacaagcatcacccagcagactgggatcgcttctcccccgccgaccaagccgtgcctcccctgttgccggcgtcgcccctcccccaccagtgaaactcgcggtctctctccaccgcacgcacctcgtgtagttgtcgccgcgtgcaccccctgtagccccggcgttgggtcctactgctccatccggtttgcttccggcaacaagatcaacaacaagcgagcgaggtagtgaaaagctgcagctgtgatctctggaggtgctcttcctactctttgctggtattttgatggtggcttgatggccagtaatatgcaggcttctgggctgcctcagcctcccagacctcccatgatgggttctagcgctcagccacaaaatcttggaccaccaatgcctatgcagtttaggccagtgattccttcgcagcctcctcctcagttcgtgccaccagcagcacaacagttccgttctgttggtgagcctatgccgggggctaacgttggcatgccagggcaaatgccacattttccacaacctgggcagcacatgcctcactcaaatcaagttccacctgtatcacaaggggttcccatggtatatcagccagctagaccaatgtcatcagcacctatgcaaccacagcaacaagctgcgtatgctgggggccatttgctcaccatgggtgctcctatgcaacccctgacctatacatatcaaccaacatcgatccctcctgtagtgcaaccctggagtacaggcccaggacagagtgtaactcatgtgcctcctctagtgcagtctgggcaccagcaggtgtcagctccaacgactttgcctcctgtcaacttgtctgaacctagctcttcagattggcaggagcacactgcagccgagggaaaaaagtactactataataagaagacaaggcaatcaagttgggagaaaccagttgagttgatgacacc

SEQ ID NO: 22156 - DNA, 974 bp, Zea Mays
gatcagcaagcccatccgggcccctctagagcgcattagcactagggtttcccatctcttaaggctgccaccgccagcgccgccccctcggtgcatcctcagtgcgtactgtctgtgcgaaggcgaccattccttcttcgctccttcgccgccgctatggttaagtactcgcaggagccgggcaaccctaccaaataacacaagggagacagcttttgcgcttcgcaagctgcctttgaccaaggctaagcgataccttgaggatgttattgctcacaagcaggcaattcccttccggagatactgtggaggtgttggtcgcaccgcacaagcaaagtctcgccactccaatgggcagggtcgctggcctgttaagtcagccaggttcatattggatttgctgaagaatgctgagagtaacgctgatgtgaaaggcttggacgtggacaacctctatgtttcacacatccaggtgaaccaagcccagaagcagaggcgccgcacctaccgtgctcacggacgcattaacccttacatgtcctccccttgccacattgagctgattctgtcagagaaggaagagcctgtgaagaaagaggctgacaacattgtcgcggcaaggaagcagtgaagtatgttagcctgctgataatggcatcctttcgaagcattatagccgtagctcttttatgtaccttttcaggctggtaccgataccgtggatctggatttgctatgttttgtactgtgctcgagtgtaaggtcagttcgtaatacaatcaatctgcgtggaacaatttgatatccttgaatatgttagtgagatcatttcgacaatgaaagttgagaacagaagttacaatgtcagtgcccatttttttttgttttgttattagatgctaacgccgtgccacaaatcagctcgtgaatttgaacccagattttcaaatacagaaatttaagtgattttgaga

SEQ ID NO: 22157 - DNA, 5844 bp, Zea Mays
ttattccataagttccaagagtctgtatggggaaggcaagaaagaaaatacaaaaggaaaaaaaaaaatagtcgtcttcttcctcgtgaaggacggtctaggtgagattgtcctcttgtcgagatcctcacgtcccggtcctcaccaccggtggcgacggggtgtgacagttggtaccagagacggtgtatcctcggcgtggggggcgacggacggccaccagctcttctctgcgctagctatcggggtggcgacgacgattgttggcgcgtcgacggcggatccagcggtccggcgtggtgacctcattgatccggcgcgacctacctccttcagctaacggtggcgctccagcggcccttggctcgagttccgttttgttccgcgatggcttccctttcccccggcaactccttcatcgaggcggtgtcgacggcggtggttgcggcggatttggcggtgctgggctgacgggaggtctcgatttggcggtgctggtggcggcgactccatcaagttgcctgtgtgctccctcaactttcttcctcagatccccttcggcaggcggcgtgcccacgacgccactgtttgggatatctggtgacgagtgctctcagtcacggcactggtgacgggttccctttctctgagactccaaccactggcggcaacacgggatttggtgcgtgtgtgcggcagctacgggagattgtggagctcgagtggctctgcatcccgctcgtagcgctcagatcgtgattggctgctttcatcctctacaatcactagttgagcagattttgggtgagcgcggtgttaatttgttgatgctaaggcaagccagtaacctggcacacaacatgttcgatgatatgtcatttacagaggtggtctgggatgatgaaggggcactattcgatgaaatgcattgcacggatgtcatctgggatgaggagacacatcatggctttgactcacatggcctattgcagcaccatgctgaagcaatggataaccagatgcagggcaaggagaaattggctcaaagtggagattactatgatgagaggaaagtcaatattgaaccagacatcaacaacttgctcattcatgtcaatgaccatttctctatgttggtgattggtgcggattctaggcgaagtgatgttgtgtgggacgaggacatgttatctgacctcgatactcatggtggcttattacagttactggcatgttgtaaagatgatgagctcaaccaggacagagacactccttttctcttgggccttggtatggatcaggtggatgagatgctggccagcccgtccagccttggcatgaatgaggacttgccatctgtacctgagacacatggctcgttattgcagcaagtggcatgggacaggaagcactttgcttatgaaatgtgcacgcttattgctgagatggtcctggaagatgttctcaccgatgttggcaacctcgctttcagcattgattcaagcatgcagatcagtgatcaaccttccaaatatgcgctagtcatcgatgcttatctgctgaagacgcagtacaaaaaaccatacatttctataagccaatgggatccaggaatttggtgcaaaggtactatggcccatgagcagcaacagcttgagatatataggatgtttgagaaacaatgggattcagttatccttaaatggttcaggaatccttttgtgctgctgcaatcatgcaatggggaggatctgaatgaacaaggcacagtgcctgtaaatgacattttcgatgtattggctgctggccaggagttgaattttggcaacgtcaccttgatcatttatgggggatgccaaggagcaatgggtctgcaggttctttttgcagaattacacccttggcaccacaatgtctttacctccatagaattagcaatacagtcatggagaatcaatggtttcagtccaggaagctgcaagctcaacagacaatctatacttgttgctactaacttgcagttcaattataaagcttccaagtttgtatcctttactgatacttatcagatatacaagaacacatgcatttgtatcggagaattggaacctgctagttggagagatacttgttggctacctgagatctcacatgccaatgtgtccacacttgctagtgaggaaatagataacatgcttttccaggttggtgattttcatccaggagagagtgagcagcttgagctttacatgataacattgatacagtgggatctaggtccagtagaattttacaaatcaaactgtaggtgccctgctgcagaactgatagggtggtgctgattctagtttgttcatacaatctgtttatgttatgctgaaagctagtttcttctttatcatgaggtactacttggcccaacagtcatggaatttctgggatctttagtcaccaagatacaattcatggtcatgcggttgtttggggacaagcaaccatttgtgggggtggaaaggatatatggcaacacaggttaaagtcgtgttttaaaatggaaatgcatgctacagtcctgggtgtcaatgatgtattgcagcatatcagtgcttgttctctattcctgcagcttggtcgcagaaaactatatagggtggtgatgacttctgttctaaggcccagagatttgctgctgaagagctatacaacattcttgaccaagtcgatgaactattgttgcttcctgaccaaaagctcgggagaccatggtgtgacactgatctaatatgtgaaccgattctgtcttggagactcaatggtggcagcccaagcaaatgtttgttgcaactcaagacatacatagtcagacagtgggatccaggaatttctgggatctttagtcatcgagatacaattcaaggtcatgcggttgcttggggacaagcaacattttgtgagggtggaaatgtaacatccatgaatagcaacatgtccagggctttagctgacaagcgggccacccacccatgggacccaggtggaagaccagatgctgggtataagttccaagagtctgtatgggggaaggcaagaaagaaaatacaaaaaaatagtcgtcttcttcctcgtgaaggacggtctaggtgagattgtcctcttgtcgagatcctcacgtcccggtcctcaccacgggtggccacggggtgtgacatgatactaggagatgtaacggagcaaagaattctgagaggagccaaagatgaggataagggatactgaagatcctcgtcgagctggacaaggatctcaagtctgctctgtgcgatttggaagacgtcctggatgttattgaatatcgctgaatcgagaagaaagtcatcggtggtgacaaaaagttgatcagcactactatttgcatctgggcgctgcaagctattggcgattggatcacctactggaagcgtagctcgttcgggcaaaagctgttgcagtgcgcgcgcccagaaccagtatcagaagctcagggaccttggagagaagctgcagaagtgcgctcaggatctggatctgaagttttgggaccttgtagctaagctacagcagtgcgcccagaacctgaatcacatgttctgggactttcaagctaagttcttgcagtgcacccaaagcctgccactgtatatccatcagggagcagctgggcaaccaccaatgcggcaatgcctgattcacccgccgcaagatccactgcagaattcagggatgacattgaacaaggaccatcgacgcctgatgatgcaccctcgaatccaccgtcgcctaatgccctcccgaatgctgctggctccaccactggcaatcaacacggatcagctgaggaggcaccgacgcctgatgcaccctcgaattccctggtgcagatgatctgcgactgattggtctatgggtttacagcactccgttctttttatttggctgcgcgtcatcttcgggactggtcatatgaaccgattggcatcaaagaatgatggtggtactgcaacagattgggaccttcctactaatgagataatcagcttgaggaaaaggataaagaacatagaatatattgtcagtgagacaaataaatcacctctgtcgaaacatagtagcagcagcacaaagaatgaaattgatgacaaggaaagcagcagcaccaagaacagcggcaatgtaaggagcaccaaacagaaggaaattgactacgtatacagaagcattgaaaagaaagttaaagttttcggtcgagacaaggtccatgaagatataaggtgcttcataatggaccggctaccgatgcaccaagctccgactccagtaaaccttattctgtgattggcatatatggaattacaggttctgggaagactactctggcacaatatgtttgtgagtatgagaagggtgaggtttcaatcctatcatgttcatccatgtgggaactacattcagtgccggtgaaatattttgtgatatgctggaccagatcacgcaacagcggccctctgatgccaacggtcctaaaagcctaaaaacagagttaaaagatctaacactacagcaaacgccaaaatatacagctactcttgttgactgtccaaattcaaaatacacagcttataagcaaggctgtatatgtttgctactaactcatacctataggcagctaagaccggtgttatgccaagtgacattgaagtgtacatagctgaccataagggaccagacccttccaaacctgaggagttgtgcagtcaggcttgcacagatcggctggcagaatatggtcaagaaatggtgaggcgccatgaaaaggactacgaccggagaaaagcaccaatcgatcccatggtggtgtatgctactggaggcagaaagagtcatgggcggtactccatgtttaatggagtgattgactccagagaggttagatctcagaggtcggggtcttcctccgaacgatcaggggctagaactcatcgccaatcagagcatgagttggaggttgcaagggtgcaagaggagataaggcaacgtgatgcattccaaaggcacaacatgagtactttgcctcattcttggcgcagcagcagaccgtgcttcaagcaactttccaacagcaggggataaacgtagtccttccacaatttcaacctccaccactgccaccaatatggggatcgggtacccaataccttctgcaagtcaaacggccgatgctggaactacatttgtaaatgcaatcttcggtccaccctctggaggcagcggccaaaactccaatcatctgagaggtggcttgtcacactcggatttaagggcaaactcgggcgcatctcaaatgtgtgctaggatcaagtctcacacatatgatggctcatggtacagaaatcaatgtcatatctttattaaataatcggagtttttttacaaaataactaaatacaatacaccatatggcgacgagatcctccaccaacaaagttgactgggagacgacggcatagatctctccgaactcatcgtaacatccttcatgctctttatcttgcagtacctgtctttgacctggtgtgattatagcaagggtgagctcccatacggtcatcgctcagcaagtgtgggaaataatgtgtatgagctcacttacggtgggagctcatgtgtagtgtaaggctgatcaacaaataatggttaaggctgagcattgcttttaataagttggtcaaaattttattagcaattactaagtataagtaaataccatcccaattaaataattgatcataaatagaataaatttccacg

SEQ ID NO: 22158 - DNA, 693 bp, Zea Mays
ttcgtcttcagatctagggttctctcgtgctctgttctcatcttctgctcgctggtgtcccctctctctcacccatggcttcggcggcggcggcaactcaggtggggacttacttcctgcggaactactacaacctgctgcaacaaacccccgatgtcgtccaccagttctacagcgaagccagcaccatggtccgcgtcgacgacctcaccggcaacaatactgcaacaaggagctgtcgttcagccattgccaagccgagagcaggtgatggcgctggcaccttgctcgaattgatggtgatgcacgacctgccttgaagcagaagagaaactgagaagaacccagcttagatcagactgaagaactagatgcggtggacgccttcaagacctgctgacatgagggctgctagtcagagctgctgtttttggcctgttctttgacatgagggtacccaaaaactctagttgctcgtgggtgtcaactttttattatatgttgttatgtttgtgcaaaatcaactgaaatgtgaagtcaagtggtgatgctgtgaactgagtttagtgttgtccacttagtttgtatgatcactggaatactagttgtattcatctacggaatatggaattgtgtgctcattcctctgttctagtatcttttgcaattttcaataaaattattctctgcaca

SEQ ID NO: 22159 - DNA, 1978 bp, Zea Mays
cttctatttatctatttatttatttatgtgtgttttgtttccagtgatagttttgctcttgctcgctctccatccacctcgccatctccccccagcggcagagcggcgcctcggttctgcctccgctcgcgctcgccgccggcattccggcagttcctgctcccggccggcctcccagagtgtatcgatcgccgcgatggacgacccgggcgcttccgccgaccccgccgcgcgccaccacctgtcgccgcagcagctcgggggccagccgccggtgccgcgctccccgaccccgctcgacctggcctccgccgccgcggcgtccgggtatcgccgcctctcgccgtcgctgcggccgccagcgcacccgcaggcgcgcctctcgtcgccctacggccagatcccctcgcccggcgccggcgcgcaccacgcgcgctcgctctcccagccgctcttcttctcgctcgactcgctcccgccgccgccctacgccgatctgggcgccgcgcccgccgtgcctccctccccgccgccgtcgacctccgacccgccgcctctcggcctgccgcccaggagggccggccaccgccgctcgcagagcgacatcccgttcggcttcgcgcagctcagcccgccgctgcccccgccggcgccggtcaagcgcgaggtcaccgctgcggccgacggctgcagatcggacggcggcggcggtgatgacgccgccctctacgacctcgtcaacgcgtacatggacctggacgggctggacccgctcaactcgtctgaggaccgccacgacgaccgcgacagtcgtgccagcggcacgcgcgcggggagcgcggccgagagcagcgagaacgaggcggagagccagtccacgtccgcggacaggaaggacgggggcaagtcccgccattgtcgcagcctgtccatagacagcttcatgggcaagctcagcttcgccgcaggggaggagtctccgaagctgccgctgccgtctcctggtggcagcctcaccaggagcgggagtggctcactggaaggtggtgctgtcgcgctgttcaatatggagtttaccaacggagagtttaccgactccgagaagaagaaaattatggcgaatgagcgacttgctgagatagctctgacggatcctaagagggtcaagaggattctggcgaatcggcagtcagcagccaggtcaaaggagcgcaagatgaggtacattcaggagcttgagcataaggtgcaagtgctgcagacagaggctacgacactctcagcacagttgacaatgctgcagagggactcagctggattggctactcagaacaacgagttgaaaataaggcttcaagcaatggagcaacaagcacagctgagagatgccctgaacgaagcgttaaccgccgaggtccaacgtctgaaactcgcgactggggaggtaaccgatggccggatgccgaagggcctacagcagcagatgaactcccagatgctccagatccagcagctgcaggttcagcagcaggcgccccaggcacagcagcagggccagcgacagcagcagcagcagcctcagaaatcggcatagatcaggtcaggtcgagagaaggacgctgaagctaattgagcttgagcatgaccaattgaaggatgctgggtggggagaaaaaacccgagtcttttgcgtatatcagacatgttgtaggatagctgcaatagtagggcgacaggcgccgtggtgccgctgtttcagttggtttcgccgagtcaagtaccttagctggagtatgtcgtcttggtgtcgtagtaccatacatgattgcctgcctattgttgaggcgtcttggtagcgtccctgaacgttctctcggaggtgcttcttctgttcttttgtctaagggggctagggtgtcacaaatgtacctgcgtaatagtgtaattattatctatagcgtaccttcagcgtcaagaa

SEQ ID NO: 22160 - DNA, 129 bp, Zea Mays
tgactaaagttatgcaaaggagactacccatagctgttgaggaaggcaaaaaaaggccacatgaacctgtgcaagctgccaagtttgcatcagaggctggcatcattattcaggaaaccatgcctatcc

SEQ ID NO: 22161 - DNA, 674 bp, Zea Mays
aaagagactatgctttagaaatgtggagattgcttgatccagattcaagattaattaattctgttcaacttcatgataggatggtgtgcgtaaaatctggtttaaagaagtccttgctaaatgtcttccatgatggttcttgtcatcctggtatggcattagtaattgatgatcgtctgaaagtttgggatgagaaggatcaattacgagttcatgtggttcctgcatttactccatattatgctccacaggcagaggcaaattgttctatcccggttctttgtgtagccagaaacgttgcatgcaatgttaggggtggtttcttcaatgttcatttgtttgcattttgctgtcaacctaatacttctgctacgagactccctcatcagcttctaatctcaacgaacagccactgccatggacttgtacatctcgacacatcttgtctgaaatcgtctagaccaaacaccatagttctatctgggcttagtggtagtggcaaaaccactatttactaccagaaagacaaagtaaaacctgtgcatgttattgatgttcctggtcatgctaggctcaaacccaaacttgatgaagtcctgcctaaagttgctgcggttgtctttgttgttgatgctcaagatttcttgtctagcatgcaagctgctgcagagtaa

SEQ ID NO: 22162 - DNA, 2616 bp, Zea Mays
cacaggcgcagcggccgcaccgcactgcagcatcgacgacgccccggcgggcccgtccctatcaacccaccccgcgccatagaagcaggcgaaagcgagccccgggaactcactcccttccctttcagagctcacagttcggagtgggaggaggagaggagacccacacactgtacccggccacagaagcagctactacagcaggagagggagaggaggccggcccccaagatctccgtccgagaagaagcgagcggcgacggcgagacgaggcagagagcagtttggtgactgcagaaggattcggtgaggaatctcgtcatgcagacttcaaaaccaaggagtgggtcttcagatgccccgcagaggacttctccaaggacaccgcgggcatctcgtgtggccaaaaccggagggaatgaaaccgattctacaggagttaccccgacaagaacgcctacggagaggagccctaaggttactgagaggcggtctccacggagcccaattactgagaagaagcgcccaagcaggctatcggaactggagtccaaggtcagccagctgcaagatgaactgaagaaggccaaggagcaacttagctcgtcagaggcacggaggcgccatgcgcagcaggaagccgaggaagcaaagacgcaagagcaggctgcagccgcctcgaagctggaggagttgcagcgccagcttgacgagttctcagctgcggaggaatcccgtctccaggaactgcgcaagatctcgcaggaacgtgaccgtgcctgggagtcggaactcgaggcagtgcagaggcagaaatcagcggacgcagccgcgctcggctcggccatgtccgagatccagcggctgaagcagcagctggaagcttcagcagagtctgacgcggcccgcgcgaagcagtgcgagtacgtggaagctgagatcgagggcttgaagcaggagatggagatccgcctagcgaccattgagggcctgaaggtgaatgtcagcgagagtgacagggctgcggctgaggcaaatgccacggtaaatgagaccaagcagcagctggagacagcgaaggccaccattgactcacttgtagctgagggcgtccgcatgcaggaatgcctgaggtcgaaggacatggagctcaatgagtccaaggctctcgtggcatcgctccaggaagatatgaagaagtcacatgacacggacaatgccaaggccaaggccaatactgatgtccgctctgagactgaggctctgcagaaggtgctggtgaccacaagtgccgccgacgccaatgggagctgtggaagctatgacccagagatcgaacagttgcggactgctcttgaggtcgctgagatcaggtaccaggagcagcaaactcggatgactatcgagactggaggcttgtacgagacattggagagtgtgagggccgagtgcgcccgcgaactgtgcgagctcaggctggagctgaagaacaagaacgatgcactcatggaggcaatggcaggagccgccgcagatcctcacaggccagacgcgatgcagcagccggagctggaggcgaagctgatgaggtccatcaccgacgcggcggagctgaaggcatgcctgatggacaaggagaacgcgctgcagagcctggcggaggagaacgaggcgctgaaggcgggggcgggcagggcggaggcggagctgcggcgcaagtacgaggcggcggtggcggagctggagctggccaaggccgcggagcaggacgtgcggatgcggctggggctggtgacggacgaggcggacaggagcagccggcgcgctgcgcgggcgtcggagcagctggacgcggcccaggcggccggcgcggagatggaggcggagctgcggcgcctgcgcgtgcagtccgaccagtggcgcaaggccgcggaggcggctgcagccgcgctcggtgggggtggggggaaggacggcaacggcggcacggtggagaggaccgggtcgctggggcccgagtacggcagctccatcggcgggaagctgatgagctcgccattctcggacgacgtggacgaggagtcacccaagcggcgcaacggcggcggcggcggcggcggcggcgtgctgcgcaggatgagcgggctctggaagaagagccccaagtgagtgagactgagatggggtggacggggtccgggatagccgtaggtgcgaggtgatgcaatagcagcagtatgagtaggagggatactggtgaatgctgcagggaagacgacgacgctctttctggacaagacacggagacacagctctagtctaggtggtaggaagcatgatcgtctctgtctgataacatttggctggtacttgagtgaacctcgtgtcgaggagcagctgcttttggctgcctgttctgtaccttactatgcttcattcagtcaaaaaaattcccacatgtgacatgttcttggttcttttttctttttgaagcgtttttatttcattttcccttcagaagctatgctgtacatctaatacgttacttgcctggctgatgatttggatgtatgtatctgggcagtatcactgcgcgttctctcagcgcgatttcac

SEQ ID NO: 22163 - DNA, 4655 bp, Zea Mays
cggcctttcccctttcccctcccaaaaacctctcccaaacccttggaacctacgccgccgacgccgccctcgcagccaccaccgccgccctcgcagccaccgccgcagcaatgctccgatctcaggaccgccgacccttccgcccgccggatcgggctccacggcctccccacccccaccgcgaccagcacaaccacaacgaacaccggtaccagcctctctcccacccccacatcgaccgacgctacagcaatgaacaccggtatcagccccgcggccagcatcagcgcggttgccacgtgcagccgccccttcgcccgtcgcagttcgagctagacctcgagaagaagacactggagtctgagaaggaatttgtcgactccaaaattgcggagtacaaggaggcgatgtggtcgatacagcgggcaatgttgcgtggatcgggggacaaggaggagggtgtcgacttgtttgcggctgtagatgatggggaggtggactttgttaaggtgcatatgatgctgctgcgtgagtgccggaggcttaaggagggcctgccaatctatgcataccgcaggaggattcttaaccatattttcgccaaccaggtcatgatttaataggagaaacaggttctgggaagagcacacaattggttcagtttcttgctgactcaggtgttgctggtggtggttccatcatatgtactcaacctcgaaagcttgctgctatatctttagcacatagagtagatgaagaaagtaagggttgctatggggacagttctgtgttgtcatattcaaccttactaagttctcaaggttttggcactaagattatattcaccacggacagttgtcttttgcactactgcatgagtgatgtgaatctggatggcatttcgtatattattatcgatgaagctcacgaaagaagcttgaatactgatcttctgttagctatgatcaagaagaagctgcttgataggctggatttgcggctcattataatgtctgctactgctgatgctgacagacttgctgaatacttttatggctgtcaaatatttcatgttagaggacggacttttcctgttgaaattaaatatgtcccagatgtatcagctgaggcttccttgaatagtgtaccaagtatttcttctgttgcttcctctactgcttcctatgttactgatgttgtacaaatggtaaacatcatccacaagaatgaagaagagggtgctatacttgcttttttgacatctcaactggaagtagaatgggcctgtgaaacattcagtgatccaaatgctgtggtacttccgatgcatggcaagctttcttctttagaacagaatcttgtcttcaaaagctaccctggaaagagaaagattatcttctgcacaaatatagctgaaacatcattgaccataaaagatgtgaagtatgttgttgattgtggcttggccaaagaatacagatttgttcccactagtggtctcaatgtactgaaagtcaactggatttcccaaagctctgctaatcaacgtgctggccgtgctggtcgaactggagcagggaagtgttacaggctctaccctgaatctgattttggtatgatggaagtgcatcaagaacctgaaattcgtaaagttcatcttggcaccgctgttcttagaatacttgctttgggtgttacggatgtaaagtgttttgagtttattgatgccccagatcctgaggctatcgctatggctgtgaataatcttgaacaacttggtgctatagaatgtaaacgtagtggatttgagctaactgacattggacatgatctggtcaaattgggtattgagccaaggcttgggaaaatcatgcttgattgcttcagctatggtttgatgaaagaaggtttagtcctagcctctgttatggcaaatgctagtagcatattttgtagagtgggtactaatgaggagaaatataaagctgaccgcctgaaagtccctttctgtcaccctgatggagaccttttcacctcacttgctgtttataagaagtgggagactgggtatggtaacaaaaatacatggtgctggcagaatagtatcaatgccaagaccctgaggaggtgccaggaaactatatctgaacttgaaaaatgtctaaagcatgagctaaacattatcgttccaagttactggagttggaaccctgagaagcctactatgcatgatacatcgctaaagaagattattctatcatctcttagaggtaatcttgctatgttttctggacatgagaatcttgggtataaggttatttcagcaggtcagcgtgtgcaacttcacccttcgtgctcattgttcatttatggcagcaaacctgaatgggtggtattttcagaaatcttgtcggccgtgaatcaatatttggtatgtgtaactgctgttggtcttaacgaagtgcttacagttcaccccatgtcttttattaagcaactggaggagagtaaattgcagaggaaagtgattactgggataggaaataaatcgctgagaagattttgtggtaaatctggccaaaatctgcagaatattatctcacttctgagaaaagattgcagagatgatcacataatggttgatttagacttcagtagcagtgaagttttattatttgctaaagaacatgacatggaaaaggtcttttgcaaggtcaattatgctttggaacttgaagctaaattgctgagagacgaatgtgacgagagaagacctggtagctctactattgcactatttggctctggtgctgaaatcaagcatttggaacttgggaagagatatctaacagtggaaattctgcatcaaaatgctcgtgttatagatgaaaaggaacttgtttgtttggtagattctcttgttcctggtatagcaaattttcataaaaccgggaattttcagacaaacttagatgaaacaaagtgggggaggtttacgttcctcaaaccggattatgctgaagatgctatttcaaaattgaacgggattgagtttcatggttccttactgaaggttagtcctgtaagcatttacagccactcagggctaccatttcctgcagtaagagctaaagtttcttggccacgtaaggcaagcaggggagttgcacttgtaacatgtgctagtggtgaagctgaatttattgtaaaggactgctttgcccttggagttggtggaaggtatgtcaactgtgaggcgtggcatacaatttggagaagaatgagaatggaaatttccgtgttaagcttactgcaaatgccacaaaaacaatagcagatttgagaaggcctcttgagcttctgatgaagggaaaaataataaaccatcctgatctgatgttaagcacagttcaattgctatggtcccgtgatggtatggaacaattgagatcagttgaacgggagaccggcacttatattctgtatgacaggcaaagtctgaatattaaaatttttgggagcactgataatgtggctgcagcggaggaaaaattggttcacgcacttgtacagctccatgagaagaagcctcttgaggtttgtcttcgtggccggaacctcccaccaaacttgatgaaggaagtgattgtaaagtttggggctgatttagaaggactgaagaacgaggtccctgcagtagatcttcagttaaatacacgaaggcagacactttatgttcgaggcagcaaggaggataagcaaagggtggaagggatgatctctgaactgataacctctagtgaccataatgctcaactgtcgtcagagaatgcatgtcctatttgcctgtgcgagctagaagatccctttaagcttgaatcatgtggccatatgttctgtttagcttgcttggtggatcagtgtgaatctgccatgaaatcacaggatggcttccctcttcgttgcctcgaaagtgggtgcaataagctgttcctcctagctgatctgaggtctctgctgcctgacaagctggacgagctgttcagggcttccttgaatgcatttgttgcatctagcgcagggttataccgtttctgccccacaccggactgcacatcgatttaccaagtagctgctgcaggcgcacaaggcgacagaccctttgtctgtggggcttgctctgtggagacctgcaccaagtgccatctcgagtaccatcctttcatctcctgtgaggcatacaaagagtacaaggcagacccggatgcaactatgcttgaatggcgcaaagggaaggagaacgtgaagaactgcccttcatgtggatttacaattgagaagagtgaaggctgcaaccatgttgagtgcaggtgtggcagccacatttgttggaattgcctggagaacttcaagagcagtgaggagtgctatggccatctcagatccgtgcacttatcctatgcagatctgatgtaaatctgtacagattgtaatgaatcacgtggtctataatctggcaagctgaatttgccttccaacagtgattgtctgatcctaaccggttcccatctctacctgtgctgagaatattgtaggcgctttatcatttgttactacagcggggaatgctctagtgtgcatcggggacggctaac

SEQ ID NO: 22164 - DNA, 799 bp, Zea Mays
gcgatccacggtgcatacggacaatgcaactgaaagcagcgctgcaccacgccatcctcctgctcacgcttgcggtttgcacgcctgcatgcgcacacctcgctcaacctctccctcgcgctctctctctctctctcagtctctctgacccccaagattcctctgctcctccatctccatggctgtcgccggcttgccgtgcttcccgctctctgccgccgccgccgccccagctgtgcggctggccgcgaggccaaaccggcagcgaccaccccgacgatggacgggtgccgcaccgtcagcagaccgtggggagatgggcaacgacgacggtggtggtgaggcgttgccgccaggtcggtccgtcgtcgtgacgactacaaagcccgccgcagcagaactttctgtgaaggattgtcagtattctagtttgaggatatgatgatattcccaagtgagcatggtggggtgtttcctcatcaacaagcactctaaggtataattgatgttgctccaataccgggtgtgagagaagccacaactgatgttactacaaccaaagtcatcaatggtatgttgaaggaaaggctatatagatggtacacactagtctatgtggctattttgcatctcatgtatgctatcttcatgaagtaagctagtgttgtagtatttgcacctatcttatggctgctggtggtagtagtcataactcatatctgactctagtagaagccatgtaatgaataacaatttttgccattgatcaaggcaaaaactaacaaactttgaataaaat

SEQ ID NO: 22165 - DNA, 1412 bp, Zea Mays
caatttattatttttcttgctagatggaactggtgaacctaatgaagaaggattgaattactataacagcctcataaatactctattagacaaaggtatacaaccatatgtaacactctttcactgggaccttccgcaagcactatgcctctacttgcttcaaggaatttggagatagagtgaaacactggatcactttcaatgagccccataattttgcgattgaaggctatgaccttggcatccaggcacctgggaggtgttctattctgtctcatatattctgcagggagggcaaatcatcgactgagccttatgtcgtagctcacaacatactcttagcgcatgctggtgcctttcatacttataagcagcatttcaagaaagaacaaggaggtatcattggcattgcactcgattctaagtggtatgagccactgtcagatgttgatgaggacacagaggcagcagcacgagcaatggactttgagcttggatgaaacttgtgggcgacaggctgcctcagttttcagctcgggcttcgatgttagtgtcaggctcactagattttgtgggcataaaccattacaccacactgtatgttaggaacgacagaatgcggatcaggaaacttgtaatgaatgatgcttcaactgatgctgcggtcatacctactgcttatagacatggaaagaaaataggagaaacggcagcgtcaggatggctgcacatagtgccctggggcatgttcaagctgatgaagcacatcaaagaaaagtacgggaatccgcccgtgatcattactgaaaacggcatggatgatgcgaacaaccggttttcgaaattagaggatgatctgcaggatgataaacggatacagtaccacaaggactacatgtctaacctcctagacgcaattaggaaggaaggctgcaacgtccatggctacttcgtctggtcgctgctcgacaactgggagtggaactccgggtacacggtgcggtttgggctctactacatcgactacaacaacaatttgacacggatacccaaggcgtccgtggagtggttcaggcaggtcttggcccagaagacggctggtttggagtacagtggttctacagtggccagtagttgagtgtatataacatacacggcacggctaccatcgatctgtacatgcgtacgtagctttagattagattgtgattattctcgatgtatatagactcaccatttggacgaccttcaaccgcacagttgaatgtgtcgttatgcttgctacaaattggttgattggtgctaaagaaatcagtgaggggtgctcggttctactactaaatgtcatatcggaaattaaataccaattataaatattaaatatattttaattacaaattaattatacaaaa

SEQ ID NO: 22166 - DNA, 1724 bp, Zea Mays
cgccacaaggcactgactgtagggcccacctagcacccaccgtcccccgtgcatctcctatatataaacctccagcagggcgccacaccagaaagcgacacgaccgcgcccgaggagaccacaccacaccgcctcctccgcccgccgattcgtcgagctcgccctcccgctcgcctagctcccctgccttttcccttcctccccacctcctgccccgcgaacgtgctcccgcatgccaccgcgctgacgcgcgcggcggacgacggggtcgggatcatggacaagtacgaggctgttcgggacatcgggtcgggcaacttcggggtagcgcggttgatgcgcaaccgcgagacccgagaactcgtcgccgtcaagctcatcgaacgaggccaccggatcgacgagaatgtgtaccgcgagatcgtcaaccaccggtcgctgcggcaccctaacatcatccagttcatagaggtgatcctaactccaactcatcttgcaattgtgatggagtatgcggctggtggtgaactatttgatcgaatcgtagatcgtgggcgatttagcgaggatgagaccaggtatttcttccagcagttgatctgtggagtgagctattgccatcacatgcaaatatgtcatagagatttgaagctggagaatgttctcttggatggcagcccagctccacggcttaagatatgtgattttggctactccaagtactacattcaaggccaaagtcagcagtggggacaccagcatatattgcaccagaggtgctttctcggcgggagtatgatgggaagcttgcagatgtatggtcatgtggagttactctttttgtcatgcttgtgggagcctacccgtttgaagatcaggatgatcctaaaaatattagaaagaccattcagcgaattgcagcaattcaatataatatcccagacaacattcgcatatctgatgattgcagacaactcatttcacgtatctttgtcagcaatccattaaggagaatcaccatgagggaaataaaaagccatccatggttcctaaagaacttgccgagggagctcacagaggcggtgcagttatcctacttcaggagggacaacagtgtctctgcattttcagaccaaacaaccgaagaaatcatgaagattgtcaaggaggcaagaaccttgccaaaatcgtcgagatcaggctatggttacagtgaagaatgctcagatgaggaggaaaaggaagtggagagcgaacccaaagaggaggaagaagaagctgagtgtgataagacagttagggaggttcgcgagagcggggagctggatatgacctcactgcacatctaaatgctgcctgtgaggctgtgacgtgtctgtagataattggctttattgtctgctgaatttggtagaacttatgcaattctggcgtcagatatagtggtctatataagccttttccatcctgtaatatatttgttttgttgaactgtatgtgtggtactccgtatatgggtttgttctaagggagcaaggctttgtacaggcacacctgattgtgtttttggataggaagttttaccgtctgtttgcacactgcagcaaacattttggagtttgtaagccatatgttgcggcatatccagtaaaaatggatgaaacgctgcaaattccgtcaaaatggcttgtataactttgcaaagattgaagataaaagatttt

SEQ ID NO: 22167 - DNA, 1868 bp, Zea Mays
gttgtggagtctgctgaagaacgagttggagtctgggagacgtttagacaaacacaagcaaattttttttcaatcccgcagagggcaaaaccgtccaacgagacaaccccgcgcagaggcaaaagccccacgcttgagagtgagaagaaacagacgcatcgcttccttgtccatcctacctccccttccccccgcccaaatcccgtgacggtcgccgcccccgccgtgctctcgcccgcgcgggagacgacgcagcacccccccgcgtaggatccgcggcggtcggcaggatggtggtggccacggaggaaatggtggtctactgctttgacaccctcgtcgcctatttcaccggcgagcggccgccgcctcccgccttcgaggatggaaaccagtaagcctccccgcagcgatcgaaaccgggccgtgttgcccccatatcgaggaggtggttttggatccatttcgatatagggttaggccaattcgtgttagatttgggcaaaaggcggcgccttggtagttttggtttcggctcggctcctgttgcgactgattcgcgatccgatctgattgactgtttgttggtcctggcgattgcggaatcgtgtggtcttagttttcgttgcaaggcagaggcgaagtgaagtattcacacttcaatggccacgtacctcgcctttcgacagttgccagcttcctacctctagcgattgtctgacggagaggacaaggaatctcactgctacacatctgagattatgatttaagtaggacagtcagtttaatcctaaggcattcagattctttgggaagttgggaggttaaacaggatgagctttcgtgttctgactgtgacgcactgatgtttcttattcatactccaggattcagacttttaattgagatcctttcaaccgtgtagtccacattaatttgtatggcttgtaaggcatcattgttctagcatacatgtttttaactcattgggtcaatttttttgtaactttagcccattgtttgtgacctggaagaaggctgccaatggttcagaaccacgcctccggggatgcataggaactctggagtcccgtcagattgtcagcggctttagggactacgccctaactagtgcgctgagggaccgacgctttcccccaatacaatcaaaggaactcccaaccttggagtgcacggtatctatactcactgattatgaaattgcagaggactacctcgactgggaggttggaaagcatggtttaattattgaatttacagctccagactccaacacaaaacacagtgcgacctatttgcctgaagttgcgggccatgaaggttggacacatgtagaaactattgattcactcgtgaggaaggcaggttaccagagaatcatcactgagtccttgaggaagaaaatcaaagtcactcgctaccagagcaccctgtacacgatgcactatggtgaatatgttgcgtacctcaagaagaacagaggtgcagccccgtcaattagtggggctcctcctgtagttaatggcttcaagccaagccattgatttatcagtataaaaaaaagctcaaagaacatattactataatttatctgcgagcaatttggggggtgtagtgtaaccaccccccacagttcattgatctagcatcattcccttccaaggaaaaggccaaataggggcgtcatgacaagcgcccagaataataatgccttcctggatggatcatggatgatgcttatgtatcttgaaaacacatgtgcttcaagaagttcaaattgtgtggtgaagttaattgattcgagttggccattcctagttccagtgatttgtctctattcttaactt

SEQ ID NO: 22168 - DNA, 162 bp, Zea Mays
tataaataggtgaacagtacccccgtactgcgggggctgacttggcatttgctttagcgtcacgcttgtactttcgccttctttcaagccgaaggtacatttgtaatttgatattatttctaattttctataataataatacagaaacgagttgataataat

SEQ ID NO: 22169 - DNA, 1622 bp, Zea Mays
ctgtttgccgttttctccctttacacgctcgattccccccgccgtttccacgggggccaggtgcctgcattactgggtccgggcctagcgtcagcgcaaccgaacacgccggcgaccgctgccgcccttctcccagctgcccaggtcttcgtcgggccctttgcctgcggcgtcggcgacgagcgcctgccacaccaggaatcccgttaagtttatttatgctcaccaatttaagggcagaacttacggacctcaagctcttggttactcctgatcttctctaggcgactaggcacaattgccctctggcaaaatgccatcagtttatctttacatccctaacattatcgctttgtccttgatggtgtggatggttggtttgcaaggaagttcaatcaagcatcaacctttggagctgtgttagacatggttacagatagggttagcactgcttgtttgttggcccttctctcccagttttacagacctggtttagtcttcttgatattgcttggattggatattacgagccactggtttcaaatgtacagttctttcttgtcaggtaagactagccacaaggatgtaaaacacacaggcaattggcttctgaaattatattatgggtacaggccattcatggccttctgctgtgtttcttgtgaggttttatatattttcctgtttctctttgctgatgaggagtcaacaagcttgcttagtgtatgcaaaggcatcctgaaccaaagtcccgtcgttatcttggtgtttgtttccactctagttggctgggcagtgaagcaagccaccaacgtcatccagatgaaaactgctgcggacgcatgcgtggtgtatgatctgaagcgcagcaaatgaagcatgaaggcagcttcacggtttagtatcgacatatccaagggaaaactctgcgagggggcgggctacgtcttgcgtgccttgacatctttctgatgatgcggtcatatgtgggaccaggggatgacatgccgtggccaatgcaaacaattgttttgtgaaagcagcggccgttaagttgttgtcagtgtgagagtggtgatgcgatcatgatcctttttacctagagtagctcccctttgtgttagcctgaacgatgttttgcaagccgcatgttccgaactctaggattatttggattacaaaacttacatattccatcctcaaggccagttccctcgagagttcgatagttacttatagtcgctggaataggcactagctactgttcgaatgatttcccttttgctccttaagcatcctttgggtcagctttatcgataaaatttctttttttatgtgacatccctttgcttagaaggggattgaatggaataggagaggattgaggaagaaataaactaatttatctctcaatctcttcgaatccctttctaactaaataaactgctttaaatgataaacaatacctctatcctaaaatataataattcgttttagattaattatataccaatggagtttgtatatatatctatattaattatcatttgaatgtatatgaacagaaaaaatgggctagaagtaactatattttaggagaacggaggaagtaccaagttaac

SEQ ID NO: 22170 - DNA, 995 bp, Zea Mays
gtacgcagcacaaaccccgcctttctcttcgtcaaatttcggtgctactaggtgttcacgtctagctatattcttctattggctaatcgggcatgagttgccttgctaaatttcgttcgttcgagtgatatggcgattgttgattggtagattaatgttgaagtcgtttcgagcgtttactgatacgactgaagtcacctcgccagtcagttaagaactgattgtcctaaacaggatgcagagtttgagtttgattgaagtctgattgacaccaagtaccctgaaaacgaaaagtacacttaacctagacgaagggaagcgctcgctgtacatgtactcgtggtttaggtagattttctacctgttcctaacaaatgctcggtgttatccacgtttgttaaaaggccttcgtgctaggtggtagcatgcatatcaggtcaggtgttgacctcaagattccattcagattgtggagatacgcgctccttcgtttttttacattgtcaagtactcaagtacagttgaggatctgtttaaaaaaaaatcttccaaggactatacaggaggatatgtttgatgtcttctgctatgcaagtcaacactgcagtgcttttgctacttgctttggtccttggagggaacaacgcaccatgttaaattaagaaaactcctagtttctttaaagagagaagatgaatataacttggaacaagtctggcttacaggttacaacgcatgtggtaatcagttttagtgaatctgaaattctagaagttgtggagtctgagtttttgtcgcataatttgcaggctgagactttgcttggctacctgcgggagcagcgacaaggggttgcctgcagagctggagcagtggcagctactagcttggctagcgctgtcatggatgatggggctggtgtttcctccccgtgcctttaatacgaactctagtgtacgtatactatcaaaaagatggagctagcacttgtaaac

SEQ ID NO: 22171 - DNA, 621 bp, Zea Mays
cacactgagaggtttcgagtttgctaaagcggttactcttgttgctgagccgttcacattggataatggccttctcaccccaacattcaaggtcaagaggccgcaagccaaagcatactttgcaaaagagatctcagacatgtatgcacggttgctagagacagagttagctaggtcgaagttgtaacttgtgcggtatcaggagaagggccatcaatacagccgtacaggagattggattctgcatttttttattccacctcacgaaataagtagtaaaatctttttactgatacgggaaataacggatcatgccatgctccggagtcgatagtttttttcaccagacggggcagtgcttggcgcatgctgaatatatggttctagttataaagaaatgtttttacagagtgtatattgggtctgaacagctgccctggaaggtagttcacagaaaatatattggtattacaaatgcaatactaaaaaaattgtgtcttccgattgtattgtcagtcttttatcaacactagtggaagtgtacgcgctcggtacacgataaaaatattacatacaaaatgtttataaatacctatataatattaaatttattgatatgtt

SEQ ID NO: 22172 - DNA, 2071 bp, Zea Mays
atggtagcagcagtgagggtcgacgccaggggctggtacaccggtcctggtatggttgtccctggcgtcgtcagccatgcaactggtgatgaagatggcgcaacacaactggaattacctgaggcctttctgagtaagacaccttatataagggaggctcttcttctaccagctttagccaacagaaatgagaaaattattgctggtcttgcctgtttgatgtgtgaagttggccaggcggcacctgctttggttgcagaagggggtagccaagcacttgctctcaccgatggacttttgagatgtgtagcttttaccagtgaagattgggaaattgcagagtcaaccctgcaattttggtgtagtttggcacatttcattcttggtattgatgtgaagtcagccaaaagaaatgtggtacaagagttgtttgtgcctgtgttttcttcgctgctggatgctcttttatttcgtgctcagatggacactgatgagcatggttctgatggagcaccttgtatacctgagagactaacacagttcaggatgaatttggaggagctcctcgttgatatttgtttgcttctgggtgcccctgcatatataaacaggctcttttctggtggatgggacttttcaagccaaacaattccttggaaggaggtagaagttagaatgtatgcactcagcatggttgctgacacgattttacaagatgaaggctcctttgatttttcaatcataatgcattttgtgaacattttgtccagtagaacacctgttgaactgaatggaaatttgtttttggtgtataaatcgttcggtgatgtcgttggctcgtactcaaagtggttatcgtcttctcaatgtaacattaagcccttactcctattttgcgcgtcaggaatttcaaaatccgtatcatcaaatgcttgctccttagcattgcgcaaactttgtgaggatgctccttcattcatccatgaaccacagaaccttgaaattcttttctggattggtgagggcatgaataaagggaacctgcagctagaggatgaggaagagataattagtgcaatcacacatgctttaagttctataagtgaaaaagagttgaagaaaagttcactggccaggttactttgttccagttactctgcagtggaaaagattattgacattgatagagatcaattgctaaggcaaaatccagctgcttatacgcaatcattggatcttgctgtccgtggtctctacaggatgagtgctttgtttcatcatttggcaacatcagtcacatctggtctggtcgatgatgatataattatagttcttcttggaatattctggccacttcttgaaagtcttttccgatcatctcatatggagaatgtgcatttatctgcagctatatgccgttctctttcttctgctatacattcttgcggacaccactttcatattttattacctaaagttatggagtgcttatctgcaaatttcttgctatttcaaaggcacgactgcttcttgaggacagctgccaatgttattgaagagtttggccacaaagaagaatatggggctttatgtgttaggacttttgaaattcttagctctgcatcttcaatatcagctctgaattcttcttatacctgtgatcaagaacctgacctagttgaagcatatacctactttacatctatgtttattcgctgctgtccaaaggaagccattgtggcatctagctccctgattgagttatcatttcaaaaggcagctatatgctctacagcaatgcaccgaggagctgcacttgcagcaatgtcatatatgtcgtgttttcttgagactgcccttgctgctgtgctagaatctcctgagtgcatccctaacgggtcacctggtgtggccctaatccaaatcttggcacgctgtggtgaaggtctattatctaatgtgctttatgctttacttggtgtatcagccttgtcaaggtctgaaccttatctgggttttcaaacttctcttctgacataagctactatattaatgattatgctgggatgag

SEQ ID NO: 22173 - DNA, 892 bp, Zea Mays
atgatgttatcagaccccaaagattgcacgctctgcaagggtagagaaataattattggggagcatgttacaaacatgatgcaaattttctccttaaagttggctaagattgatgtggatggtggccccatagagttgtatggatatatcgctacgcgggatgttctcgagccattgcttaactatattgtcaatgttagcaggaatgatcctatcaccatcgagcagggttccctcatagaaatgactggccctaagcgaggcattgagttgtgtggcgaaattatgcttgaatttgacatgaggattaagaggggcggagaagagaaagacgacccacagctgattgatggtgtagcaatcgtactagacgagatgagcatgcctaggagtacttatgcattcacaaaacggatccacggcgattgtggagcggttgacataacggtatcacgccttgactttgcagttgaggcgacgatacaacttcacgtatctgaagtagagggcagcttcagtttgcgtgcgggctgttttaccagtgggttatgtgaagaaatccagatctttaagggcaccattagtgagccgcgtgccttgaggagatgtgttgttgctgcagtacatgatacttggatggatgtgaagttgaaggttgacgactcagggcattcttatagcagtgatgacaatccggaacattggtgtagcttcaaaacgaccagtcatggatggacctgccaacaggtaaagcttgagtttgcatccatattggtgaaggtgacttggtcatcgacgtgtttcatggaattgttctagagtttaaccaagtctgctgttcttgttcacgcaggagaagagtactgggagaaagattggaactggagttagg

SEQ ID NO: 22174 - DNA, 125 bp, Zea Mays
ccggtgcgcccccggcggcccttgaaaatccggaggaccgaataccgtccacgcccggtcgtactcataaccgcatcaggtctccaaggtaaacagcctctggccaatggaacaatgtaggcaag

SEQ ID NO: 22175 - DNA, 1776 bp, Zea Mays
cttcggtcatttcaactcaaagctttaagcaatgtaaaaggcttggctgccagcgaggccggatcccgcggcttgtgtgcacagcagcctccatgccttcagctggtgatccgagcgccgttgcccggaagaggaaccccacaaaataaaactgccccacccatcagcccatcacccaacccaaccacctcaccagctttttatatacccgcgcaccccggcgccagctacccatgtcagacgacgcgccatcgcgcctccaccaccccgaccctgaccccgaactcgccgtcgcaacaggccaagacgcagcagtagaagcaccaccaccaccaccaccggcacacgaccccggcggcagcgagtgccggttctgcgagatgacgcggcagcaccagccgcagtgcgcgcggcggctgccgaagcgcatcatcctggtgcggcacggcgagagccagggcaacctggacatgtcggcctacaccaccacgcccgactaccgcatcccgctgacggcgctgggcgcggagcaggcgcgcgccgcggggcagcgcatccgcgacgtggtggcgggcagcggcaactggaaggtctacttctacgtgtccccctacgcgcgcacccgcgccacgctgcgcgagatcggccgcgccttcccgcgggaccgcgtcatcggcgcccgcgaggagtgccgcgtccgggagcaggacttcggcaacttccaggtggaggagcgcatgcgcgccgtcaaggagacgcgccagcgcttcggccgcttcttcttccgcttcccagagggcgagtccgccgccgacgtcttcgaccgcgtcgccagcttccttgagtcgctgtggcgggacatcgacatggggcggctggaccaggaccccagctgcgagacgaacctggtgatcgtctcccacggcctcacctcgcgggtgttcctgatgaagtggttcaagtggacggtggcccagttcgagcgcctcaacaacttcgacaactgcgagttcagggtcatgcagctgggccccggcggggagtactccctcctcgtccaccacacccaggaggagctccagcagtggggcatgtcgccggagatgatcgccgaccagcagtggcgcgcctccgccaaccgccgctgctgggccgaggagtgctcctccttcatcgacaccttcttcgaggagccctacggctcgtcggagacctcctcctcggacgaagacgaagcagaggacaaggaggaggagaccaagctgctggagcaactataactggtttcatccacatccaatccacccattcgcctcgtcctttgaaattctctccattggattggatcttataccatgtgggaagagcggagcagtgatgctgcattcagtcatcgctgatccctctcttattcgaaaacagtctgtagcatgttcataatagctattagctagaactagaaatgattcgagggcaatttcagaaaatgctaaagaaacatatgctgtatctcaaggttttagctctgacatgattctgtatgttcctagatataagaacgcatacattctctattcaaaataaaatgctcagaggagataaatttgtctcgatcgctactttcctaaactctaatcctgtgggcgtcgctaccactcggtctgtcgtttattggttattggcactgttgatggacagtacaagtaccatttctcacatgctgggcatcagcagacacttgtccatatgtaaaagcagagaatctttccaattcca

SEQ ID NO: 22176 - DNA, 1111 bp, Zea Mays
ttccccccttttgctatttgggtgaattaagatactgcaagtgatggccgatacccagctgattcctcgggctccacctctagcccttcaattacaaggaggaactcatggccgactaacaggcagccccaaccggatggatcgaacaatgccatcaacagaaaaggcagccctccttccatcgtggctaagaaaaatctgcctccttcacgccgcagcacagaccagttcaagaaatctgaggacagggttgttgttactacggctccagacgcaacgccaattaaaatggtggctgaggaaaagcttctgaaagaaggcaatgttagggagaggcttgaagcgcggcgggtgctgtttcagaagactggtgacaaaggttacaagaaggtggctggtcccaagtcaggatccagagttgttccatacagcggggaaggggatggtgactcggaagagacggctgagactgaggacgcgcccgaagaatttcagtcagctcacaaagatgaggacttgtcgaagatcaggatgcagctcgttcagattgagaatcagcaagccagtttgcttaatcttctccaggttgagttaggtgtgacaggaagtggtccatgtgaagtgagaacaacgagcttcagcaataaggccgggtgtttgaagacgatcccactgttggtgtattttcgaaattttcttttctccaagcttagagctgagatcgtatgtcctatactcctatggggcttttattcatgaattgtcaagggttcagacagcctaaactctaaagcaagacgccaagaccctcgccgctggctcggtaaccatacgatggtttagcagtgagaaaaattgagaatcgacactcattgtccagtcatggatgtaccttgtactgcttgtaaatagtttctatacagtgattcatgtgctcgcaagtcgcaaggtgttgtcccacgaaaattcgttgggtgtgctgagatcattcaagtagggaaaaggttcagagcgcgacaaatgtgtagggtaacggcatgtggctatgcttcaataatctcttttagagttggtttggtgacaaaagaattaaaagggatccattggaaag

SEQ ID NO: 22177 - DNA, 6296 bp, Zea Mays
caggaatttgcgctctctcagaagtaccatgagggactcctcaagttgcaacaaaaagactatgcaaaagctcgtgaacttctcgaggatgttttaaaggacccactaatatcaaatgctgataacattggcagtgatcagcatttgctgcagctaaggtttttgacattgaaaaatcttgcatctgttttccttcaacaaggttttgagttctacgataatgctcttcactgttacctacaagctgtagagcttgattcaaatgattcagttgtctggaatcatctgggaacactttcttgttcaatgggtttgctgagcgtatcaagatgggcatttgagcaagggcttgtatgcagcccaaacaactggaactgcatggagaaattgttggaggtgcttatatcaattcgtgatgaagtcgcatgcctttctgtagcaaatttaatacttaatagttggccatcacatcatcgtgctttacatgtgaagaagaccattgaatgtgctgaaccggtaccttttgcacctcgtggtattgacatacttgaacccaagcatgcaaaactcatcttttcgaataaaagaaaatccgttgatgatgaaatctgtcaagaaatagggacaaagaagagtaaacacagtgctacattgcaattgaatgaagcaaaatggttggcccttttagatggtatcctaagcttaataagtgcaaacaccgagaaggctggtgaatataattgctcaaatactgttgataggtgttcaatcagtgagggtagtgccaaggggcttgcttataacattatagacgttgtcatatctacagatacattgaaaagtgtggaaactgctggtggaaatggaaatgattctcaccatggtgagattctgccatatgattgcaaagctacagttaaagagaaagatggtaattcagatagggaacatccccatgaaagacggagcacacgccttgagaggctgcgaagtcgcaaatctggaaaagatgaaaatggatctgatggtaaagatatatcccatgctatgacccagtttctagaatcatttattctaaaaggaccaagccctgtagaaaaggcttattgttctggaaatgccgatgcttcaaatcctgatactcataactatacatccaacgaggaggcaaatgatcttaagcaatttctatgcaagatatccaagaattttggccctcatcacattggttatatgttacttgaggagatggctcatctcaaagtgccattccaagattattttgtcaagttaattgaactggacaaacttactagaggctgggctgaagacagatctgcatcgtgcaatttatttctagctgaactgtactatgatcgggctttgtgttctggaagtccaccaacatcttctgagctgtctgattcatcttaccatctttgtaagatcattgaatcagtagctctggaactgccattcaacatatctgttagagaaatacattccaccaacttggatacggaaagtagcaggacaggtgaatcttcaagtgaattaatcgagagaagtcatgaaaatggtcacatcaacatgcttaatgaccaaaagtccaaacatgattcttcttcaaacatgaattgtgcattctggattcgcttcttctggctgagtggttgcctgtccctttcatcagactgcaaagagaaagcttataaggagttcaatattgccctgtcaatactaaaaaatagcaacaaaactaaaagctatggagaggtcattcttctacctcacaccaaacttgtaaaatcacttacaactgacaggattcttcgtgaaatcaacttgatcaggcttgaatctctactttggaataatgatgagaatatcaacaaaataactcatacagagttcatgcagttgctacctccacttttgctttccaccaaagatgcctacgttggaaatgcatatggtccacaaagagaaagcgagaatgttatttcacttgagttgtctgccttggatgtcttaatatctgcatgtgaaaaagcaaaaccaatgaacatccaggtatatcttgactcccatcgaagaaaaattcaagttctaactgtggcagccggcatggttggatctgtcacacccctgaaagcgaaaggttcaagcaatgtggaatttgtggaagcaatgaacaggaaccggctagaaaatgttgtggaagcagtcaaagatgtgtctcgaaatgccagtaaagcaaaagacataatcgatcaatgcgataattccgatgggcaagatggctggagcccactaatgtctatcgttggtgatattcaatcattgctcttgacaatcatgtgtgctgctgtcaagataatactatcgagaaaactctcatgctctggaacctcctatcaggttgaccacttggaatgttcctgtctcatagatgcagccattgcattttgcaagctccagcaccttgatcctacaatatccatcaaaactcaggttgacttaattgttgcagtccatgatttgcttgctgagtatgggctctgttgtgctggaagagatggtgaaggggaggaagggatgttcctaaagttcgcaatcaaacatctcatggctctagatgtgaaactaaaatctcaactcaattcaaatgggatggaagaagatgcagttccaaaagacgtcagagcagaagacagtgtggccgatgaaccatcggttagtgacaataagcagaactccgatgatgaggaagaatcggagttagatgagattcagtcatgtcttgatagtgccttggaccaggcttttttctgcctgtatggtttgaagatcaacccagattcttgcagtgaagatgatctcgctgtacataaaaatacaagccgcggtgattatcaaaccaaagaacagtgtgctgatgtgtttcaatatgtcctgccatatgcaaaagctctatctaaaactggcttggttaaattacggagagtgctgcgggctatacgtaaacactttccgcagccaccttatgacttatttgttaacaaccctattgataatttcttggatggacctgactcatgtgaaaaaatactctctgaaatttgtgaaagcaatgaatctagggaagctatcctgaatgtattgttcccaggtgaaagaggctatgaagcattcaaaaaactctccactgccagctctgagccttattcagatgtttatgagaacttatattatttcatagctcaagccgaagatattagtgccaccgacaagcatacaggttttgttttgaaaaaggaaggagaagaattcgttgaacagagtgccaatattttcaagtatgatttgttgtacaatccattgcggtttgaaagctggcagaagctttccaatctttatgatgaggtggaagttgatctgttgctcaatgatggtagtaaacatataagcatcttggattggcgaacaaacacggatttaatcagaagggttgagatgggccgtcgacatagtcgacgctgcctattgatgagttcactactggccaaaactgcccctgagcagagcgaggcacatgaactgttggctcttgtgtactacgatagccttcaaaatgtggtgcctttttatgatcaaagagctactttgccagtgaaggattcatcatgggagacattttgtaaaaattctatgaagcactttgagaaggcttttgaaatcaaggagcagtggcttcatgcgttttaccttgggaaactgtgtgagaaactggggcattctttttctaaggcattatcatactacaacaaagccatgatgctgaatccaactgcagtcgaccctgtttacaggattcatgcatcacgcttgaagttactttacactcaaggcaaacagaatcttgaagctatacaggttgttgctgactacacatataaccagtcaacaaaagaaaatgtcttgagcatgctggggtcaatgactaaggttttgcagtcatcttctgataaaacatctttagacactaaagaggaaaataagttttttgagtccgatatactggataaagtgtggcacatcctttatgatgattgtctgtatgctcttggtacttgtgtggaaggggaactcaagcatttccacaaggcgagatacaagcttgcgcaaggatattatagaagaggtgaagcaggggacctggaacgggctaaggaagagctctcgttctgtttcaaatcttctcggtcttcctttacagtaaacatgtgggagattgatggcactgttagaaaaggaaggaggaaaaatccaaatgtgggtggatccagaaagaatctggaggtcagtttgtcagaaagttcacggaaattcattacgtgcattagaaaatatatgatactctatttaaacctgctggagaagaacacggacctgtggactcttgagaaggcttatacttatctgcgaacagataagaggtttgcattgtgtttaggtgatattgttcctgttggtcttgggaagtatattctagttctaacggcagcaattcataatcctgagattcgtcgagcttctggtgatgcttctgttgagcaattacttgagaaaatgttcactgtattcatggatcatgcgaacatgtgggctgatataagcaatataccagaggtgaacagtccagaattatcagaaagcaatctttacagctatatccaccagtacatccatttgctcgagagtgatgtacgactagatgttctagaaggactaaacgagaagataagaaagcgtttcaagacaccgaagttatcaaatagtaacttcgctaagatatgcaagcatgcttctctggcatggtgccggtgtattctcatcaaactggcctcaatcactccactgcctgaatccgcagatgcaaccaatcagcctgcaccattatccaatgggcttctactctatgttgacttgcaacctgatgagcttcttatctcatcccctgatgggcctgctcaattcaaagggcttgacatgaactggtttgagacacttaacagaattaaaaacatcccggtcaagcaaacatccgaagataacttggagactgctgttacgttaatgaagagcacttataacttttatcgggagagcccttgtggaacatttccttcaggtatcaatctctacacggttacaccatcacaagctcctattgaagggctaccgccaaccgctgctgtagttgagacgctcgacttaagtattccaagaaaactccttctgtgggtatacactctggttcatggtcgttactcaaatatatcctccgttgtaaagtattgcgacgagatgaagttaagaagtaaaagaggaaccccagctgcgtctgcttcgtcacaagttgtgcagccagtgtcgcatagtaccgtttcttcccaagttgtatctaaagaaaagagctcccaagttgaacccgctgaagcagcacaaaatccttctgatctagctgccacttgcgttcctgcataccaagaagttggtggtgctagtgcctcgcaaagtgccattgaggcccagaaagctactgctgcggcatctcagctcactcgcagtggttcatcaagggcaatggaaaatgcacaggacggcggggagaggaagtaacgagatagagttcgattttttttatcctctatgctacatcgtatggatgcatatgatcctgcctgacgattctcaggtctcagctctccgtggctccgtgtgcaaatctctgccacgggcgtgttttaacgcctgattggatggttgcccgctggcgcgcccggccagcctcgtacggccacttcggacgcatctgcatcttcggaggtacccgcagatgtagatgaatggccgtaaaatggtttggtctgcgtctctttacatataaccaaataaaaactcagataaagttaactcatgtggtggtctatgttgagatgatgcgggtaaccaatcgaacggttaacaaattcaggtcgtatgtatatcctggtttacagttagtgtttcctaagtgcatttgtagattatagagctgtcaagattgaacgatacatctgtaaggtgttacaaatgctaaatgctaatcctgattttgtggctgatgctaaaaacctgtggactcttaattaccacagactgaactttccctcattttggcccaacaaatacaatagcagaggaagagtttcagttggatttggtggaacggtaggagcgtaaaatatcac

SEQ ID NO: 22178 - DNA, 2433 bp, Zea Mays
accaacataacaaatatatcaaacccaacataattttatcacaggttcaacaatattcaatattaaatggcaatatcatgccttcaaatcacacaaaacatagcattgattctacaaaactatggacaaaacgtagcattcattttatatgagacatataaatctggacccacatgtcatatattagcgggttccccatcgggtagcgggtatggggcaaaagagaacatactcacgcccaccatacccgatgggcataacaaatgacccaataaaatacctatgggtatcaaaatccgccatacccgtgccctaatagggtttttacccatcgggtttcgggtttcgggtacccattgccatccctgggtgggagagtaaactatggatctaaatgggccggcttacatgcagcacgagaagtgggctgaaagccgcgaaacagaaaagggcccacgactcgtctgctgaagtataaaagttaggggccgaaaatatagccgttgagcgcacacctgccattcgccgtgcggtactccgggccctcccagttttccccctctcccttccagtaccggcgccgctggccgactcccgtggcgacaacctgagaccggagcgccataatcctccggattcgagacaccgagcgcaccgcgaactttatctgctgtgtttggagctgaaaatgagtgaggcgaatactactcagcttgaccttgagaaaggattttctcaagtgtctaatgataatgattcgagtagccctgcgaccatgcacaagatgaaagttgagacagaagatggtggaagtgagattgaatcacccactccagaaaaacgtgaatctagaagcaaaggggtcgttgtgagttcactggcaaggaatttgcttgcagagaggtacagagacagattttcaaatcagctggtggaagatgagggtcagacagatgatgaagactataatggaagtgtttcgcctagtagtagccaatcacttttttcagaaagcattgaactgcttgataaacacaaggatttgctgagtcttttcaatagaatggagagttctattagattgcttcacctgcgtaagaagatggctacatttaataatattgccacccaggtggagattctcacaaaaaggaagttattatacagtcatttggcccagatgaagcatttattcccagaagcaatccagataaagaggatactagtacatgatgagaagagcctatgcatgtatgctgatatggaaatcacacttttaatggatgttgtggaatgcacaagtcctgatcagtctccatccatgacaatttgtgaggctttttactcaaagctattgagttttttggatgctcatcataagggtgcagacattcctgaggcaatcctaccggaactctttaattcaaagccaagggagaagttatatcttgaggcagtacacaatggatatgctgctgagtcacctctgcagggtgccactgaggagagattcttaaatgcttcccactttccacaatcttttcgaaaactcatgtcgcagaaaatcattgctgatggaattcaaaagactcaattgctgtctgatccagcagatttgagttctgtgattgcttatggtacaaaagggtcaaacggaaaccctaaaaaggaagatgaacatgctccagttccagggaagtatgaaatttctgctactccaagccgccatttgatctcttgttgtcaagagggtacgccaaaacaagggacctcagagtcaccattgttctctggaacacctgtaatgcagacaccaaaaaggcaattgccgacttcacttgacaaacccaaggccacatgtggacacattagtgaaccatgttcagccagttctgcccgcagatcactaaatacattgttaaagtttgaagtaggaagcccttattatgatggagtggaacatacggatacaactaaaaagggcatgatctcagaagactcatcgaattttaacaagtcatttgaggaagatagtcctgtcttatttattgataaagacaaaatcgacgaagtagactcagtggatagccaggaaaagatagcttcgctacataccacatttgacatagtctgcgacatttctcatcctaccaagaattcacttatcacgaaacaggaacttttccataatattcttgccaacaacttggagatagaagaaattggggagatagaagagcagctgaatattttagaggatctggctcctgatttgatatcaaagaagatgataaatggaggagaaatactttatagcatccaacctatatcagatcaaaattcagttcgggttaggcttgtagaacctgtatgagatagctacggttggttcaaagctgaagaaattatttatataccaggtgatgtccacca

SEQ ID NO: 22179 - DNA, 176 bp, Zea Mays
tgggcgccgggcgtgggagtccaacagcaaacggcggcgcgcgtgttgttgtctcctccatgcagcgacgacagcacggcaacctccatgcagctacgacggcatggcaacgagcattatatggctgttgtgcagggagtggaggggtaagagaatggatggccgggctgcagttt

SEQ ID NO: 22180 - DNA, 922 bp, Zea Mays
gtgagtggtgtctcaatattaggagctgatgcaaagggataagcagttgtgatcctgtcctcttggtcggatgcggggttactatgacatcgatgacatcctcatggaggatgagcctatttcagttgttttccaagtaactgcaaatggtgttggcctgctagatcctggtgctgaaaataactgtgtagagaagggtgccaaggtggaccttccattttggcttgcgcatgggctgctgtctctggaacaagctgtctcaataaacccgcctccatgcttcacacagaaaactcggaaggagatacaagctgatgcgtcctgtgtggatttgagggctcgttgcccatacttctatgagctaggatgcaagattgttcctttggtgagtgacaagagcattggcctgttcttgcgatatgcattcaccagtaggtacaaagaggttctaagcaagtcccacagttcttccatgatgacagtgcccaagtttgttccacgccttacaaaagaagaaactcgagtgtttgaatctgccagagaatcgatggctggtttcaagaaatggcgagtaggtggggtgagactacaaaaggcttccattcttggccggaagaggaagacaaagctgcctgatggaccacctacttcttgaatgagttttaaagtctccatggaaaagagtggttgatggttgaggtgatgtgcgatgttttgatttgctagctctctgagcaaagagaaaagttaatggcaaatctggatgtactatatgatctgctgtacattgtgcacttttgtatagtcggacgacagcactgatcggtccatccattgcaaggaaaatgaacacccgaaccatgatatcatgttcccattttcatattgctaaaaagtatctcttaaacttgtttttagtaaa

SEQ ID NO: 22181 - DNA, 843 bp, Zea Mays
gtgagtttttcctaattatgttcttttggtctattggcatttggacgtcaatttaacaaaagggtagtacttacattcagatggagtagaacgtggtatttgcaacttattgaattcttcagttgcacttagactctcatcagcgggagtttttgtatccccacttaccgtatattaatcattgacaaacaatctcgcgggattttacctccttgctaaagattttacctccttgctaaagtggaagaggctgctgacaaaactatctacaattggactcatcagattgttagtggtcatactcttaagcatctatgtgctgcgatggtaccggttttcctggctctcatgctagctaaaaggactaccgaaccagaaaggataagcttgctccagaagtggaagaccagttgggttgcggtgagagagaggcgtttcaaagatagcagtacagttgatgtggattgcggctacgctgttgtttcaagtatatctgaacagtaaattgtcatgcatctaattaacatgcacgttgtttcaagtattagcatgcatgctgcgcatgtgtatgagagaagatccctgtgaagtattaagaaaccaacctacctagttgagtttgctggtcggagttagctgtgcctgtgggtgacatatcttgtacatagcagaaagcaatacaagtaacggaagcatgtattacaagatttgcgtatatcatttcaatttttttccttgaagagactgatgcgtgccttaaaagtagatgggatattttgatttctagttgatccaacaaattcagcataacattggctgttgcaaattcatgcaataaatgca

SEQ ID NO: 22182 - DNA, 1501 bp, Zea Mays
gttttttttttgttgttgaagggaagatctggtgcagcggcgagagctatctcattgagtcatcaagtcgtgggtgccaagcagtttctctgcatttgtgggggaaggaggattgtcacggtttatccctttcccagaccccactcatgtgggagcctccaacattggtcctgcttgagcttaattgagattagtttctcaccgcaagagaactgcaactagtaagttcatatatgacattcaaaaaattcagcatctgtccatctgatcacttgggaactaactaagtcagctgtagtttcgatttttagtatctgaagtcactgggctgctaggaagccaggatcagttcctggagtggaatagtcaaagtatggagcatgccacaaataactaaggttgcaaccttgaaaggtcacacagaacgtgcaactgatgttgtcttctctcctgctgatgactgcttagcaacagcttcagctgatagaactgcaaaattatggaaaccagatgggtcacttttgatgtcttttgatggccaccttgatcgtcttgctcgccttgcttttcatccatctggaaagtaccttggtacagctagctttgacaagacttggagattgtgggacatcaatactggcaaggaactgctactccaagaggggcacagcagaagtgtatatggagttagctttcaccctgatggttctttggcagcatcttgtggtcttgatgcatatgctcgagtatgggatctgagatctggaagattgttctttacactcaagggccatgtgaaacctgtcctaggagtcagcttctctcctaatggttatctggttgcaactggaagtgaagacaatttctgtcggatatgggatttgaggaaaaggcaaatgttgtattctattccagctcataagagtattatttcacatgtgaaatttgaaccccaagaagggtattatttagcgacttcttcctatgacaccaaagcagccctgtggtcagctcgtgattacaaaccaatcaaaagtttggtgggccatgagtcgaaggttactagtttggatattagtggagatggacagaagattgtgactgtgtcgcttgatcgtacgataaaaatttggtcatgcagaagtagcacacaagataatgagatggaactggattgagacaattgggttcattgttgccagccccgcttctctattcatcagctagaagtagatattctccctttttgctgatcagacattccaatcagtcattggtgctattgcacggaactatttcatagcatgtataaacccttggcttgagaaatatgttctgcacttactttgctgatattccttgtcatatactagggctagtttggctaccccattttttaagggattttcatttttctaacgacccgtttggatcattagaatttaacaatagtaattttggcatatattaattaagctaattcagttttatacaaaatata

SEQ ID NO: 22183 - DNA, 2275 bp, Zea Mays
cagacagatggccctgtagataacgctgcaggacttgaacgttatgtggactcactaatgaaaaggacggatattgagttcaatgtagtagtaacccaaatgaatgggaaggattactcgtcgaattctgttcatgtatttcacattggaaagctgagaataaaacttcgaaaaggatggtccacaaaagcaagagagtcgtattccactacgatgaagttatgcgggagccgtggtggtggtaatgctgcagctagggcagttttctggcaccctaggaaaggctcgtcctacactctagccttcgaaacagacagggacaggaatgctgcgattatgattgctcgcaagttcgcttcgaattgcaatatcgctctcgctggcccaggcgaccaagtccatgtcaacatcatcggatccgcggtggctgcgcacgccggcggggaagaggagtcgcgggcggcgcgcctccagtcttttttcgcctccgtgctctccgggctcttcggccaggccgaggccgaggacgaggacgaggacgaagagatgcccacgcgcaaccacaacgctgccgcggctgccgctccgcagcatcaccatcacaaccgaggtggtgctcccgctcttggaaagagcaaggccgtgcccggccgagctgatgccatgaaccggcgagcccccctcggcgatattggcaacctcgtcagcgtccgcccagccgaagggaaacctcagctgcaggagcagatcaatcgccccatcacgcgaagcttcggcgctcagctcgtgaagaacgtgcaggcgaatgccgcaatcaaggtgcgcagagcaatcatgctccttcccttctctaccagtcttcctaaaagtagtaatgccgcaatcctacccgcgaggcatgcgccgaggcaggaaaggaaggctcctgccaagcagccgcctcctgaggatgtcatagtactcagctccgactctgaacagagcaggacgcagttggagagcagcgctagctccgtccggtcgaggaagaaggtcatcaacaccctttcttctgtgctctcggctcgctcaaaggctgcctgtggaatcactgataagagacggcaagtagcagtgatcgaagacatcgacaagttggacgtcaacaatgagctcgcagttgtggaatacattgaggacatctacacgttctacaagattgctcagcatgacagacggccatgtgattatatagacacccaagtcgagatcaaccctaagatgagggctatcctggctggttggataattgaagtacaccacaagttcgagctgatgccggaaactctctacttgaccatgtacatcatcgatcagtacctctcgctgcaaccagtcctgcgaagggagctgcagctggtcggtgtttcagctatgctgatcgcctgcaagtacgaggagatttgggccccagaggtgaacgatttcattcttatatcagacagtgcatacagcagggagcagatcctttcgatggagaagggaatcctgaatagcctggagtggaacctcactgtccctacagtatacatgttccttgttcgttttctgaaggcggcagccttgggcaacaaagttgagaaagagatggagaatatggtcttcttcttcgctgaactggcgctgatgcagtacggcttggtgacgcggctgccttcgctggtcgctgcttcggttgtctacgcagccaggctcactctcaagagggctcccctctggaccgacaccctcaagcaccacacgggcttcagagagtcagagacagagctaatcgagtgcacgaagttgctggtcagcgcacactcgtccgccgctgacagcaagctgaggtctgtatacaagaagtattccagtgagcagttcggaggtgtcgcgcttcgcccacccgcagccgcagtggagatcaagtaaacgaagataacttcgtgctagtgtttgttagtataatgtaatggaaggcgagcctgacattcgctagggtctatccgtctatgtttgcttgtcggggtagtcaagaaagtttgaatgcttgaggcagccgtttgtttggtaggctgttctcagagtccaggtgttatctgacttgtgatggcatgttgtgtttcatgtgatggatatcattagaatcctaatctagtacgatatctattcatgaatataaatggtatttattcatttgttcataaatctgaattgaaaatggccctacacttttgaaaactaaaatagaataaaa

SEQ ID NO: 22184 - DNA, 2541 bp, Zea Mays
gctgtcaatcgcctccccactgcggcagatccgcaatccgctcctccaccaccgcgctcctcacccacgccagggacaagactgtctacctccacgcccgcctcaccaactccgcggccaccgccaccgccacgcccctcccccatggtcgtcgagtccgagtggtggaaccagcgacgcatgcgcgtcgagggcgacgtgaaataggtgctccaccgcgggcacaacgggcacagtggaggtggaacgagcaccatcgagttctggttccaccgaatccaccgctcgcacaccggatccatcgctcccacatgcccgcacaccggatccaccgctccctcccccgcgatggcctggttccaccgagacaactgcggggctagggtttggattcgtgggtggagcccaaggctagatccagcagggggagggaggtagaggaggggagggaactgctggtggtcggcagtgggcgaaggcgcgacaatccaggatatggattcctgagcgtcacccacccgcccatccacgtcgcgcggtgtagtcatcccctatccgcagccgcctcgctccctctcccacaacaaatccattctcctcctcccactcgacgaggatcgcgaggatgctggaggacgtcgtcgctgtcacgcttgacgttagggcctccgatgcttgacgttagggcctctcgcttgaagaggaacacaaacagagctcatgttttttattttgctctgcattatctactgcttctctgtgggggcgttatttacagtatgtggcctgtttgttgtgttgttcctgcggaagggcgggcgggccgaaggtgtttaagaaaatgttgttgtcaacatcaacctcctggaagggccagaacgcaggcagcgcctcaactcgtcaccccatcagcacggatgattatcacgagtacttcaagcgctcattttaggaagacatcgctgcgcaagtgcctcaaggagtggaatgtaccggtttttggttgatggtgtctggaggtgtgatgagacaaaaccctttgtacgtgatgaatatggactgatcagcaatgaagtgcttgtggaaaacaatgtactacccgttgtgcagccagagccttctatcagaggaactaatatggataagggtaccattttgaaaacaatgcccctggagccatcatctcagaacccaagcatgcaaatagcagttatccgccatgtggtctctggaatattattacacaataccatatatgacgttgttcccctttctagcaagggtcttgctctggttcctttttgggatgaccgtcagggaaccataacaggcatgctcactgcatcagattttgttttaatcttgagaaagttgcagagaaacattcaagttattggcaacgaagagcccatttctgcttggaaagaagcaaagctacagttctatggtgggcctgatggtgctgtcatgcagagaacgccattaatccatacaggcaacattgatctcagggccaagaaagaagctcaactcggcatgcttcctgtttgaagcaagggcaacaaacttaccccaccagatctctgtcgccaaagcagggctagtgaataagctgtgtttcctcccggattgtcactgcttttatatttgtgcatttattttgagggaaacattttgcccaaaaaaggcctgcagtgcacgttttaaacaagtcatttgaaccaactcttatgctgaaaactgtatgtgatactgcagaaggcaacacactagcttgataggaaagttggttggcaagcataggtggactctggtgccttcatatatctatatatatattttaagttgacgatcttcgtgatgctgaaactgatgaagacctccgatgaaaaaagagacatgctgcacatgcacgagggtacttgcagatcgatgtcggctctatggacgaacactcgaccaagtcagatgaggagtatgagggcctagccatgcgcgacgtgatggctactggtccgacgatgagcagcaagctgtgagttaaagatgaactcacctgccctggagagtaacatccataggagtgaggcaaaatggctggtaccaccacaacatggacccgttcctgaagatgtccaaggaggtggtagccgacaccataatgtcttgtgtcattgtgtcaccggtcggcaacacactgcgctggtaccggcgggtgttgtgtttcttaggcgtctgcttctgtgctttgagttgtgctatagagtggttgtgccaactactgattttaaaagaaaaaggtgagctgagaatcattgttgaaaacaaacatgtaattgttcgttctcatcagttgtgccaactaccaagcatttcattgatcagaatttatcgttgctcatgagaaccaaaagtaagacacttctcaataacattggatgcaaatttctgctagcttatcttcactatcttttctcgtatcaatataacacacatttatacataatttttgtgttattatatgttttcgttgcaacgcac

SEQ ID NO: 22185 - DNA, 1679 bp, Zea Mays
acagaccgggcccacccactccacttgcactagcagcaggtacaccaatcgcttcgtccccgcgtctcgccgcgtaggcgccacagaaactcgcacgccgctccccgccgtccggcccgagtcgccgtcgccgccgaatccaatccatggctccgcccgccgcactgcaccaccgcacgcccctcctcctcccccgccgcaccgtcgccttgggtgccaccgccaccgcgcgcgccgccagggccgcttctctcgccgtcagggcccagccggacaccaccgccgcagccgtctccaccaccgcgcctgagccgacgcccgagttcaagcctccgccggggttcaaggcgcccgagcccaagaggttcgaggtcaagtccggccagctgggcagcgtcctcggcgcctcgctcgccatccccctccgcctcggcaccggcgtcttcgtcctcgggtactcgccatctcttgtttctgcatcagagataccatcagaccagtatgcactggaattcggagcttggaaggtgaaagaggaatcaaaaataggacagtgcaaacgaccagaaaagcctatcgagatatatgaatttgaaggagagatggtaacagtcttggacctagatgtattattttacccctgtcctaaaaaaggcccaacattccgacctaaagtcctcgaaatgggtggaaagaaacaattcccttacatggtggatccaaacacaggggtcgccatgtatgaatccgatgacatcataaaatatctagctgatacatatggtgtgtattcaacacatctccttttcacttttgctcttaaaggttgatcctccctatttgtgggggaaaaggcttgtctcggtttaaccctgagaccccattcatgtgggagcctcactggatttgtgtgtgaaaaggatcgtatcgttttatccccttcctagaccccatttttggcactgggtatgccctcttaaagtttcttcctataagtgaccttactgacctcactcacttatgcttgtttttcttaggcgatggaactgttccaattatgctatcacttggtctgttgacagcaattacagcagggcttgctactcttggtcgtattggaaagggaaattcctacattgcttcaaaagtcccaccgcagcccatagagatatgggcatatgagggatctcccttctgtaaattagtacgagagacgcttgtcgagttggaattaccacatctgctacacagctgcgcacgtggcagccccaaacgacaagaatttttcaagaaaaaggggcttttccaggcgccgtacatcgaagatcctaacacgggagtccagatgtttgaaagcgctgaaatcatagactacctgaaggcaacatatgccctgtacccaagctcgtagtgatgtatcagaaatggtgattgtaatgttgcgtgtagattcagttatttccggtaataaaaggaaaagaaatagtgggccacgcattctgtatgatgcacagccgattttgtctacgcaggtctaaactttgaagctacttcaaattcctgtttttcctagtgtttggttccagatcctagttggacacagcgactatgttctagttactggggatagaacggctccgatttgtgtttaatagttagaatggaaccgctttgttttt

SEQ ID NO: 22186 - DNA, 1074 bp, Zea Mays
gacgactgaccgactcgctaaaaaagatgctaataatatcgtggattcaagctatggtttctctgtggttgattctaactcattggagttccttttcaacaatgcacctgaggccgccaaatggctgaaggataactctgagttgtcctttgaagaaaaatatcggtctgatagaagctcatggttggctttgtatcctgtcccattcttgttctctggaagtttaaaattccaggcacaaactgaagagattaaaaagtactaccagcatttccctcagttagctgttcaggagatctgggataacaatggacagcgaagggtgcatctcaaacttgcacttggttccttatcagaaatttggacctctgtgctcaatattactgggccactatcaaattggtccttcgctgataacatgctcccagctcctcaaactgtaagtggtgggccaccatcatatatttgtcgactcagtggaaagagcgatgtggattggtctttctggttggaggcaaactcttctgaaagtctgagagtcgatgtcgcagtacttgatcagtaccttgttgatagtacaaagaaactcaagagcctcttcccaagttgggcagacttgacagccttcacaacatttttctcaacgtatcatttatgaggaggtcaagtatttgatgttcaacaagtgtaaatcattttctctttgtagccctacgtttcggggctatatgtggttttgtcaccatgatcagctggacctgagccccgaggctggtgtttgtaaaatctttgtaagcgtgccttgatgtattcatgaatcacacaagattgtaagaatctcaagtcagtcataaattttttaccacttagtcattcacgattgacggtatggcatcactgatcattcgtgttctaagtttaaaaattctaaaaagaaatgttgcatcgacatagaagtactgcgtttcattttgtaatcgataccacctgaggtgaaaggttagattttttatctacagttcgcaatcccacttgaaaaaggaacacattatgcaggttcaaggttttggagtg

SEQ ID NO: 22187 - DNA, 2572 bp, Zea Mays
gaatcactgacggagattactaatggaggacatggagatggatggtgcatttgagcaggttgctgtggagctggtggcacaaggagttattgggaagagggtggatgagatggagtcaggttttcttatggcacttgattacatgatacaacttgcacagaaggacacagatgatgagcgtaagtctattcttgaggtaattaagcagacagtgctagaccatctgacgaagaaatgtcctccacatgtccaggttgttgggctactttgccagactgaaaagaaagagagcagacatgaattgttgcgccgcgtagctgctggtggaggtgtttttaagaacgataaaggtcttaagtgccaaattcctggggcaaatcttaatgacattgcaaatcaggcagatgatctagtagagtcaatggaatctagggacaccattcctgatcgaaaacttcttgcaagattagttatagtaagagaagaagctcggaatatgatgggaggtggcctgttagatgagagaaatgatcgtggtttgactaccctccctgaggcagaggtaaactttttgagcaagctcgttgctcttaaacctgggaaggcattggaaaggatgataaagaatgttatgaatggcagaggggaaggtgctgataacgttgaacaaccaagtgctgattcacattctgaacaggagagtctaacaggagtattaggaaggggaagtgtatctggccacaagccacggccagtccgccctggaatgttccttgagactgtttccaaggtcctgggtggcgtatatgcaagtaacacatctggtattacagctcaacatctggaatgggtacatcagacaacactcaaaattcttcaggaaatggccttctagcattgttatcagggttcactgatatagtttgtaacataagaagtataatgctgcacatccgtagctattgaagagcctttttaagtggtcacatatctttttgttgagaagtggagtggaagaaacgataatgggttatctaaagccatagatcactcaggggaagaatgttgccacgttgtgcagtccagaagtaacttacaggcttggaattgatatgaccatgtggttgcccttgccaattgactaattttaagtactagactcagtaacatatttgaggcgtaatatcattattattgacattagtcttgttccttggcaatctgtcttatcttttcgcacatttttctggacttgtgattctttattcgtcatgggtgatatatggttagaagaagctacaattaacagtggtatattggaatacgatataatgtggctacatgaatataacctcaggtcttttctccagtcggcaacaggcaaataatgggggaaatatgtgtgtgggaggggctggagagaccacatcttctgtacaaacatagaaactaattcaggataatgcacttgtgtaactcaaggttttgtaacttggcatatttacggttcacacatatatacacacacgaaaaagttgggatgcacaagcagtttggaagaattcttattacttctagttaaaagccactgggaattggagctccctccgcgcttcgcgctcgcacgctatccgcccagccgacgcgtggcccgcgctcccggcttctctcacagtacaccactgtccactgctttagtttttttctctccgctgcactagaacattctctctcttgtaaacttcatagttcctacttccgagcgagtagctaacacagccgccgagtagcttcaagtcattcaccgtggaggaccgcccgggggagcagtgggtgcgcctccacgccagcgcgggagggggaggcgaggaggtgaaggtcgaggccaccatgttcgacggcgctgcggagcgtgtcccggacgacgcgcccctcttccgccgcgtcgagtcgctcgagcgcgggccccgcctccacctcagcctcatcgtcgaggtcgcccggggcgaccgcgtcctcggcttcgtctgctccgcctggcccgacgacctcgccgtccgccacgtgctcacgttcgcagctagcggcggcagcagtggtggtggtcgtcgtggtgggcgcgatttcgagaaactatggggcgaggagagggaagcagtgacgaagttcttgaaggagaggcattgaatcaattcttggttgtgtaatgttgttttagaaaaaaaaatgggtttcttaccagttccacaagtcgttgaaaaaataatttaactgtttactacatggtgaacccacaatcaatctttttttcctgaaatgacttcaaagtttctaaaaatactaaaaaaagtgctagctacaggtcatatagagcaacatcttccatcttatggagcataatcagtttcactaatatacggccaaccatactatggcaatttatttccacatctgttagaccaagagagtcatcttctccaatgactgaaatgagatgagggagagaaaaattccagttcttgtcgggattacaatattatttgttgttcatgtatctggattttactggtgt

SEQ ID NO: 22188 - DNA, 761 bp, Zea Mays
gtgacagggacagctaacttcaaaattgttgatcttgtacggaaagctatgccccttgcactgacacctgagaatgatgtggggaaggaggagctcaagcagctccaggtgcagctggaagacatcaacaagctggcacacaagcaggtccggcgcatcctctggtctggtctgggtttcttgatcacccaggtgggcctcttcttcaggctcacgttctgggagttctcgtgggacgtgatggagcccatcacgttcttcacgaccacgacaggcctgatcgtgggatacgcatacttcctcatcacgtcaagggacccaacctaccgagacttcatggaaaggatgttcgaatctcggcagaggaagctgatcgagaggcagaacttcaacctggacaagtaccttgagctccagaggcgctgcaaggaccccctggagaaggcgtgcggcacgaccaacactgacatggctcatctccatgagctatccattcacaaatgacaaacaatttcaccattgcttcgttactaattttattctatgggggaaatgatccctagtagaaaaagtaaccggtgtttcttgcacttgtgagataccttttccacggtcttctctgcaaatgtgtaggtcagtataatcctttttttagcgatgttgtagcacaagcacctgatagttgaaaaggcaagctcatctgcatggccggaagcttactcactaccccttcccagaactgagtagttctgctgtctcta

SEQ ID NO: 22189 - DNA, 820 bp, Zea Mays
cgcagacgcaggcgctgacagttccacgccccgtcgccttcggcccttcgctgtcgccttgactcggaatagaacgcactcgtactgggttggaacctttggttattgctgcaattcctactatgaagtacaattgtgaggctttcaactctaaagacgatgtccagtgctcaatatgtttaggcgaatacagggagaaagagatactacgaatcataccaacatgccgccacagctttcaccttgcctgcttagatttatggttggaaaagcagacgacttgcccaatatgccgggtctcactggaagagctgcaggctgccatgccatcggtatgtagcatccagcaactcccgcccgagcccgaccccgaccccgacccagagaattctgataacccagcacctcagtgtttccaacctgctcgtcaacatcccagagatcaaaataatagccaggagacgcacgaatcagtagaagtgattattgaaattcgacgatgaatagaaacattgacatgaatgtagaaagctaagcgacggaggcaaatatggaacatttcctgcaaccaagcaccggcgttttctttagggctactgctaatcaattagtcatgtcgcccgcagcattgtctcggtatcatgacgtttcatctcccaattcctttgtagaggaaaaagaaaagtttatgtacgattcacgtagtaggtcatcatgttatattattgagaatctgaggcctttgagatcattttgatgttgtaaatatacattgtatcaatattgaataacataaagggtcagagctgcacaaatatct

SEQ ID NO: 22190 - DNA, 3399 bp, Zea Mays
atggagaaaagcaagttgaaaaaggttagagaatacagacttggaaaatgctatcataacaaaacgggagaggagtttgtggcgcactcgtccaatgttaactgcctcaagattgggaggaagacctcgcgggttcttgtcacaggaggagaggaccataaggtcaatctttgggctattgggaagcccaattcaatactgagcttatcaggtcacacaagtgctgtggagtcggttggttttgattccacggaagtgtttgtggctgcaggagcagccagtggaacaataaagctatgggatttggaggaggcaaagattgtccgcactcttactggacatagatcaaactgcatgtcagttgattttcatccgtttggggaattctttgcctctgggtcactggacactaatctgaagatatgggatataagaaggaagaattgcatccatacatacaaaggtcacacacgaggggtgaacactattagatttacacccgatgggcggtgggttgtgtctggtggcgaagataatatagtaaagctctgggatctgacagctggaaagttattacatgaattcaagtgtcatgagggtcagatccagtgcatagatttccacccccacgagttccttctggcaacaggttcagctgataaaactgtcaaattctgggatttggagacatttgaattgattggatctacaggacctgagacaacaggtgtccgatccatgacattcaatcctgatggaagatctttgttatgtgggctgcacgaaagcttaaaggttttctcttgggagccaataagatgccatgatactgtggacgtgggatggtctagacttgccgatttgaatgtccatgagggaaaacttcttggttgttctttcaatcaaagttgtgttggaatatgggttgttgatctgacgcgtcttgagccatatacaatgggtacttcaacaaaagtaaatggtcattctgaattgaagactgtttctagcggcactttgcctttacaaaatgatagtggttcaagggctaacatagggcgatcatcagtcttgcaaaatacagagaacaaccttaaaactacttcaggaagactgtcggcttcacagaactcagattctgcacccaaagaaactaactcggcaccttcaagcgggttgatcccaagcacaccacatagggctggagttggctcccataatagatctgttggaaattcagcttttcaatctggtggtaccaccttgaagagaagttcgttgaggaataacagtgcctctaatgttcacaatttcagtaaagctgatgtagtgcctgtcattgttcccagaactagctcaggaggggagttggctactgattctagaagcgatgctgctgatgtggcacccgttcttccgaaggtaaccagaagggttgaacctgctaccgattctagaaaagaaagtaatgatgtggaacttgttgttcctagagcaagctcaagaatggaaatagccgatttagcacccatttctagttccaagtcaggcagaaggttggagtctgcccctgattcgaaagaagaaagtgctgatacagcacctgttgttgtttccaatcccagggctaatgtaagaatggaaatagtctctgattctgcgcccgctctttcaaagtcaaacagaaagctagattctggcactaactcaaagaaagaaagtgctgatgcagtcattgtacccagaacaaattctagaatggaaatgatttctgattctaggagagaaccctctgctggaagaatatcaccattcagaatccagtcaagatatgctgagccacggaagctagcccatgccagaactgattcaaacaaagttgatagcagaagtaaaattactgaaacagaagacttcaattgccaaatatttcttccccgtagaaacagtgtttttcaaacaataagttctgaagaacctcgtgaagatgtaaagtgtggtccagttgacagggtgggattttcaaattcatcagaaccaaatgcgagtgtccgcaatgagaattatgttcctagaatgcgcaaaccaggagacaactgctatatcgaagtttcaagagcaggaagagcaaggtcaagtgtctctaattgggaagggagggatcagccccctagtcatgaagaaccaacaacaagcagttctacactggctcctaccggccatccatattcatctagaggaagcaatcaagcttctgaagctccaatcatagctagtgatgaagatgttctatctcttatcatggagcgacatgatctatttttaagctcaactaagtctcggctgatgaaattgcagattattcatcaaatgtgggaaagaaatgacatcaggggtgtgctctctgcgatggacaggatgggtgatcatgctgtctgtgctgatatggctagcgttctcatggagaaaagtgaaacaatcacactagatttatgtacctctatcctgcctgtcgtcaccgatcttctggagagcaaaattgacagacacttagtcgtcgcattggaattgttggtgaagcttgtaaggacttttggtccaatgatacattcaacagtatcgtcaggtccttgtgttggtgtagaccttgaggcagagcaaaggagggagcgctgcaacttatgcttcatcgaattggagaaggccaaaaataagcttccatctctaacaagaagaaaaggggcggttgcaaatgctgcacaagaacttgctcttgtcttccaggaaatcatgagttgactgacgacacactagatatacacaattagatgggacatgcttcggcctctgatggcaacaagattggatatcagctgccatggagggtgctagctattcagtcttagcgacgtcatcaagctccaaggccacagcaccaacaaatgcattttgttgctgctgttcgtgccttttgtacacatgctaacacataatccatgtcatttgtgaagagaagctgccatggacagtgacttcatccacaatattatgtggatggcggcagctggagatgttaggccccgatcgaatggtgatcagcagatgagacttgcttgggcttttctggcactcgtagttctttgctgtctgtaacatctttctcatgtaccgttatcatgtgcatgtgcaacagtcaagtggttgcatttggtagtttatggttgtgctgtgtgttggtcgatttagtggtcgttgatgagtgaagcgagccatgtacatcatttttttttaagatttgatatcttctttttccttgatgactcctctcgttatacttgagtgaaaatgatatcttgtgtacttgccttgacagcttttcggaaattcccttttgtctgg

SEQ ID NO: 22191 - DNA, 1134 bp, Zea Mays
ccccttctaggtgctagagcatgtcggccagcgattgattggtgcagtaaatggagttctggtagtcggcatcctagcatccttcacttctcttgttgtagtggcaagtggaaacctacagtggagttctcttcttgaagcgaattttgctgctgctccacaaagtataccaataattgctctttcatttgtataccagaatgtggttcctgttctctgtacaaatttggagggagacctgtcaaaagtacgaacagctattgtggcgggtactgccatacccctggctctgttcctagtatgggatggagtaatcttggggacacttccagaccttgcagggagcagcactgtttctgaccccttggaactacttagatcgagtaatgggatagtggggcctattgttgaggcgttctcatttctcgctatagccacatcatacattggatttgttctaggaatctcggacttccttgcagacttgcttaaactaccaagtggccagaacaaaccgctgccatacgtattgactctgtttcctccacttgttctgtcactgcttgacccggagatatttttcaaggcattggactttgcaggaacttatggagttctagtgctgtttggagtttttcctgccgctatgtcttggtcagagagatattcggatgagttggaagctccagtaccccctatagtccccggagggaaatttactctctcggctgtcatgggaggtgcattgcttgtgattgttccagagttaatcaaggatgtaatgcaactacaaggactacactgacaatcggtgcaagtgaaaggacatataacagttacagtaaaacggtccttgagatttttgttgcagtaacaagtacatgtagcaaaagcaaaggcaaaactcgaaagcaatcaagtgcagagattgcagtttcatcgagcatcgacgttggagttgaattgttttttatgagattagcacggggttcagaacttcggttaaatttctgcaaccgaaagaaaaatctaaaattccgtattacactaatatatgtgctttgttgtgaatatataactttgtaattatattttctattgtttatgtcacataaaattcttcttttcattaga

SEQ ID NO: 22192 - DNA, 2561 bp, Zea Mays
ctactctagtccacaagagccgctcctccgcctcccgttgtcccctccaccagtcctcttcgggcctcagccttctcccccttacccctctccacacggcgtcgccccctcccatttcgccggcatcgacgatgaacggcggcggcgggcggcggcggtactcctcggagcagctcctcttcgacgttccgtccaatgccggtgccggccggtgggcacagcagtttcaagtaccagggatgtatgatggtgcccaaaagtttggctatggaggaggtctagatgaatctgatatgagattcacagcaaacaagctgatgagcaagtctgctgtttttcctgatggtaactacctgaaggccttcacagagaaagagaaggcagcacctgtcgcgaaaatcaaagtggtggtgcgcaaaagaccacttaacaagaaggaagtatcaaagaaggaagaagatatcatagacattgaacaaagatcaaactctttgactgtacatgagactaaacttaaggttgatcttactgaatatgtcgaaaagcatgagtttgtattcgatgccgtcttagatgaagatgtttcaaatgatgaggtttatcgtgaaacagtggagcctgtggttccttcaatttttaatcgaacaaaggcaacttgttttgcttatgggcaaactggcagtggaaagacatataccatgcgtccccttcctcttaaggcttcccaagatatcttgaggttaatgcaccatgcatatcgaaatcaaggatttcaattgcatgttagcttctttgagatatatggtggcaaattatttgaccttctcaatgataggagcaaactttgcatgagagaggatgcaaagcaaaaggtttgtattgttggtttgcaagagtatagagtgtccgatgtagagactatcaaggagttgattgaaaaaggcagtgctaccagaagtactggcacaaccggtgcaaatgaagagtcctcaaggtctcatgccattcttcagcttgctattaaacgccgtgtggatggcaatgactccaaaccacccagacctgttggcaagctgtcatttattgaccttgctggcagcgagcgtggtgctgatacatctgacaatgataaacaaacaagaattgagggtgctgagatcaataaaagtttgcttgctttaaaggaatgcattagagcacttgataacgatcagactcacattcctttccgaggtagcaaattaactgaagtcctgcgtgactcattcattggagactcacgcactgtcatgatatcatgcatttctcctagttctggctcttgtgagcatactctgaacacattgagatatgcagacagagtgaagagtttgtcaaagggaagcaatgccaagaaagatgtgtctttggcagtgcctttaagagagtcgagcccttccccactgccttcagttgtaccctcattctctgcatctgaggtgatgaatgatatcaccgagagaaacaattttggttggcccaagcagcagtatgttaaagaacggcctgctccgacatttgttgaacgaatgcccaaagtgaaggatgccgtggagttcgcaacatcagacggtgcttatttgaagggacaaagaagccagggctgtatggcaccaaatatagctgaaataccggatacaatgtaccagcagagaaggcaaccagcaaggaaggctaaagataccgctttgcggaataatatgagaaattccgttgcttacccaactagaagtgttgagccagacgaagatgatcatctgaataatcttctccaggaagaggaaggcttggttagtgctcatagggagcaggttgaagcgactctggacatcctcaaagaggaaatgaacatattaggcgaagcggatcagcctggcttccaacttgacgactacaacattacgagactaagcagtatactctcgcagaaggcggctgggattgtggacctacaggctcggttggagcagttccagaggcttttggatgagaacaatgtgctgctatatgctcagagcccccggttgtagttccatctgttgccttcatggcaccgtaaaaggtgggcatcggtggcttctaccagcgcctcaggtggcatcatatgcggtatcggcatgtcgctgtggccatgacccatgatgctgcaatttgtttttaacccataggtgccggtgaaacgcaaactagatggctagttcacagcctgttgccatggttctttggcatggccggccccgcaacctattttgtactagagttgctccattcttgtctttccgcgctccatccttaatccaatgtgtatatcttgtatttgtccgtgtcacatgagtgctctgttatttgtagctcaacaaatacatttttttacctttctgatgtatgaagttttccagagtgtacggtatcatccagttacacacatacttttgccaagtactccgtaattacgtctgtttttttatatcaaaggatactacaggggaggtccctacaggaattttttatttgaagagaat

SEQ ID NO: 22193 - DNA, 1052 bp, Zea Mays
tgatgctgtacctatactacgcagcacaccagcataagtacaagtcgaccagatccgaagccacgcttccagcctcttgttgtcacttattagctatctctcagctaacctccctaggaagaataataagctgcaaaaggcacaagggcgacgccgataccgatgcaaataccatagcgttgatgtaaagtggcgccagaggagaaaaaaaggaagcgagccgagaaacatggacgaggaagaggtccatatcgcagttgggaagaactcaagaaaggagaaagccaacatactgtgggccgccgccaatttccccagggccaccatcgttcttgtccatgttcactggccctccaagtggatgcctttcatgggtggcaaagtgctatacaagttcgctgatgagaaggagaaggagatgcatagaggcagagaaatgaaagtaatggtcaatatgttatcacagtacaaaaaaatgtgcgggacgagaaaggttagtgcacattaccttacacatgatgacactgttgccggtgttgtgaacctcataaagaagctcaaaattaaaagaatagtcatcggttcaaggaacatgtcaaggcaagttgtggttcgccagtgctgtcaggtttggctggtactcaacggcaaacacatctccaccagcaatgatcacctggaatatagtgaaaatataggatatggaggggggagctcaggtattttggcatctatacatgagctaggtgaggaatctgacggctacgtgacaccacgaagtgatcttgtagacgaaaccatggatgaggagtcggctgaaatgaatgattctgatcaattagtaacggaagatgaaacattgactgaacaaggcacagaggaatcagtcacttctgaagacatggaaaacttttttcaagagaatgctgatcagtctgatgagatacagaatttcagaaacatagctgacaaggctgaaaaaatcatggtgcaatccgatacaaacgaacaaggccttagttaactacaaacacagatggtttcaacttgcg

SEQ ID NO: 22194 - DNA, 1005 bp, Zea Mays
gtgaaaattgtgttttcggtatttgaaacctaggggatatcatgactatcgcaaccggccaacaggaaatttcagccgggcatccccaattcatcttccccacgccgcgtccgcgtccggaccggacaccggcggcacctcctcctgcctccacttcaccagttcatcgggcgccggaagtgggagccatccgccgccgccacatatctgtcctcttcggcgctgactggggctcagccgctcgaagctccatcccgcctcccgtcttcgccgccgctcgtcagatccctcgacgcgacggtcgtgtcttgactctccaccacgcgactccacccagctcttctccacgcgactgcagagcgacgatcggaggcgccgccatcgcacaatccaccgtcgctgcctgctcctgtgatactctcacaagatccgctgctacatccatttcttcttcttccacgttgctgggaggagacgggcgcaaggatttgtgcgagggagaaagaaagggaaggaaaggggataggacgggaggaggagcacgactgcttaccacttattcttcccagcccggtaccgtagatttctcttgttctgtgtagtgtgctttctaatttgtcgtatatatataaatatgtggaaatatattataaataatttcctttgaatttgacttgtacaagtttctataatttttacatgtaatgcatcagttatatgttttccatatctgcatgtgcacaggagtagcgccatttgccaacagcaacaatacgcgcttgtagcaatttcggtcggtagtgaacgcaataaacaaacaccgttaggggatctaatggcgctgttcaaataaaacaaacaaatccagaacctacaagtctgtctataagcgtctacagttcattacgacctgactcggccaccgctcgtatctccatctcaggatgtatgatgggcattttatcaataatgttccagtagcgtctttcaaaaagagaaaaaaaa

SEQ ID NO: 22195 - DNA, 1476 bp, Zea Mays
gcttaacagtatcagaagggtccgtgtcctggaaataggataggagacatgacaatgagaaggtgtcagacaggtcctggtcctgttttggctgcaaggagtcctggtttgggcaacgttgacaatctccatgagagttcaagcttatctaggagctgggatttgaacagacagattgatgatgaccgtgatgtactcatagaatgtagagatgtccataagtcatttggagagaaacaagtattaagaggtgttagtttcaagacatggtgaagcagttgggataattggaccttcagggacgggaaaatcaactatattgaaggttatggctgggctgcttgctccggacaagggtgatgtaatcatttgtggaaagaaaaggcatggtttagttagcgatgaggatatagagggtctccgcattggtttggtctttcaaagtgctgcactttttgattctctcacagttcgtgaaaatgttggattccttttatatgaaaattcaagcttacccgaggaccgcattggtaaattggtgacagaaactttggctgcagtaggactaaagggtgttgaagatcgtatgccatccgagttgtctggtggaatgaaaaagcgtgttgctctagcacgttcgataatatttgatgatacaaaggatgtagtggagccagaggtccttttatatgatgaacctacagctgggctcgacccgattgcatcaactgtcgtggaagaccttatacgttctgtgcatatgactggacgggatgcccttggcaagccaggaaaaatagcttcctatgttgttgtgacccatcagcatagcacaataagaagagctgttgataggttgctatttcttcatgaggggaaggttgtttgggaaggaatgacacatgagttcacaacatcagctaatccaattgttcaacagtttgcatctggtagtttggatggacccataaaatatttttgaagacccaacccagtagtgaatgaagcataggtgttttgttacaccctcttaaagatcatcccaacaaaatctagagcatcaagaatccaacaatatctggagcatcaagaatccgaaatggggggtctatggcagttgggagaaggaaacacatttggtttgtcattgtttcattgagtttaacaggcatctgcagcagtatcattcggtcacgtcaccttctatgcgcataattgtggtaccagcttgtcaaataagcattagttttctatacaccattctttgagggaaactgtgcgagcgatccaagataaactacatcattcgtcaggaaaactgagctatcatgccaaaaacaaaaaaaaatactaaacacccttcttttagtcatttataaacgagactgatgtaaatgtttactgtaactgttgcttatggtatagcagcgtcgattcctcagtattctcagataattttatttatacgtttgtctg

SEQ ID NO: 22196 - DNA, 3453 bp, Zea Mays
tttcagtcagttcgctccgctcccacatgcctcctccgcctccctctcgccgtcccggcatacccaatccctaggcaccccgccgaaaccctagattctcctctcctgctccgatggctggggcagcggcgtcccccgtggcggcccacgtggtggaacggttccgctcgcggctgcgcgaggaagcgggcagcggggagccgggcgcctccgcggtcgtgcgcttgtacgcggaggcgctccgcgagcttaccttcaactgcaagccggtcatcaccgagctcaccatcgtcgcaggccagcacgccgcgctcgccgccgggggaatcgccggcgccgtctgcgcccgcgtcgccgaggtgccacctgatcagatattaccatctttgtatctgctagatagtattgtgaagaacataggtggggaatatgtagagcattttgcaattaggttgcaaagtgtatttgttgatgcatactacagagttcatccaaaccagtatgcttcaatgaggcgcctctttcgtacctggtggccagtgtttccttcttctgtgcttcacagcattgaggatgaccttcaattttcgccctcagagaataaccgtcccaccacatcgacaaatgtgcatcaaacagagtcgttatctcctagaccatctcatggcatacatgtaaatcctaaatacctagaagcacaacataagttcaagcgggtcaatgtggcgcaccagtcagcagctcaggacactaggcaaatgtctgatgtgcaggaggatctgataaatggactaacatcgaatagttcacaaggacggccttcagtgtttcagaaatcttctttacagtatgctgatgatcctggtcaacaagagatgtttcgacctcttgctggagcaataagggcaacatcgccacatctcttgagaacacatgcatctgatgtgaatctagatgggccattagccaattcaaggagaaacttgtccagatcaccacctcttgatgtgttccctaggaatgtttccccaaagagaccactagagaggctaccaccatctcattctgtattgggacctgatcccagaaaattgcctgatcgaaatggcaggttaaggtgggctttggacgatggtgcacagtggcctacaataagtatgcttgatgaagagtacaggaagcaaagtgcaagggaacttattgatgcatatggaaattgtcaaggacgagatgctgatgaacgacttcctaaagtacagcgcctggattcaaatggtatgactagcaaatctggtgcacgaaattggttaacttcagaggaagagtattcatgggaggatatgagtccaactttgactgatcgagtcagaagcagcatgccatcttttcctcctggaaccatgagaattggatttcctggggcaaatgcagggctactggaatctgatgttgggaggcacaatttcctaagccaagctactagatcatcagttgatgtttcaccatttaatattgaagataggatttcagctgcaagtcatgttgacatttccacaaggagatatccaagcaattttggtgttcagaatggagctcttttggagtaccagaattctgaacatactctaaatcatgggagaattgctaccatgccagctccaccttggcaacagcctattggtcttccattgcgaatacaaggacctgaacatccttcagtacttggtagaataccacagcctgtcgacggtgaaatgccagtcaagaggttggacattagtggcacgtacaatggtttgaatgtagataaacccttggtgaagcataggtcatcacctgctcctgccccgacagaatggctcccccttcaccatgcccaatcacaaactttaccactaattccacctgataccaaacatgttagaagtgcatcagatagtttagaaattagttcttttgttagccatggaggtagttcatcagtatttgttccacggcatcagtatgatgccgtggatcggaaaacaggtaccagtaacttagctcaaccaccatcaccatatcagaaccaagatttgttgccatcaagtcaacaaaatcaaggtacaattttgggaaaccaagctcatcctcatcgtcccctaaagttacatccccatgctcatcctcaccatcaggagacctttagaagctttgcacctggcatgtctgtatctccattccaaggacaaggaggtaatgcaaccatgacaccagtttctgttctgccaacgtctttttctgtacctcctgctgtgccaccctatggcgtgctgtctgcacctgggtttcctatgccaccattaccgcctggaccaccagcacctgtctcactgcagatgggttcatcatcatcacaagttggtggcccccaaccatttgtctctggactgttgagtaaccttatgcggcacggtgtaatttcactggaaccacctagtcaatcccaggattctgttggagttgacttcaatgtagacctcaaggtacggaatgaatctgtcaccaatgctttgtatcaggatcttccaaggcagtgcaaaacttgtggtcttcgatttaaatgccaagaggagcatcgtgctcacatggactggcatgttacaaagaacaggaattcaaagaatcgtaagaaatcttcacgtaaatattttgtcaccgctgttgaatggttaagagcagcagaaacagtaggaaacgatggagttcctgcttttgtgctctcagacccagtcccagacagacaggaagagaaagaaattgctgttcctgcggatgaggagcaaacatcctgtgcattatgtcaagagccatttgaagatttctacagtgatgagactgacgagtggatgtacagaggtgcagtttatatgaatgcaccagatggtaatatcgatggtttggaatggtcacagttgggacctattgtccatgctaaatgtcgatctgggcccggcaatacttcttagggtgggcatagctgggatgatttgatagtttttttttcccgttgcggctgtaggcatgacctgtaaactaatggagactcagattttggtatggttagcttcttttccatctggctcccttaatagccagtgcatagaatgttttttggaacaaaaaggcaggagccagtgcatagaatgtcaatgtgacaatagtgtataactgtaaaatttttgtgtaattcagttgcacagtgctgctttttcattacaactatagtgtgatctatactgaagcttcatgtttagggtttctgcagcacagttgttgacaacggtatatgtatatgtaaccatggtttcactggacatgggaaacaatatatttcaatagtcctgttttcttccgttaatatcttgtgcagaatacatagcagttctctacgttggttggtagctttggaag

SEQ ID NO: 22197 - DNA, 2392 bp, Zea Mays
cccgactcgggcacgcaactctaccgacctccgctcaccgccccctttcctcctatccctcccagagccccgacccggccggccggccggccggaaccctagccttatcgcccctccctttcccgcctcgcctccgcgcgatctcccgatcgccggattcgtgccgcggctggatggactccgacgtggagatgaacaccgccagcgatgaggaggtgatggacaacgatgactactacgactactgctacagcgacgtgggcgacgacggtgggagcaacagcgggagcgaggagctggtggccggggactacgacgagggcctcgaggccgaggggaccgacgaggtggtctctaggcgcgagcagacatttgtggttttaaacgaacaagttatatctgaacgtcaagccgaagatgtgagcaaggtatctgccgtcacactgattacaagggaggaggcgtgtgccctcctccatcactataaatggaacatcagcaagctgagtgacgaatggtttgcagatgaagaaaaagtccgccatactgttggcttacttttgaatggaaatcatgacccccgctctaggaagctagtctgtggaatatgttttgaggggtgttcttctgatatgatgagctctgctggttgtgctcatttttattgccatgaatgttgggaaggctacattagcgctgcaattggtgatggtccaggatgtttgtcattgcgatgccctgatccatcttgtagtgctatggttcttcaagggatgattaatgaattagctaaagatgaggatagaaaaaaatatgcacgatttctcttacgcgcatatgttgaaggtagcaagaagactaaatggtgtccagctcctgactgcacatgtgctgtggagttccttgggatcgagcatccgaggcttcatcaatatccattactcttgtttgcagtgcactgaggaagctcatcgaccagtgaactgtgagactgtttctaagtggatattaaaaaacagtgcagaatctgaaaacatgaactggatactggctaattctaagccctgtccaaagtgcaaacggccaatagagaaaaaccagggatgcatgcatatgacatgcacccctccttgtaaattcgaattttgctggttatgtctgggtgcatggtcagatcacggagagagaacaggtggcttttatgcttgcaatcgttatgaatcagcaaagaaagagggagtttacgacgagactgatgcaaggagggaaagagctaaaaactctcttgagagatatatgcattactatgagcgctgggcatccaatcagacatcgaggcagaaggcccaagcagatctgctaaaagcggaaaaggaccagattgcaaatttaactgacattttcgggataccagagacccagcttaagttcataatcgaagcttggtcacagattatagaatgcaggcgagtgttgaaatggacatatgcttatggctactatctggatgataagatcaagagtgaattttttgagtatctgcaaggtgaggctgagtctggtttggaacgcctgcatcagtgcgctgagaaagacttgcaaatttttttgccgtctgtgaaatctgacagcactgaaacaacgacacctacagtggctgaatttggtgaattccgcgtgaagcttgctggacttacaagcgtgactcggaattactttgagaaccttgttcaagctttggaagctgggttggaggatgtccgtgccacaggccaggctgctggtacatccagcactgccaccagctccaagaaaggaggaactaaatccaagaagaagcagcacactgcaccatcatctgaccacactgatgatgggtggccctgcgagcgctgcacatttcttaaccctcctacagtggatgcatgcagcgtctgcgaaaagagtaggtactagatgatggaatagctcaaagggagccagggaggcatcccaagaaaacctcaaagctcgtgagaagcatgcatgcatcggatgctgagaagaagagcttccagctgccgcaatgttgtacagagagttattttagggcctcggttggaaacggtgtggaggctcaagtggtcacatgtttgtgggggtcatttggttttctagttcttttctgttgttccttgtaaatatatttgttgtgatgtggtgacctgtgtttatgtgatgagtttttgtttctgacaaactgtgaaattaaactttaacaaaactgatgagaggtagctctgtttattccctcctaattgcgggcagggtctttgtctattcttccacattatttatctacggttacttgccaagtaaccatctgctagtgctggtcaatgttacttcaaag

SEQ ID NO: 22198 - DNA, 1492 bp, Zea Mays
cgaataccgctgctcgcgcgagcgcaggcagcgaagccacaccaccaccaccagtccaccgccaccaggcggtcgccatacgattcaccgcgcacgtaacatgagaacagcgaacacgaagatgcttccccgggcggcagcggacgaggagacgagagagggagagatggggccggacctcctgggacttggcttgctgccgccgccgatggccggcggcggccacggaggtggttcagcggcgcagcgacgaccttatcagaagacgggattcgacgagcccctacgtttcgccgccgacgcccctttgccggtgcgcccgcggccccggccagtggacgtggacgacggcgtcgtccctgcagcagcacctccggcgagcatgccgaagccgcccgcgtcgtcgaccgcggcacggtgggcgccagctgagctagcgtcgtccccgacgaaggtctgtgtcccgggcccttctccgaggaggaaagctgagacccatcttttctgacaaatcttaacgagcctctctcagctcggttctttcagggagatctttcaggttccgtcgacgttttgtagtgatcagctggccgccggcgagggctgcagggcgcatgccgtggccacgtgcgcctcgccgccgctcatgcaatgctgtccctgccccgccgcaggcgtgttgttttttggcagcaggccgccggttaccgcaggactgatctttgaggactccgcctccgcggcagtagcacggagcacccatgacgattccaccgcgccaacgacgataatctacgcgggctctgtgtgtgcctatgacggtgctatgatagaacagggcggagagtgcagggacgatgcagcatcaccctcgcagagaggagtggcggttccctgcgcaaacaacggacgctccggctgccacggtttccgcgagaaccagcgcctcgcttggcggcatggaccggcggccacgggcctcccaagaccatcccaagagaatgaaagcgagccatggcgacgaggcagtgagcactgagctgaggatctagctggggcacagcagccatcggagttcaaagagcttctatgactccagacaatccaggccaaatcatggatttttactgttcttgggttcatggatccaaccatcagaacccatttccactttgtctaatcgacgaaaggcccttggtgtcagctagtatttgaactttaagatcagctaacctgttgtgcttgcttgctaataacagtaactattaattgctaattgcacatattctccggccgtaatgcacagtttttttggggctcatttgttcatgctagaaaggatacaacgtagtagttttgattttatgacttgcatgtttttgttcatgctacaaagaatgtagtgctagcaaattctttatccggtgttgtacttgctctactaattgcatatcttttcggtaatgtaacattttgttggtctcatttgttc

SEQ ID NO: 22199 - DNA, 2310 bp, Zea Mays
ccagctgttcgctcgatcgatctgtgcctcgcctcgcccgcccagtcggccaccgccagccgccaaccaacggaacggatcgacaaccagaccaggtgagcagcgccgaataaatattggcccagaagagaagagactgaacgaagcatagcaagcaaacccagctcgatcgcctctcgcactccgcgatccatctctggcaattttttttcctctcgaaattaaacgtctgtttccatctctggctatatatacccctcgttaggtctctcactcgttaagccatccaaggagcgaggggtacaagcacaccgcagtctcagccctccgccctctctctctctcccttcaagaactactcgaggtctaattgtcccagtacgtctcagctcgttccccttgcgaatctctctactcgcttgcatgtgtcctagcaaatcaagctcatcgttatatatattgctcgatcgatccagtttttattggcacagcacgcgcccggccataccttacttactgcatgcatcatgactcatgagtcctcgtcgtcgtcagttgtcaccggcattcccatccatgatcgtcgtagaccgatcccctcgtgtcccctctcaccatcacccttgtttcttcgcgcgtcgaatgcatatgcagtcacctcggtactttcctcgctctcagctgctgagccgaccgttaatttcttcactgttgcgcatgcacaggcctgccgcgcgcgctcggcacgccagaaggaaggacgtaccagaggcacacaatttcaaatggcggactgcatgcaggagtggccggagcccgtcgtccgcgtgcaggcgctcgccgagagcgggctgtccgtcatcccgagctgctacgtcaagccgccgtgcgaccgcccggccccggccccggccccgaccatggcaccaccggcgccggcagtccatccgaggaagaaggagcccagctcggacgccatcgccagcattccggtcgtcgacctcggcgagctgctggccgcagacggcgccgtcgccaccgtcaccgaggccgtcgccgccgcgtgccgggactggggcttcttccaggtggtcaaccacggggtgcgccccgagctgatgcgcgcggcgcgggaggcctggcgcggcttcttccgccgcccgcccgccgagaagcagcgctacgccaactcgccgcgcacgtacgagggctacggcagccgcctcggcgtccagaggggcgccgtcctcgactggggcgactacttcttcctccacctcgcgccggaggcggccaagagcacgcccaggttctggccggcccagcccagcaactgcaaggatgtgtcggaggagtacgggcgcgaggtggtgcggctgtgcgagctgctgatgcgggtgctgtccgtgagcctagggctggacgaggcgcacctccagcgggcgttcggcggggcggagtgcggcgccaccctgcgcgccaactactacccgcggtgcccgcagccggacctgacgctgggcctctccgcgcactcggaccccggcgccctcaccgtcctcctcgcggacgtgctcgtccgcggcctgcaggtccgccgcgccgccgccgacgactgggtcaccgtgcagcccgtccgcgacgccttcatcgtcaacgtcggcgaccaagtccagatactgagcaactccgtgtacaagagcgtggagcaccgggtggtcgtgaacgccgaggaggagcgcatctccctcgcgctcttctacaaccccaagggcgacgtccccatcgccccggcgccggagctggtggcggccgcgagcctgccggcgctctacccgacgatgaccttcgacgagtacaggctctacgtcaggaacaagggcgccaggggcaaggcgcagatcgaggctctcaagggccagggaacaccagaaagtcaattatagacgacgactagctagctactagctagtacgtagccaccacttgtctacgtacattacagtatatactagctactagctagttaataaacaactgctgcgtgtgtgtcctaattaatatgacaattgttaatctggagttagttcgttactatacgctgcgctggctcccccggcggacgacccatggataatctgattgtaattgtaataacacgtgtaagaccaacctactacctttggtaccactttctactcaatatgatcgatcgcatgtatatatgtgtgtttggtgcgatatacaacctgattggatggttgcacgtctatgtgcagtctggcgccgtcttagctagctagatacgat

SEQ ID NO: 22200 - DNA, 1061 bp, Zea Mays
ggaaagtggaacaatgtgttcgacctgagatacaagcagtgaattaatgaatcgagagatctggttggatctgaacaagacacttgcctttaggaatagtagtagatcaccagagcgcttaagaacgagggcccagctaattagatgcattgctacgcttgtgtgcatttcggctcttgattttttacctttacccagagcatttcaccgtgttctgcaacatgagaaaagctgcagaaattttgggggtactgcagcactgacacccacccactcattctgcaaggagctgatgtaaaaagggcttaaggccagggacgaacgaacacaagtatacgcggttgcgcagaaaggaaatgggggaggacgttgccccccacaaggccacaagtggctgacgacgaggggcatgtgcgttcatctgagcaaaggcatttttgggtcgtcgctgaaaactgaaaaaggctgggacgcttgtcttctttcttccctcctccggtccatccgtccgcccgcccgctgaaccgaacgtccaagccaaaccgcaggaaaacaggcgagaccgatcaccatttccgcggaaatcgagatcgagatgctcctcctcttcctccagtcctcctgatgtccagctcgtctttattggcgtggccacactgggcacgcgcaaacaccgcccgggaaaacgcccggccggctggcagccagcgctagctggaatttgtttggcggacacacaccggccatcagtaagtacttccagaaccaaaatatccgcgggtgaactgcgtcgtcctgtcggtgggaatcgtcgtattagcgagcattcttatcaagcccttggtattagtgcagcaaaggagaatattaccttatcaagcctccactgcatttttgttggattttgtgtagtaattggatccttattatccctagcaaaccaaacacgaccttaatttacttctcttgcacctccgatccaccacacacataaaaattgttggaaaaattaacagcgcctaagatttatttgataatgcagcataaaacgtaaaaccaag

SEQ ID NO: 22201 - DNA, 1182 bp, Zea Mays
ggaacctatgccccgctggactgcactacacgtgggacagggaagtgaagccgttccgccgtgaagcagcgccaccccttgccatccgcccgaccgctgggaagcagggcccacgtctccaagcttcctacaggaagagcctgcgcccctcccaaaggacaaagatattaggatggatgaagtcacacaagctgttgaaaatctgaagaaagaatggagccaagctgtttcacagcttgaggagagcattgctgcaattgaatcatgtggaaaaacagggaaaggaacagaggaagcaacttctcttccaaggttgaatggttctgcacaggatgctctgcagttgctcaagtccctgcagttccggcttgatcttctagctcagcagctacctacttttgatgaagtgcagtctgggcaagcaaccttagggtcgtgggatgaacaatacaagaagtatgacagtgttggattttttttaatttttttcttcttcttttagcctgctttttttttgcaaaaaaaattgattgtgtttgcaggttgcgtgctagcctgaggaatgctaacttacaagcgaaagagaacattagaaaagctgctcaggaggagagggagcttcttctagggggtggagaagagtcaacaatccgtaggcgtaatctccagacaaaggttgggatgacatctgctgctgaaagtatcaccgagagcctccgacggtctcgccagatgatggttcaggaagtggaaaggagtgcaagtaccttggcaacatttgatgaatcaacaagtgttctccggaaggctgaaggtgaatatcaaggacaccgctctttgctaatgcgtacccgtggtttgctctccacgatgcaacagcaagatgttcttgataggatcatcctgaccatcggctttatcattttctccttggcggttctttatgttgtctcaagacgtattggtctattgacgctgcaaaggaaactggccgatgccatcagatccggttcattatcagccgatgacatcgtagcgaatgcccaacgtggacctgccccagcaaatgttcctgctcccatctacgatgaactgtgattcgtttgtcctctgtattgttaagagtgaagtttgaaatacgagatgagatagaggatgtgatagaacatatgctggagatag

SEQ ID NO: 22202 - DNA, 1206 bp, Zea Mays
  misc_feature (1205)..(1206): n is a, c, g, or t
ttcgaaggggcgtctagcctcctaggccagcaaaccccctctgtaccctccgggcaatcgggcatgaatccacccatccgcgatgctacatggagctcagcaagcctcggcgtcgtcgaccgcaggcccgcgccccaagagcactgctatcctgcagtctgatcagccacctcgcgccgccgccgcgcgggaggggggccgcggcggcacgggtccggagtcgcttgtgcgcggctcggtcgtcgcgccgtgcgtcagctgcggcatctgcggcggactcctccgtgacgccaccgccttcaccgagtgcctacacgccttttgcaggaaatgcatatatgacaaggttgcgaaagacaacataaagtgttgcccgaagtgtggcatttttatgggaaatccgttggagaagctcagacctgatcatagcctggaacacatcaggccactgatatttcctgctaagaggcgcaaggttgtcaccatgaagaagaggaaggaaagggtgtcctctgaatcaacccttccttcagtggtgggtaccactgcagaagaaagcactgcactgatacctgctgcttcagaaagtaaggcacaaaaggatcttactcctgtcggaagagatgctttgtcacgaattaggggtcgagactttgactcagcatgtggtcttactgaggatactggagccttgattgtatggcaagcaccacctattctagaggagacggctgcccacaatcagttagactccaagcaggacccagatagtttcaggcctccggcgacctctgatattgagtaccagcgacaaggaccaactgcacaaatgaccaatatttcgtttatggttgggaactcatcccatgcaaggccgactgaccaggatgatgaaaacatgagaggagatattctcacattgatcaatgagagcaatgcaagaatcatggaaatgtatgatgcccacatcagcaaactgaaggcagggaacataaaactaatagagcaactggaaaatgaaagagcagctgcacttgagaggacaagaatccttgaagagaggctccagcaagagttggaaaacgaaaggacagttgctgctgagaggacaagacttcttgaaaagaagctccaaagagaactggaacatgaacgagaagctgctattgagagaacaagagttcttgacgagagactccaaagann

SEQ ID NO: 22203 - DNA, 917 bp, Zea Mays
ggtgatttcaggaaaacacattgttcctcgcttggtaaggatgcactctaatgagatggaggatattcaagaagcatatgctggccaaattgttgctgtttttggtgttgattgtgcatcaggcgatacatttacggatggaacagtgaaatatactatgacttcaatgaatgtccctgaacctgtgatgtccttggcagtttcacctatatctaaagactctggaggacagttttcaaaagctctgaatcgcttccaaaaggaggatcctactttccgtgtgggtttggatgctgagagtggccagacaattatttccgggatgggtgagctgcatctggatatatacgttgaacgtattaagagagagtacaaggtggatgcaaaggtaggaaaacctcgtgttaacttcagggaaacaattacccagcgtgctgaatttgattatttgcacaaaaagcaatctggcggtcaaggtacattgagcctctaccttcaggttctgatggtaaattcgaatttgataacatgattattggacaagcaattccttcaaactttataccagcaatagagaagggttttaaggaagcttgcaattcgtggattccagtgaacttgcttttaagctagctgctatctatgcttttcgacagtgctacacttctgccaaacctgtaatattagaacctgtgatgaaggtggaactcaaatttccaactgagtttcagggcacagtaactggtgatatgaacaagagaaaagggatcattgttggaaatgagcaggaaggtgacgacaccattgtagtttgccatgttccgctaaacaatatgtttggatatgcaacagctattcgatcagcgactcagaagcgacctctaatctgctgttgcatgttagctactcaagtggat

SEQ ID NO: 22204 - DNA, 964 bp, Zea Mays
gaacaacaaagagagggtggatgacatatctgcaactttggctggtatttcaactgagatagacattagcatattctaccgtggtctagatcaaggaggcaaacacaccctggggtttgttactatggccagcattaccattgttttgccttcaaggatggacggtgggtcatgtatgatgaccagacagtcaaggttattggtagttggggtgatgtgctcgtgatgtgtgaaaagggccatttgcaaccccaagtgcttttctttgaggctgcaaattaattattcttcagagtcgcaaaacgcgctacagcggttaacatgccctcaaatataggttttttccctgcggccatgaagattagaaatagggtagcagattcgttttgagcggggatatatagtactagcattcaacggtgcttttcgttgtgagtccgtaataagcagtcatctgagcattctagagcaaaaaagggagctgtttatcccccccttttttgctttaacctttggtgtaggcgctgaacttctgatctcatctgccaataaatcttcactgccgatcaagcgggtggagcattcgacttgaactgccatccaacagttgtagccgaatctgcatgaactcttcgttatacaccaatcatctatagaattttctgcttacattgggccgggcgggcgttctctctctctctgttttttttttggggtgggggtctggtataggagtgacagttttgaggccaccagatatagaatggaatgatatgggaatgggtgatgcggtgtgaactgtattttgctgtggatgatcttttgaaaagagtaaagctatctggaatatggatatggtaagaaatctgtagtacacgagtctatatatacaatgactcaatgggattatgcgagatgattataacgatgaataccaaaatctttatcacaactgttggttaca

SEQ ID NO: 22205 - DNA, 284 bp, Zea Mays
gcaagcgcgatccgtttcaattcaaaattctagcttacctgtgatcaagaaggcctatcagctggagagttcccggtgatcgtgaccgccagctcctgcgacgttctcctgacggcggcggcggcggcggcggatgattgttggctggtgcccccagctagattattagcagctccgttgggggcgtcgagaatggacggggaattcaacgcgagaggcatcagcaggaaccagcgttgtcaccggccggtctccatgcacgagtggaagctcagagcgctatc

SEQ ID NO: 22206 - DNA, 1505 bp, Zea Mays
ttccatatcaagaagtttttatcatcaaaaggatcaggctttagcacagcagcaaaacctctgacagaaaaatgcctaactttaggtttttggattgttagaaatataggcattttccgtattattttaattccataaatcaacattatgatgatgacatataacaaataattaaccatagaaattgtgatctcaaattgatccataccagtatgaatcaagagaacatagagcatgtgaattatataaatcatataaatacgataaacatgtatactgactaaacaaatgaaagtaaacagatagaaacttaaatagcatgactgaaaaattaaaacagacagatctatcatattataataagacagaacagataagataaaatcattcgtaactatgaaacagcatagatgaaaatatgaaacatatataatctccagaacacaaaacagtaagtaaataaactgatcataccctcctatgcgctctgatgatccagatccttggccagcttcctttgtcatgttgaagatgttttgggcagtcgcgtagacgctccccaaaaacctaattgccgatcccccgtgcaaggtctcgaacggcaccggcttcggaggcacctgccctctcgctactctgtgcgcgcagagtcacgagatggaaataccctcactcggcggctggattgtgcctgcctgccacgccacgtctcgccacgtctcgcccggcccggccggcggcggcggcgcgcgcgcgcgtgtggcacgcccttgtccatttcttgacttctcaagttaagtggaataaatcccaccatataagtcaaggcaaaagacccttggacttccaatgtggtactattagtattctccaccattacacaccatagagtttattcaataaatgggtcaagcccataaaagatctaacacgctctcccatgggagatacagggagatgggaaatcgagttgaagggagctccggtcgggttggggattgggcgagctgcacggccgggagctccatggctgggagaaggagcgctcggctggccagactggaaaagagaagaacaggggcgccatggctggatgcgagcaagagcagagagagagagctcagctgggagaatgacgacggtaaaaatcccagcagcagataagaagagacggcagaaatttcaacagaagaacagcggcgggattttcttttgctttccagaatacagcgacgcggcatatcagatggaagagagaaagcggtggagagataaggcgagggaaggaagatgtacgtatgggatatttgaagaagagctggacgtgcaagcggtggaaaaatctccaggagatcttgcgcgctagatgaggttgagcggccagcaacttcaacaaaaatcagagcgatgaaatatcagagtggaggataggaacgcagagaagattttccttccgtgcgtggatgagaacgaagactagaaaaaactacgtagcgtacgtgagg

SEQ ID NO: 22207 - DNA, 636 bp, Zea Mays
atggcggcatgcagaaatggaaccgaaccccgtacgcacaccaaagcaggggtcaaagatatagactctgttactctagaagatgcaatcgagcttttgcaatatcccaaaattttgggaaaacatcctgaagatgattatcctgtacttataacacattctaaagttggatacaacatcaagcataggagatctctagctctagtgccaaagagtgttgacccaaagaagatgacacttgagcgtgcgctcaagctactaagcggtaaaagtgtcagacgaattggtcgaccgaaggggaaggttgaaaacaaggaacccatggaatggcattagctgcctgcactcgttacaagatcctaaacgtgtgtggtttgatagtcagtcagccttatatccatgcaaaaaattcagagagaagtcaatattcatagcatccgaggttcagcctttggtgtgcttaactgcttatgatgagagcggagaaggcaatgtgtgacaaagaatctggtcaacaagaacaaggactgtcctccgctaactgataacttatactccctcagtgccaagtgttgttctcgctttcggagtagtcaaatatatacaacgacaacatagtctttttgtcaaaaaaaa

SEQ ID NO: 22208 - DNA, 2415 bp, Zea Mays
aataacccagaaataaaaatcgccgtggaggcgagtcgccgccggcaccgcccggcacggccttcttctccggcgaaggcggagctcgttacggggattccacatccgttaatcggtcccaccggatccctcgccgcctcccacgggccgggccgcgccgtggcgcgcgcgcaggccgagatgcggaagaggatggagagcgacgacgatctgatcgaggaggcaaaactgcgcaccgtctggtgggcgctctgcatcttcgccgtctcctacttcctcacgcgtcaatggctgcttgtcctactccgacaaggtctcggatggtttctacttcatccaggggatggatcccttcatatggacgctctgcaacgatttgcacgacggaggccgcgtccccactattgagtccctcaaggctgtcaatcccaccgattctgccatcgaggtggtcatcgtagataaagtggcggactatgacctgaggcagctgataagcatggccattgacgtttctctgaaccgtaccgactccaaggagatcgccactcgactcgctgccgttgtgtccacgaagatggggggatcggtagcagctaccgaggaacacgagttgggtccccggtggagagactctgttgggttcctgaagattagctcagggtctgttgtacttcccatcggaaagttatcagttggcttttgttgccaccgagcattactgttcaagaccctggcggattccatcaatctgccctgtcgcattgtgaagggatgcaagtactgcaaagctggtgctgccacttcttgcttggtgcgctttggtcatgacagggaatgtctaattgatttaattgggaacccgggattcttatctgaacctgactccctcttgaatggactatcatccatctctgtttcttcaccattgcgcccaccaaaacatgactcagctgataattctgataatttcaagttgtttgccaagaaatatttccttgattgtcagtcgttaaatctcatgttcagtgatccagcagctggaacggttatcgacttagatgaggttatgggatcaaatctaggtctaaactcatcacatgcaacaaacagtgattgtcaagctacctttactcatcttaaggctggtactcgacgcagtagtcaagatgggagttttataatgcagaggagttcccaagaggatactcaatctggactaagtgatccctttagcgatatgtcccttgagatagaagacttgattatcccatggagtgagcttgttctgaaagagaaaattggtgcaggttcttttggtactgtgcaccgtgcggattggaatggttcggatgtcgcagtaaaaattctaatggagcaggacttccatccagagcgtctcaaagaatttttgagagaggttgcaattatgagaagtttgcgacatccgaacattgttcttcttatgggtgctgtcactcagccacctaacctttcaattgtgactgaatacctatcaagaggtagcttatacagacttttacacaggcatgctgcaagggaaaatctggaggagcgccgccgcttgagtatggctttcgacgtggcaaaagggatgaactatcttcataagcgtaatcctccaatagtccaccgggatcttaagtcaccaaacctgttggttgacaaaaagtacactgtgaaagtctgtgactttggtctctccagattgaaggcaaacacatttctgtcttccaagactgcagcagggactcctgagtggatggcaccagaagttctacgagacgagccctcaaatgagaagtctgatgtttacagcttcggtgtaatcttatgggagcttatgacattgcagcagccatggagtaatttaaatccagctcaggtcgttgcagcggttggtttcaagggacaaaggcttgagatcccaagcagcgttgatccgaaagtggcggcagtaatcgagtcctgctgggtcagggagccctggagacgaccctcttttgccagtatcatggaatccctgaaacttctcatcaagacattaccacccaatcagctcctcgaagaaaattagttaccacccaagcaacttgcaaattatgtcacctctagagttttctcgatttgtttagatccgatatgcgccaggcctctcaaaccattcgtcttcggcgccacgtattccctgatgagaaatattcaaaactacacctgtcacaaaaggggaaaaactatggttggacaataagattcatgaaaaaaatatgtgatccaaattaagtgtacatctcttttatcaaggaaccaaatgtaagttggtcaaatatatacatataagtactaatatttatggaatatatacttttacaataaaattattaaagatataaa

SEQ ID NO: 22209 - DNA, 1463 bp, Zea Mays
ccagcagtcaacacacgctcccgggaacaaaggggcccgggtgctcgtcgattgggtacggggaggcggaggagctgggtcccttcctggtgcagaagggcaagccggagctcagatggaacaactactcctggaacacagaggccaaccttatgttcctggagtccccggtgggcgtcggcttctcctacacaaacacgagctccgacctgctgcaactcggcgacaagatcaccgctgacgacgcttacaagttcctgctcaactggttcaagaggttcccgcagtacaggtcccacgacttctacatcgccggcgagagctacgccgggcactacgtcccgcagctgtcggagaagatcttcgacggcaacagggcggggcccaaggagagctacgtcaacctcaagggcctgatggtcgggaacgcgctcatggacgacgagacggaccagacgggcatggtcgactacgcctgggaccacgccgtcatctccgaccgggtgtacgccgacgtcaaggccaggtgcgacttcagcatggccaacgtcaccgacgcctgcaacgccgcgctccaggagtacttcgctgtgtaccgcctcatcgacatgtacagcctctacaccccggtctgcaccgacgacccggccggctcgtcggcgtcgtcctcctacgacgcgcgcggccaccggaaggtcgccgtccacggcgccgcccccaggatcttctccaaataccgaggatggatcatgaagccggcgggctacgacccctgcacggcgcagtacgcggagacctacttcaaccggcccgacgtccaggcggcgctgcacgcgaacgtgaccaagatcggctacaactggacgcactgcagcgatgtgatcaacacttggaacgacgccgccttctccaccctccccaccatccgcaagctcgtcgccggcggcctcagggtgtgggtcttcagcggcgacaccgacgggaggatccccgtgacgtccacgaggctcaccctcaacaagctagggctcaagaccgtccaggagtggacgccgtggtacgaccatctgcaggttggtggatggacgatcgtctacgagggcctgacgttcgtcaccatccgcggagccgggcacgaggtgcctctgcacgcgccgcggcaggcgctgacgctcttcagcaacttcctggcaggcaccaagatgcccccaatggcgttcccctagtttcaaaagaattaaaaaaaaagtgcgtcctcttgcccggcaaagccggctgatatgtttatttcctcccttctcgcttctaccaaagttgcaagtgtaattcgattggaaaaaagttcagaaataaaagtcatagtgctgacctcaatgctcagtcacaacctcgcttatcgagaaatcattttttattttcttattactaaatacatcacagaccaacaccatcaagaacccgag

SEQ ID NO: 22210 - DNA, 1722 bp, Zea Mays
gagctctgctatccttgcacagggctccgaacacgcgtttccatggctctcctccgactccaagagcagtgctcgctcctccgaatctccagctcccaccacccaaaccccatcgatatcccaagaaatcctcgcaagaaccaacttttagtgcccaatgcggccaagattgccaacgcctccgaaattccggttcctcgcatccccactagcacttccaaggccgcaatcctggcccggaaggccgcgctttggcgggacgcccttgtccccgttgccgccgccttcgcgtcctgtccgctcccttccctcgcggcggagggcgacgggaaagagtacgtcttcaagaagtacaagcccgtgagcgccatcgacgcgttccgcaagcttcgcgacgtgccggaggtgcagctgctggacatcaggcggggcaagagcgtgcggttcatggcgccaccgaagctgaagcttatcgacaagagcaccgtgcaggtcgagttcgacgaggaggacgagaaggggtttgtcaaggaggtgctagcgaggttcccagacccggcgaacaccgtcgtctgcgtccttgacaactttgatggtaattcttcgaaagttgctgagctactagttgagaatggttttaaggaagcctatgcaattaaagggggcttgagaggtccggaagggtggcaggcggttcaagaaaactatcttcccccatctgtccatgttttcccgaagaaaaaaaggggcgcgaaattagctcacacagatgcaagcaatgatggaacatacgttcagcaggagggaagcgaggaatcatcggctcctccaagcaggtttgtagtcaacacaagcgctgaatccaaagatgtttatgaaaatcccaatggaagtacaactgctgcaaaacatgcaactaggagaccgttatcaccatatccaaattaccctgacttgaagcctccatcatccccaacaccatcaaaaccgacgaattaagagcaatgcaggacaataacatgtgtggaactcaaaaggtcagaagtagttgtctcctgcacaaacatttttgtatacttccaaccgtggatgtccaggagattgactgggatggcatggaagaggaccagcagtggtgtttggagctcttgctgctgttgaggccatggtgaattcttagttgtgtaatttgcgaagcttgtacccgtatgttgtactattaagtgggggcgaaatgacattttgtacctgacttgatacagtttggggtgccttagcgttctcaatttgacaattgtgcttaactcagttttattatcactggctcagacaccgtatataggtggcatcactataattgtaacagaggttcagttcattcacgctacgtacatgctggaagtggtttacattggggataccagtttgagcaacagcattacatcaaacaaagttcaaaatcttaatcaaaacgaatcaagtttgagcgacaacaattcatccaacaaagttcaaaatcttttacaaaaagaataaaaaaaatggcccatgcaggtctcgatccacgctacgtacatgctggaagtggtttacattggggataccagtttgagcaacagcattacatcaaacaaagttcaaaatcttaatcaaaacgaatcaagtttgagcgacaacgaatcatccaacaaagttcaaaatcttttacaaaaagaataaaaa

SEQ ID NO: 22211 - DNA, 952 bp, Zea Mays
tttgaaatctgctgtgcctagtgcttactataagctgaagaaattattagaatgtgcaggagcatggggaaggctgttattgttgctacaaatatgctcgaaagtatgattgttcatccaactccaacccgagcagaagtttcagacattgctatagctgtccgagagggtgctgatgcagttatgctttcaggagaaactgcacatgggaaaaccacatgagcgaaatgttcgcataccatgcaacaatgatgtcaaatacccttcgaacatcaatagtggttttcactaggacgggatttatggctatactgcttagtcactaccgtccatctggcactatttttgcctttacagatgaggagagggttaggcaacgattggctttgtaccaaggtgtatgtccggttcaaatggaattttctgatgatgctgagaagacatttggcaatgctttgtcttatttgctgaaacatggtatggttaaggacggtgaggaggttgcgctcgttcaaagtggtaaacatcccatctggagatcacaatcaacacacaacattcaggtgaggaagatctgatgcggaacgcacatagtattctgattgttggaggacatcgtttcttctagcaaaccgcaaggtcttgttacaatgataccacactggtagtaagtactggtattggtgagatagttggtgctgagctagtgttgtgattctttttcttacttgtgcactagtgctgttttccttccgtgtaaaaaggccaatccaattgccgcttggttttagctgtagctttgggaactgtaggcttgttgtaatacagttcgttctgtcaatgttaaggacttttgcctcgagagctaggcataactcgaagctcaccaaacagcaatctacctgcaaattgcaacgcattttgcgtctttacttccacgcttttggaacca

SEQ ID NO: 22212 - DNA, 77 bp, Zea Mays
cctcatctcttcttgcagattttcttggggaaaccctaggtggctacactccggatcatgcctagtacatttttctt

SEQ ID NO: 22213 - DNA, 1343 bp, Zea Mays
atcatctaaaaaggctaatataataaaaaaaaactgcgcgcactgctgtcaccgcggcggagggaaaaatcgggcgtaccccggtgcccgttcaccgccgttcacgccgcgtgtgcgctctggctctgccgctctctctctctcctgcgcgtggcgcaactgccgtcctataccaggcgcccaggtctagcctcgtcggtgccttcgccaggtctttctcgggcccttcgccaacgacgagcgcccgctaggttagaaggtatgcattcgtgttcataatattgtatttgactaaaaagactgggcctacgcatgggggctccaaaacagaggtggacttctgaggaagaggctgctcttagagctggagtagccagacatggagttggaaattggcgcatgatattgaatgatccagaacttagctccacattgcgctaccgctcgaatgttgacctaaaggacaaatggcgcaacatgaatgtaattgtcacttcatcgagtactcgtgacagggggagaacttccacgaggagaacccgagctgctcctaagaataatgaccaattgttggcaatgagcacaatcacttctgaggttgatgatgagattgttgatgtaaagcccatagtatcaatgtctgttgaaggatggaatacttcaaattcaaagaaatctcactcaaggctagacaatattataatggaggctataaagaacttgaatgagcctacagggtcccacagaactactattgctaattacatagaggagcaatattggccacctagtgattttgatcacttattgtctgcaaaactgaagtatttagctaccagtgggaaattgttgaagggtcaagaaggccagctgacttcccaggatgcaaccatgtatatctctgaaagcagttgcaacgtgaggggccttttgtgaaacccagggttcaaaccctgatcctacagcaccacaactgggtgcccaaccaccggccaccacactagtgcattctcatgacatcacctggtgttgtactccaagataagtaaaatttgtgcataatgttgaagtgtataagtggattgacaaccttctcccaccagagagaaagatgcaaacgtggaaataaatgggcgggggcacacataaagcctctaccaagattcgaactcgagatctctggctttgataccatgttagagtgaacgcactaaccagttcaacccaaaagtttaagctaatgaaagaaggtagccaatccacttatacacttcaacacataacaccatgagaagcctagttttcatcgaactgggacaactcatgtgccatgtttatgaatt

SEQ ID NO: 22214 - DNA, 3765 bp, Zea Mays
ggcaaacccttgtgttggtccagccgcccctcgccccgccgcaccaatcccccaccccatcccaacgctatccgctgccctcgccgcgcccccctcctcttccacctcgtccgccaccctccccaatccatcacatcccaccctaccccaccggccctgccgccgccgaggaggaggtgtccccacccccgtccgcagaggcagcagggatctctaccgggcatggagctggcgctcgcctccgcgaagccctcgcctcgggcggcgggggccttcccgccacttatcttctcgccgcttaaaccattcccgctcctccgcttcccgccgcggaggaccgcagcggcggcgctgcggctccggctccggctccgcgcggctgccgctgacgcgggcgagacttcccctggcgaggaggtgttcggcgcgcggcgggagctaacgggcatccagccgctggtggaggcgctgccgcccgcagcgcggacggcggcggaactggccgtcgccgcggcagccgtggcggcgggatacggcatcgggctccgcgcgggtggcgggtcgcgcgccgtggcggtggcgggggcggcagtgctctgcgcggccagcgtggcgggagcagctgcggtgaactccgtggtcccagaggtcgccgccgtggggctgcacaattacgtcgcgggccacgacgaccccaccaacctggacaacggcgaggtggaggcaatcgcgaagaaatatggagttagcacacaggatgacgccttcaaagcagagctctgtgacttgtatgccagatcgcaaggggtaggaacagtggctagtttggcggacttcatcaccacggctggcagcttgccgagccacgatgaccgaggtatctttactcagtacttcctccaggagatgaagatctcaaaggtacagaggttcaggcaattataaaatttaaaagtgctcttgggcttgatgatgtagatgctgctaacatgcacatggagattggtagacgcatatacagagagaggttggaaacgagtgatcgtgatgctgacatggaacaaagacgggcatttcagaagttaatttatgtgtccaatcttgtctttggagatgcatctgtattcctacttccttggaaacgtctgtttggggtgactgattctcagattgacattgctatgagggaaaatgccaagaatttatactcggtgcagctcaagtctattggaagaggtcttgacataggcacactcattgaagtaaggagagcacaacttgcatataaactttctgatgagattgctgctgagatgttccgtgagcacgcgaagcagctagttcaagaaaacatttcatcagcattagacatcttgaagtcacgtattccggatagtctaactcaggctgtggaagaagtgaatattgtaattaaatttaatagtttgcttacaacattaagcaaacaccctgaagctgataattttgctcgtggtcttggccctatttcattagctggagaggatgatcacgataggagagctgatgatttcaagatactctataaggcctatgctacagaagtactttcagatggaattgtggatgataagaagcttttcccctctgaatgaactgagaaacatatttggactggggaagcgggaagcagaaggaatcttatctgatgccaaagctcacatatacagaaggacacttgctaaatcatttaacactgaattagcttcagtccatagcaaagcagcatttctccaaactctttgcgaaaagttacagtttgatcctgaactggctagtaagatgcatgaagaaatttacagacagaagcttcagcagtttgtaactgatggagagctgagcaaggaggaagtggaagctctgatggcattccaagtgcgtctctgcatccctcaagaaactgtggacgctgcacatactgagatttgtgggcaactgttcgaaaaggttgtcaaagaagccattgcatctgttgacggatataatgctgatagacgtgaggctgttaggaaggcagcacaaagtctaaacctgaaaacggaggctgtcatgacgatctttagtaaagcagtacggaagttattcttgagctacattcagagagcaaaagaagctggaaaccgcattgaaactgcaaaagaactgaagaagttaatttccttcaacatagttgttgttaccgagcttttagctgacattaaaggagaactatctccagttgctgaaactgaagcatcaagtgcagcttcagaatctgaaggagaggatggtgaacatgaatgggaatcattggatacactgaggaagactagacctgataaagagctcaaagaaaagctgagaaagtcaagccagaaagagataactctcaaggatgacattccattgagggatagggctgagctgtatgaaacgtacctgatgttctgcatcactggggagacgactaatgtatcatttggaacagctatctctacaaagaaagatgattcagagtttttaatgctaaagcaattgggtgacatacttggtttaactcgcaaagaagctcaagatgttcacattaagtttgcagagaaagcttttgtgcaacaggcggaagtaattcttgctgatgggaaattaacagaggctaaggctgaccagcttgctaagattcaaaagcaggtcggtttgcctactgaacatgcacagaaaatcattaagggtattacaacgacaaagttatcttctgcaattgaagcctctgttgctcggggtcagatcggtatacagcaggtccgaggattgaaggaagcaaacttccaactagatagcttgattgcggagccgcagcgagaaagcatttataggaaaactgttgaagagctcttttcttcaggatattgcaaaggttaggttggagaactcccttgtccaggctattgcgttgcttcggcagaagaagagagatgatgtgctttcatctctgaatgacatgctcgcatgtgatgctgcggtccctgcatcacgacccttgtcatggcccacaccaggagagctagatgatctatttgccatctacctgaagagcattcctaagcctgagaagctatcaaggttgcagtacctgctcggcattagcaacgagaaggctaacgagatgcagtacgcagcctcggagggatcgctgccggttgcagctgaagagaaagaggagttggcgttctaggaagggagacagttttgttagggtagccaccggagttgaggtcccttgccaaggaacgaacgaacttggtgcctgtggcggacagctgctattgtagctaggcgcatacatgtttttggaaaaggaaatcgacgtgtaacactgacatatttattgcatgtctatctgtatagacaagtcaataacaccgacgctgttaggctgttgcattccaccaggccacactggaagcgttttgttttctggttcattgtttctcttttggtttaagaatgtattacagctatgactgccacccttgcttataacctggatttgttgttaacctacctggagtgcttaagggcccgttcggttctacccggattgtttgtgtaacttataagttttgatcgctggaacgttccgggatggaatccggaagaaacgaacacggctaaggggcagtttggagccttctgttgcttaccatcagcaacctctttgcaaaatgtgaaatctctctgttttactcc

SEQ ID NO: 22215 - DNA, 4167 bp, Zea Mays
ctttaatccgaagcgcacagtatttttccacgcagaaaccttccagaaacgagcggaaaagcgtcccccaacccagcacacgctgacgacacaccggcgaggcagacaggcagatcagccgcacctccccagtcccccttccccacctacgacgaccgccgcggacgaatcaaaaaagcttcctcctcccggcgtcgcctccgcgcgtggaggcgacgatccattccgccccccgtaggattttgctcctcccgatccggacgtcagatctcgagtggcggcacgcggatctgggggtttctctagaggcggcggcggcggccggaacaggggcagatggcgctctcggggatgcgggggctctcggtcttcatcagcgacatacgcaactgccacaacaaggagcaggagcgcctccgcgtcgacaaggagctcggcaacatccgcacgcggttcaaaaacgagaagggcttatcaccatacgagaagaaaaaatatgtatggaaaatgctttacatttatatgctgggttatgatgttgattttgggcatatggaaactgtctcgttgatatctgcaccaaagtatcctgagaagcaggttgggtatattgtgacatcttgcttactgaatgagaataatgatttcttaagaatggtaataaatacagtaaggaatgacataatcggacgaaatgagaccttccagtgcttagcattgacaatggtaggtaacattggtggtaaagaattttctgagtcactagccccagatgtccagaaacttcttatttcaagcagttgccgtcctgttgtcagaaagaaggctgctctatgccttctgcggctttataggaagaatcctgatgttgtgaatattgatggctgggctgaccgaatggcacaacttctagatgagcgtgatttaggtgtgctgacatctgtcacgagtctttttgtttcactagtatccaacaatgttgaagcatattggaattgtcttcctaaatgtgtgagaatattggagaggttagcaagaaatcaagatattccacaagagtacacttactatggaattccatctccttggcttcaggttaagacaatgagagctcttcagtacttccctaccattgaagatcccaacgcaagacgagctttgtttgaggttttacagcgcattttgatgggtactgatgttgttaaaaacgttaacaagaacaatgcctcacatgctgttctctttgaagctcttgctctggtcatgcatctggatgctgaaaaggagatgatgtcacagtgtgtggctcttcttgggaagtttattgcagtccgggagccaaacattcggtaccttggtctggaaaacatgactaggatgctgttagtaacagatgtgcaggatatcattaaaaggcaccaggctcagatcatcacatctttgaaggatccagatatcagcattaggagaagggctcttgatttattatatggcatgtgtgatgttacaaacgcgaaggaaattgtggaggagttgttgcagtaccttgatacagcagaatttgcaatgcgtgaagagttgtctctgaaggcagctattcttgcagaaaaatttgctccgcaactattgtggtatgttgatgttattcttcaacttatagacaaagctggagattttgtaagtgatgatatatggtatcgagtggtacaatttgttacgaacaacgaagacctacagtcatacgctgcaactaaagcgagagaatatcttgacaagcctgctttacatgagacgatggtcaaggtgagtgcctaccttcttggggagtatggacatcttttggcccggagacctggctgtagccctaaggaattgtttgctattataaatgataaacttcctacagtatcggcaagtactgtagctattcttctctcaacctatgccaagatattgatgcacactcaacctcctgatgttggactgcaacaacaaatcctcacaatatttaaaaagtacgagagctatattgatgttgaaatacaacagagagcagttgaatattttgaactaagcaggaaaggtcctgctttggcagatgtgttggctgaaatgccaaaattccctgaacgtgagtctgcactgttgaagaaggctgaagacgctgaaattgacacagcagagcaaagtgccataaagctacgcagtcagcaacaaacatctagtgctcttgttgtagctgatcacccccctgcaaatggatttgcaccaccagttaataatctcactcttgtgaagatgccaagtcaaactgtttctgacactcaggagagtggagtaagttatgaagaagctcctaagcctcctgttgaagctcccaaagaaaatgggactcctgtcgaagtgcagaacagggacacaaacattactgaaatcaacaatgagattaaagctgaacctccctctacatcccattctacctctcccggagacctcctcctggcagatcttttgggtcctcttgcgatagaaggccctcctgctgtagagcaaaatcctgcccaaggattgaatgctaatcaaagtccagctggtgacttggcacttgctacccttgatgatcagtccaactcagttcagccaattgtcaacgtcgaggagaagtttcatattttgtgcacaaaagatagtggggtgctgtacgaggatccttacatccagattggcttgaaagcggagtggcgtgcccatcatggccgtcttgttcttttcctgggtaacaaaaatacttcagcccttacgtcagtgcgggcgctgattttgcctcctagtcatttgaaaatggaactttcgtcagttcctgatactattcctccaagagcgcaggtgcaagttccccttgaggttgcgaatctccttgcaagtagagatgttgcggttctagatttctcgtatgcttttgggacttcactggtggatgccaaacttcgactccctgttgtattgaataaatttttgcagactataactcttacccctgaagaatttttctcccagtggaaagcgcttactgttcattcgctgaaggttcaagaagtggttaaaggtgtgaaacccatgcctctttctgagatggctaatcttttcatgagccttcacttggcggtcgctcctggacttgataacaacccgaacaatctggttgcatgcacgacattcttttctgaagcaacacgtgccatgctttgtctgatacgagttgaaacagatccacaagacaggacccaactgcggctaacagttgcctcgggcgaccaatatttgacattcgagttgaaagagttcatcaaagaacatctggttgatatcccaaggactcaggtcgccccacctcgcgcagcagtccagccacagttgcctactacagcacctgccacatacaatgaccctggtaccatgcttgctggattgctatgagaagtaacccgaaggaatagtgttttgatgtacatgacagttatttaatacgaggatctaacatctccacaagcatcttgctgccaagacgtacacgtggagcaaccaagaaagagctggcggagtgtagtctccatgaggattctaaaccgagaaagagcttagattctttttgtgcggtttgaaggccccctccctctccatgtagcagttgccgtattgtgtaagcgtaacttgttgtttctcattattatcatccccttttggtccatttgtataacctgtatcgcccatgtctggtggtggacaatcggtagtttttgtgtgttaatataaggtgctaggttttcccaccatgccgattgtaaagttgccctggtgcgcattgcactgcgatttgtacggaatagggaaggaaaaatttataggttttgctttgtgcatgttctatggtttgcatagctcccatctcttgatttcctttttcttctgctgctatgtggtggtgtgtgatggttcacgaggctcgattgtataatgtaacctggttggaaccggtgctccttttcttttggagttcccaattcatggatgtacacctgtgtctctctctctcacgcacgactcaatgatggtgcgtgcttggtacgataacaacagctgctagagtagacaggtgatggtgtggac

SEQ ID NO: 22216 - DNA, 1681 bp, Zea Mays
cctgtcttccccagatccaaattgtgcagggtaggcagctcgtctcagcgattaccagccgcagacacaagagcaccttgctgtgaacttgtaacaggtttgaacttcgaaggaaaagataattttggtgctgtgattgatttcactgtgaggagtgaaatgaggctaagtattgggcaagtccatcgaaatgttcttgcgctggcatcttctcggtcatgttttgttctgggagatcgtgtttcgttcaggatgctgtcccaaccacgggtagctggatttcatcagactgcttggcgtggtagtcaaattttggaagataacaggggaggaccattgactcttgctagcctagaagtgcaaagcagggttgaatatggaaaaaaggggaaaatggaacgaactggaggtccaaagccaagttcaagagcttcttccctctatgtgaaaccaaaggtttcttcaaatgtcaaaccagcaaagagtgccttgatgaagccagctgggataaagaagacactgaaggtagatgaggctctgttttcggccaagtcatttgaagaacttggtttgccacctttgcttgttgaccagttgaacaaggaaggtctgactgccccaactgaggccctctgaagaggactatggaacaagaccattctgagaaaagatcaggtatagaagcagtcatcgttgctccttcgagagaattaggaatgcagattgtgcgagaagtggagaagattttgggtcctaatgacaaaagactggtccagcaacttgttggcggagctaatcgttccaggcaggaagaagcattgaagaagaacaaaccaatcattgttgtcggaacacctggccgtatttctgaaatttctgcagcagaattttggagcatgttggaaggagacctggaggcacatctagggatattcttggcccacttgcgagacgatctgagcgtcagactatcctggtttctgcaacaataccattttcagttatacgagcagcaaggagttggggtcatgatccagttctcattagagctaaaagtgtagttccacttgattcaatcactgtgccaagacctgcgttatctcaaagtgacgctaaccccagttcgtcatcgcagtcagtgaaccaagctgctgttggcagcttgccgccatctttggaacactactattgtacggccaaggcgcagcacaaggttgacacattacggaggtgcatccatgctctggaagcacagacagtgattgcatttatgaacaacaccaagccactgaaggatgttgtgtttaagttggaggcccgtggtatcaaagccactgagctacatggagaccttggaaagcttgcaaggtcgacagttttgaaaaagttcaaggatggtgaattcagagttctcgttacgaatgagctgtctgccagaggactggacgtgccagaatgtgaccttgtggttaatctggaccttccaactgactccacacattatgctcacagagctggaagaactggacgtcttgggcggaaagggatcgtggtcacaatatgcgaagaaagcgagggatttgttgtaagaaaaatgcgcaagcagttagatgtggccatcaagccatgcgagttcactgaaggcgagcttgttgtccacaaggaggaagatgtggaataa

SEQ ID NO: 22217 - DNA, 1618 bp, Zea Mays
ggagtccaaactccaaaccaaaccggcgcttctcccacgtcttctcgagttcccacgcgcccgcctgctataaatcgcatccctcaatccccactctttatcccctcctcagccatcgcctccctctcccctcaacccagcgcccccctcccgccgccgctagggtttctcctccctccccgcccacccctaaatcatttccgaagcttccagtgcgccgcagccatgagcgacggcaaggactccctcgacctctccgccctcggcgctgccatccccaactcggccgagctcagcgcggaggacaaggctaaccttgtggcgtcgatcaagaacacgctcgagggattggcgtcgcggcataccgacgtgctcgagagcctcgagcccaaggtcaggaagcgcgtcgagaagctcagggagatccagggcgaacacgacgaacttgaggcaaaatttttcgaggagagagctgctctagaagctaagtatcagaagttgtatgaaccactttactcaaagcgttacgaaattgtcaatggtgtggtcgaggttgagggtatcacagtagaaagtgcagctgaaacccctgcggagcaaaagactggagatgagacctctgctgatcaaaaagaagaaaaaggtgtaccagctttctggcttaatgcaatgaagaatcatgaaattctagctgaggagatccaggagagggacgaggaagctctcaagtacctcaagaacatcacgtggtataggatcagcgagccgaagggctttaagcttgaatttcaatttggtacaaatccgttcttcaagaattcagtgcttacaaaaacatatcacatgattgatgaggatgaaccaattttggagaaagccattggtactgaaattgaatggtaccctgggaagtgcttgacacaaaaggtgctaaaaaagaagccacggaagggttcaaagaacactaaacctatcacaaaaactgaagattgtgagagcttcttcaacttcttcagtccacctcaagtccctgatgatgatgaggaaattgatgaggatatagctgaacagttgcagaacgaaatggaacaagattatgatattggatctaccatcagagacaagattatcccacatgctgtctcgtggttcactggagaggctgctcaagatgaggagtttgaagttatggatggtgaggatgacgatgatgaagacaatgatgatgaagacgaagatgacgaggatgatgatgatgatgatgattacgattcaaagaagaccaagggaactgccggaggggaagggcagcagggcgaacgacctgcagagtgcaagcagcagtgaggtgctgcacaatgaatgttggcaggcattgtttgtggagcaattagtttggttctgcttgatgctcaagccgacgttccaggggccactcaggaaggaacagacggctcctggtctacagggttgtctccacttctctattgaggcgtctgggtcctacagggttgtctccacttctctattgaggcgtctgggtcctgtaccggcatctactcctttttcctgtacatgtataaatatcagaagcaataaagaataaggtgcctctgga

SEQ ID NO: 22218 - DNA, 1078 bp, Zea Mays
gcgtcgcgtgtggcgccaccggcaggcgcaggctgtgcacacgacacggtcagtccgcagcgcactgcagtctgcgcgtggcggtgcacccattccttctggtcccgtgacaagcagcgcgctagacacacacgcgcgcgaacacgaacagggacacgaggccgcggcggccatggcgagaggcggcggcgatcggagtcgggaggatgatcccttctccgacggcggcaccaccgaaaccgactcggacgagtcctctccgcgtggggtgggggcccgcggtcccggctccacctccaacccgatcctgacacgcctcgcggtgtcgcggaactcgagcccgctggccgcggccaccgcggccccaggggtctgcctcctccgcttcgcctgggagtccgccgcgggctccctcgtcggcgccgtcgttggctacggtaaaggtttggttatgatgaaggggattaaaggatcatttgctgatgctgcgtcatctgctaaggaatcaatgcaggagtcgcaggctgttgcactggccttgctctgagctttccaggtgcaccacaaactctgattcagagctgcttgacctttgggactttctcttacatcattgagaagctaaacaagcagcaacctgcgctggcgctcctgcctgcgacaggtgtgatggatccgaaggctggacaaagcgttcttccttccttcacacttcctcctctggataccatggacgaattttctaagttccaaaactttttgtcatccaaatttcggggaaactgagttatcctggtggagtgacgcctagttatctactctggaacgtgtccttgtaaatgcgtcaatggtcaatctgagttttttttccccttgtttattcttcgccaatgtatgtttccaaattccaaggtagtgttttggtagtgttgatgattctaccttgacatatcgaacacaatttgtaaataaggcgagcagcttgtcctttgttcaactgattggatcttcggagttttacccacagaccgtgccccgtaagaaggaagaacatgcaccttgattcttacgagtgtgt

SEQ ID NO: 22219 - DNA, 1693 bp, Zea Mays
ggctgtacttgttagccatcaacctcaagataataaaagaagtgaggtagcaagttctatgagatcacaactacaagaatcatgatatcatagtattcagggtttggatgatcaaaatggaaatggtacacctagtttgccagtttctgatacttcaaataatagcaaccattctgaagacgtagatggaaattctggggacattttaagtgacccaaaccttggctctaattttcttcagtatgctgaacctggggagcaaaatagcttaatgcttaatggaactatcatatcaaatgcaaatgctggagatttttttgataattccagccacagtgatgggtttctagagctgaaggattttggagatgctgcaaatctggatttccctttgggcaatggatcatccatctggcctttggattgttgggcatggaaaacacctgactcagcggaatctttaaatggaactaatgatgagattcctccacttcctgatgaccagactttccagccagatgagctggaacaactgttacagtcaatacaagaagattcccatttaggctcaagtatcattgaccccccacattcttctatgacaaattcagttctgcctgatgaggattgtttgatgttctatgatgcaccgttcgattccaccatgtgtgatgatgggtttgcacagaatgggatccttggctctgcagcaaccaatctatctggtattggcatggtggacgatggtatgccatactttgatgcaatggatggtaatttatttaatgacattctgggctccatacagcagccagatggtagcagttcccatgcttttaatggcccagtccttacccaagagatggtcaggctaagagtagtactattggaaagggatttgtaaggattttggattcgatctctgctcccccagcttttgcaggagagttcccatctaaccaccgcaaatccttggctcgtatttctggagcgcgccccaacacactccatgtttctgctgaagtgatccatataggaagtttagctgttccttctggcgcagataagtgggcgctgcaaaaggatcaaggcatggagctgctcttctctgcagattttgaacctgatgcccgtatacattgtggctgcaacaccattaccgcggtgctgcgtggtggcttctgccttttcttcgtttcagcaataatgctcttagtgagctacgaggtgggcatgtgcatctatggcaagtagcaacctggtactggtctaagataaatctcacagcatttaggttaatcctatgttttgaggcagactcaactggggtctggggcctcctgctagcttttaagtgtgccgcattgcatggcatggacctgtggggtgtttagcactagcagtaccattttgcagctcgagagctaatggtgtatgtatgaattcagtgctatttagaaatactatgagaattgcctcattggcgtgtgatgatgccatttgccatgcttgtggtcgcagtggtcaatgttagtgcaaaatattgtatatatatttgagatccaccataggaatcatgatgcttgtgcagtacagttgtgttggtgttttgagtgtttgcaggtttcaaaatgaatgttaatcgtgttgcaagccatgaatgaaagttttgaagaaaacccaagttaaaaaa

SEQ ID NO: 22220 - DNA, 4185 bp, Zea Mays
tcccccgatccgacggctcgatccccagccactctttatcctccgcacccgctcgccccgtcgccctgcttcctcacaacttgccccccctttttccgttccgttccctcgctcgtcgccgcgcgcgctaggttagggtttcgccgcatcccggccgctccgcccgcttcggatcgttccggtgggaggccatggcgatcgtgaggaccggagccggcaaccgggtccccaggcttgacggcggcagtgaaggctcgccggaggccacggaggacgacgacaacgaggaggagtcgcgggccacgccgtcgcaagagtccgaggccaacggcttctccgtcgacgacgacgatgcccagcaccgagatatgccaggtcggggaccagagtgttgccgtgccgctggagctctacgacctcgacggcctcggcgacgtgctctcgctcgtcgcctggaacaccctgctcagcgaggatgagcggctgcgcctcgccgcctttctgcccgacatggaccaggagacctttgcgcgcacgctcgtcgaactcttcgcggggcgaaacttccactttgggagccccctggccgccttcttcaagcgcctcaagggcgggctctgtgacccgagggtcaacctgtaccgccgtggtacccgtttcgcggagcggcgcaagcattgctactggatccagagctaccacaactccatggtgcggggcctccgggagatcaaggattgcttgaagggccacgagagatacagccttgctgagaagatcaggatgttgcacacgttaaaggcacagcagcagcagaggaaggctctagagttggcgaggcgggctgggtcggagactgattccgagagcagagggtctggagaacaggtcttagatcggctcaagcatgataagagtggacagaagaagtcggggaagttagtgaaggagaagtcgaaggggctgctgcgagcgggtatgccgaaaggagtggatgaggattacatgggagggtctggccgcgatgctgtgatgtcactctctgagctttctaggtatgatccacgcacgcatagagggaagcttcccaggagcatagagggccattactcggaggaccttggatatggaagggattcatcaagatcttggtttcagagggctctgcccaagccagtgaagaaggaattaactacgacctatgatggtaatctgtatggaaataactacagtgataaccatactgcctctccttaccactacggcaggaatcccattgctaatcagggagttaccttagcagcagcatatgatcctccttattttgataccagaaggaattcaaggtactcgggtagagactgggcacagggtggaaaaggtgtgcacactaacgctttaatgggtgatgagatgaactggccagctggtatccacactggtacattacatgacaggcagaaggggcagtctgcaggtgattacaggagcaggaaagatcaagctggttatggcctgaaggttaagtcctataaaagtattgaccagcaggttaatgatgcccatgttggttctgaccctagaagcaagatatcacaagcgaagatggcaggtaaatccagtacacaactagataggactggccagaagcactccaggagcaatgctgtctatgctcaaagtgatgagacagaatctgattcctcggaaaagtttgaagatggcggggaagtgcattatcttgaacggaagccagagcgtcaccattctgggtattatagaccagcacatggtgccaaaaagccaaacaagcttgctaaagtggccaaaatgaactatcctactactgatgcagatttagaaccctcccagagcaaaggattcgaagggaagggttcagagactggctatttacgtgatgtggatgtgatggtgacagaacagattagtgatgtcatgaaacctccagcagcaagtggtgaaaggaagcggaaaggggcgggaaatctggacatgcatgtttatcataactctgatctgcatgaaattaatgaagatgcaaatgactcatccaggttggcggagaatgaaaggtttgctagtagatcaggccatgcaggccaagattctaatggtgattatgttggtactgaaagagtcagctctagctccaaaaaagcaaaaggaagagtcgaagttcctagcctggatgagcatggtgagcatttgtcatctggctcaaagcttgttgagaacattggtggatccaagaagaaaaacaaaaaaaagccagagagcagcaccacagatgcagctattatagcagaaccagctgctgctgtacctgaaattaatgtggtagctgcagagcctgagaaggttgagaagcccaagaagaagtatgtaccgataacaccaacaatccatactggtttttcgttctctgttgtacatcttttaactgctgtaaagaaggctatggtcactcctgctgaggatactccagccacagcgaagcaaccagatggagaggagggcaaaatttgtttcaacaatgaagaacacatcaaaacacctcatcaagaacaaagtacaacagatcaaactgaacaggtccttgagggtgcaaatgccagtgctgcagaacaaactgtaccaatcaatgcaccggcgcttactgttcaagagattgtcaatcgaattagagaaaatcctggagaccctaggatacttgaaacacaggagcccctccaagatttagttcgaggagtattgaaagtactttcatctagaacagctcctctaggtgcaaagggctggaaagcattagttgcctatgagaagtcaaacaaaagttggttctgggttggtccagtaccttctgtttcatcatatgatgaccctgatgaagaaacttctgctgaagcatggagtataccgcacaagatgcttgttaagttggttgatgcattttctaattggctgaaaagtggtcaggaaacccttaagcagataggttcccttccaccacctccaccaccaaatcctgcaaacttggatttgaaggaaaggttcaaggagcttaaagcgcaaaaaagtctgaacactataagcccaagctcagatgaagcaagggcatatttccagcgtgaggaatttttgaggtactcaatacctgatagagcattttgctatactgctgttgatggggagaagtctatagttgctcccttgagaagaggaggtggaaagccaacggcgaaagcgaggggtcaccccatgctcttacctgatcggccgccacatgtcactatcctctgtcttgtaagggatgctgcgtccaggttgcctgcaagaactggaactagagcagatgtctgctcactactcagagattcacaatacctaaaccatgaagaagccaataaagaggctgcaatcaatcaagtcgtcagcggagctctcgatcgtttgcattatgaacgcgacccttgcgtgctatatgacaatgacaaaaaactgtggacctatctgcacaggggcagggaggaggaagattttgaggatgatggcacatcatctacaaagaaatggaagagaccaaggagggatctctctgatcctgcagagccaggtgcagcaaatgatgatgttgacgacgagggcactggcacccctccaggaagcaatgcaaaaaaacaaaaggcagaccatggagattctacattgtcaggagaagccaacgatgagggaaatcatccaactcagaatccgtcttctggtggcctggaaggtgatcctgatcttaatgcaagaaattacgaagaatcaggtggagttgtttacatggatgcaagaacagatgttggtgttgggtcgaattcaatagatgcaaaaccaggcagcagggctgatgataatacagcaagctggcagtcactcccagaacagaataaaaccagtacggcgctccctgaggacaccagcatggatggtaccccagggccagcataggtgatttgtgcagaaaccagttggctggtgttaggagaatttgtttcatttttaatgttgcttctcttcccctctaagctgcagatgtaaacttggaatcctaagattggttttcagtacagctcagtccgttttatagtgaaattgccgtgctatactttccgcgggatt

SEQ ID NO: 22221 - DNA, 171 bp, Zea Mays
ctcgccactggggttcttaagaccagatcaggttcacgccaaccgagagcacagatacactgtcgtctagcctcttgccacggagggtacacgctactctcgccatctctcaactcccattgcgtgttatcttattctggtattagtctgcccgaggcaaagcttacccat

SEQ ID NO: 22222 - DNA, 875 bp, Zea Mays
tattttgtggagattaggagccaaatcaaggtttgatgttgatgtacctggcaatatggtgtacaaggaaagtcgtttcacagccgcaggtgatactattgttgctgtggatagcccttttggacggttggggcttactgtttgctatgatttgagattcccagagctttatcaaattttgcgttttaagcatcaagcacaggtattactagtgccatctgcattcacaaagataacgggagaggcacactgggaaattctcctccgagctcgtgcaattgagacacaatgttatgttattgctgctgctcaagctggaaagcacaatgaaaaaagagaaagttacggtgattctataattattgacccatgggggacagtgatagctcgacttccagatcggctctccactggatttgcagttgcagatcttgatttgtcaaaagttgaggctgtgagaactcgaatgccaatttcagagcaccggaagttcgacagcgattggaaacccacgcctctttagtagctgagggtttattttgtgtttcctatgtttaatgttagcgtgggctacaaagctttgaataggtgtaaacgctcagaaaaaggtgaattggtctaaacgcccccaaaaaagatatatagtggaaggatcaaaatgtataagaggtgaattgtataagagggaggtgatgagttagtctaaatttattttgcacaaatgacaccgaatattcattatacatgtgacatgatagaaatcacatgtatagcttcatcgtacattgtattgttatagaaccaatgttcatgataaatctttccttgaagccgactggttcattacatgcttaaaccttatcgtagttctaaaa

SEQ ID NO: 22223 - DNA, 860 bp, Zea Mays
aagcgaggggatttttctaattctaacatgaaaattcgctcccacaggaagtcaaacacaggtggacctgaggagagagagattccagtgctggtattttctgcaggacttgcagacataattgaagaggtcttccggcagaaattacacaaaacattcaagaacatcaaggttgtctccaacaggatggtgtttaatgaagaaggccgcctcatagcatttaaagggaaaacaattcacgttctaaacaaaaatgagcatgccttggacatggctgctccagtgcatggcaatccgggggatccaaacggatctatggatgactattcattggtgaagaaaaggaccaatgtgctgctacttggcgatcacattggggacttggggatgtctgatggtttaaactatgacaacaggatcgctgttggattcctgaacgccaacatcgagaaatctttgaaggattactctagcgcgtttgacattgtatatctgaacgatgctccgatgcacggagttgtgcaacttgtgtctgaattatgtccataatccagtgatcttcgaatcgcccctcagaaaaaaagtatatcttcccatcaactttgcagctaccgaagttcgctcacctggaaatgtaaggattccactcttgctaactagggcttgcttcatgagcagctgttctataggctcatttcagggctaaagagcccttggaacaatgttttttagcactagtgcattcaaacacccactgtagatattttctcctcctcttccaattcgaaagatccgtgaatgtttttttctgggctgtggagtgaatctggtctttgctgcgttctggcgctagacccaag

SEQ ID NO: 22224 - DNA, 105 bp, Zea Mays
cgcggagcggtcggcccgccttccgctccccgggcagcggttacaccttaatcgacacgactctcggcaacggatatctcggctctcgcatcgttgaagaacgta

SEQ ID NO: 22225 - DNA, 3013 bp, Zea Mays
taagcctccatttcgaaaccagttctgccgtgtttcataatggaaataatctcattgagcccgagttccttcaaatgccagatagcccactggagacaaggtcacaaagatgaatgtcatccaccaactgttaatactaggcccgatgatgaaggaaaggctgaagagggaagagctgcccaagagaatgtatcagttggtgttaaacaggtttctgaaatgaacaaaccagctgttggatcagaaacttctgatttaaaccataatttgaagagctcaaatggtaaaagtaaacatacgctttcagaagcagtatgtaccagtgcaaaggttcctggaggtcatcagtccaacagcacggtcgaaatttctgaaaatgttccagtgtctgttgacagtagtaagatgggatcaagtatgaaacatgcaaatgcaaattttggtgaagatggttcttccaccaaggacttaaatggggtgtcaccatgtaagtctcagtcttctccatcaaacataaatggtcatagcagttttgtaaacgatgaattctgcaatcattccaaggaacaccaaagagccaaggatggcagtgttgttgatgattgtcttcagacaagcagtaccagagagcttgaagacagtagcattccccaagcagctgcatatgctgtcttggagcccaaaagttctaggactcctattcatgtagaacttgagaggtctaaaacgaaatctgttggtaatgacagcattcagagcatgaaacctgtgccttctgcattgactgttgacaaagccacttcagttcgtgggaattgttctattacacttaattcatctaaagtagcagataatcttcctgatagaaattttgaaccttcagataggtcaggttcaacagcgaataaccttgcaacatctctgaagaaaatggtcaggcagcaaactgcaccaaaagttgtgaggcattatccatcagaatctacactcttcccatatgaactttttgtgaggctctatgtcaaggttgagttgcgcccgtttggtcttcataacctaggcaacagttgctatgcaaatgctgttcttcagtgtttgatgtttactcgaccactcacaacatatcttttggaagggcttcactcaaaaaactgttctcaaaacggatggtgcttcatgtgtgaatttgaaaaactcattgtggagggcaaacggcgcaagattgccttgtcaccaactgggatactctctcatttgaatgacattggcagtagctttggtcctggtaaacaagaagatgctcatgaatttcttaggtatgcaattgatgctatgcaatctgtatgcacgaaggaagctagaaaaggaggtgttcttcggtcagcggaagaaacaactcttgtccaattgatatttgggggctatttgcgatctaagatcaaatgttcaaggtgccatgttagttctgaacaatgtgagcccatgttagatcttactgttgaaatagacggtgacattagttcgctcgatgaagcacttgtgcgctttacatccacagaagccttggatggagaaaacaaatatcactgcagcagatgcaaatcttatgaacgtgctaaaaagaagctgacaatagaagaagcgccgaatattctgactattgcactgaaaagatatcagtctggcaagtttggaaagatcagcaaagccatcagatttccagaaaccctcaacatagtttgctatatgaatccagatactgatgacatatcgccagtttacagcctctatgcagtggttgtccatcatgatgtcatgaatgctgccttctctggtcattatgtatgttatgttaaagatacacatggaaagtggttcaaggcagatgacagtcaggtgaaacctgtatctctggacaatgttatgtcaaagtgtgcttatatgctgctgtatgcaaggtgttcaccgagggcaccgagctctgttaggcaggctatttcggacccagcacgcccgaagaaggccaaacagaaggtggttccaggaggaacaacatggcgaggaggttctttcaacaggcaccaagatggtcagcggcatagcaaccacacggcagatgaccttacccatgcatttgacgaatataggaatgcaccatattcgccttcagattctccgagtcctagtgagagttcatccctctttagcaactctgatgcagggtcgcacagcactgtaagcaccgatagcagcgagagcacgaggaactcgaccagcaccgaggagtatgagtatgtgttcggagctgctgatcagatgtacccaggaggccccatgggaggagcacctgtggagagtgatcaaatgtacccaggaggccccatgggaggagcacctgtggagagtgactattctacgtattcccgatccaggtccagcttgaataccagctcatcaggccgggatgcatacagtgcggctagctctgccgaccacaagcatcaggtcgtcggttccggtgggcaggttgagggcgatgagagcacgtccttgttgtatactgacagaagtaatcagcagttgagcagtaagttaacagaccaatataggcagttagatgggagcggacatgaccctggagaaaccaggggcggtgtcttattgagaagaccatctagggacaggaccgctcaaacattttattgatgtgcagggtttgggctgtagagaaataatgtaatgtagcctgtaatattatctcgctgcattgtgtaaaaagagaagagagatgtcgtagtccataaaagttgaatccccaacttggtgatataatcccgaggaacctgtaacaaatgtcacgtattccacgggatcgacgtaggactgtaggagtagatcataagattaatgcaaaagttcattgaacacagactctgaaatctgtgggcctggcaacgctcaaacagatggcgtgtcactactcactagtaggctcgattttttgcaagtacaa

SEQ ID NO: 22226 - DNA, 2180 bp, Zea Mays
ctaggtcccccgcctctcatttcccccctcctcccgctccccttggctccccaagcctcgacgcccggctagggttttgcctccttcccgccgccgctgtttcagcgagcgagaccgagtggtagagaaagagcggtgcttagccacccatgtcgctgcgtccgagcgagcgggtcgaggtacggcggaaccgctacaaggtggcggttgacgcggaggaggggcggcggcggcgcgaggacaatatggtggagatccgcaagagccgccgtgaggagagcctcctcaagaggcgccgtgaggggctccaggcccaggtccctgcccctccctccggggttgagaagaagcttgaaagcctcccagctatggttagtggggtttattcggatgataataaccttcagcttgaggccaccacacagttccgcaaattgctctctatagagaggagtctcccccatcgaagaagttatcaaaacaggtgtagttccaagatttgtgcagtctctcaccagagaggatttcccccagctgcagtttgaagccgcatgggctctcacaaatattgcttctggcacttcagaaaatacaaaggctgttattgaccatggggctgttcctatatttgtgaagcttcttgggtctggtagtgatgatgttcgtgagcaggctgtgtgggctttgggtaatgttgctggcgattctccgaagtgccgcgaccttgttctcgccaatggtgcgttgatgcctctgctagcccagttgaatgagcatgttaagctctccatgctgcggaatgccacctggactttgtctaacttctgcaggggaaaaccacagccatcatttgatcagactaagcctgctctgccagcacttgcacgacttatccattccaacgacgaggaagttctcactgatgcatgctgggccctgtcatacttatctgacggcactaatgataagatccaggctgtgattgaagctggtgtttgcccccggctcgtggagcttctcctccatccatcaccatcggtgcttatacctgctctacgaactgttgggaatattgtcactggagatgatttgcaaactcagtgtattattgatcatcaagctcttccccgcctcctgaatctgttgacgcagaaccacaagaaaagcattaagaaagaggcatgctggactatttcaaatattactgctggaaacaaagatcagatacaggctgtcataagtgccggtatcatcgctcctttgttgcaactgcttcaaacagcagagtttgatatcaagaaggaggctgcttgggccatctcaaatgctacctctggtggttctcatgagcaaatcaagtacttggtgtctgagggctgcatcaagccattgtgtgaccttcttgtctgccctgatccgagaattgtaacagtttgtctggagggtctggagaatattcttaaagtagggcagcatgacaagaccatgggtgcaacaggtgacactaatgtcttagctcagatgatcgatgaagcggaaggcctggaaaagatcgagaacctacagagccacgataacaatgaaatctatgaaaaggctgtgaagcttcttgagacatactggatggaggaggaagatgacgcaatggctactgccggggaagctgctcctgctgtttttgactttaaccaaggtggcaaccctcctgctgctggtggtctgaacttcaactgatacagtctttgatcgaaagggtgttaattccctcagtgatgggcttggcattggcttgtcgtgacaaatgtagtctggtcgactccacgtgggatataatggtttgtggtgagtccaataaactcaagatttcgaagggagatgggctgagcattatattcccaagtgaaccatggctatcaatatcgcagggtctgtaacaaggattatataatcgtcgaacattagagttgtccggagtgggtaaacctgagtgggaacatttgagcatattgctcggccttgttttactacggtcgaggctaaattgatttctaaaagctgtttgcttctgcattgttggcgggaaaataaggcgaatgttttgatgccaaattcaatttcgagttaagaggcagatacaaggcccttcacaacgcaaatcttaccaatttcttctcaacagt

SEQ ID NO: 22227 - DNA, 4170 bp, Zea Mays
cccaaccacatgcaacacacacttcgcatttgcatccatccctcgctcggttatgaaattttttaaaccccttccgatcctaaataaaacggaaatcaaccccacaaaacccctgcgtaaagagacccaattgctatctcctccagcatccacccaacggatccgcggcaaccgaccacccatgggatcgctccggggcgcggcagcctcctccgcggcgccgcgcgcgggcgacctggtgaccacgcaggttagccttggtggatttgatgccaccgtcaaggcgctcgatctcgccgacttcctcgagttgaatgcgggctcggtctggcgctgccgcctcaagacctcctggactccgccggacgcctatcccgacttccttctccccaccgtcacctccgccgccgcgccgccgccacagtacgatcgcgtgcctccgcacgccttcgtccactttgcgcgcccggagggcgcgcgcgccgccgccgacgcagcgggccgatccgagctcatcctctccggcaaacccctgcgcgccgcctccgcacaggacagctcccttcgggcatcccgccgccgtagtgtctcgccattccgcttccctggctcgcgcctcgaggtcggggatctcccggcctcggacgccttcatcgccgcctggcgcggcccggcctctgggctcgagttctccgtcgacccgttcgacgggtcttgccacttcatcttcgcccgcgacaccgctttcaaagtccgggagttccgcgagtctgtggtgatgcgctgcgacgtcaagctccagttccccgtccgcgatgttgcggaagtcagggtgttccggctcgactgctcgctgctgatccggctatcggccgcaccgctggtctgttaccgcacggcggatgacgacatccacgtgtccgtgccgttcgacctgctcgacgacgatgacccgtggatacggaccacggacatcactccaagtggtgcgattgggcggtgcggtgcgtatagaatcacattctcgccgcggttctggccaaagatggaacgcgcgctgacgtacatgagggataggagggtggcgatccttgattgcgttggagggtggggggccaggagggggctcaccgtgcgtgatgagcctgagtttggggagcggatgcaggacctgttcttctgcgtgcagcacgccgagggtctcaagtttccggtgttgttcctcgtgaatgctctggtgcacaagggagtaataagtcaacaccacctcacgcctgaattcttcggtttgctccagaggaaggaggatgatgtgaatgtggctgccttgagggaattttggggggacaaatttccagtttttgatgcatgtgggaggctgaagaatctgcaggatagggttgccaggtacctgaaacatcttcgcaacaagattggggatgtcaattctgaggtgaggaggctggtaatcacgcccaccaaggcttattgcatgccaccagaagtggagcgctctaatcgcgtcatccggcattatagtgaagtctcagaccggtttctgagggttacttttatggatgagagaatgcagatgctcaacagtaatgtgctgaatttctctgctgcacaaatcgtcaaagatttgatgtcaaactcgttcctgcataagacaacagtgtacaagcgtgttaaaacgtttttgacagagggattccacatgtgtggcaggaagtactcgtttcttgcattctcatctaaccagctgagggacaggtcagcatggttcttcgcagaggacagaacgacaacagtggaaaccattaggaaatggatggggcggttcacaagtaagaatgtagcaaagcatgccgctcggatggggcagtgcttctcctctacatatgctacggtggtgctgcagccgcatgaggtaaatgagtgtcttgatgaagttgaacataacgggtacattttctctgatggaattggcaagattacgtgcgaccttgcactcgaagttgctcagaagctgcaattgacagataatcccccatctgcttaccagattaggtatgcaggcttcaagggtgttatatctgtctgggaaggaaaaaatgatgggatacgactttccctgaggccgagcatgcacaagtttgagtctaaccatactgtgttagaggtggtctcgtggacaaagtttcagccaggattcttaaatcgtcagattattacattactgtcctccttgaatgtcccggatgctatctttgctcaaatgcaggaagccatgttatctaatctcaacaatattttgtcagactctgatgttgcttttgacattgtaaccgcctcttgtgctgagcaaggaaccactgcagcactgatgttgagtgctggcatttcacctggaactgagccacacctgaaagcaatgctgttagctataaggtcctcacagctgctaggtcttttggagaagacaaggatttttgtgcccaagggaaggtggttgatgggctgccttgatgaacttgggatccttgagcaagggcagtgctttatccgggcatcatctccatcactcaataattgtctggtgaagtatggatcaagattgtctgcagcaaacacaaatgcagagaccattctgggtactatcgtaatggcaaagaatccatgccttcatccaggggatgtccgaatccttgaagctgttgatgtgcctgaactgcatcaccttgttgattgcttggtcttccccaagaaaggtgagaggccgcacgcgaatgaagcatctgggagtgatcttgatggggatctatacttcgtaacatgggatgaaaaccttataccacctggtaaaaagagttggaaccctatggactactccccagctgaagcaaaacaactgccacgcgcagtatcccaacatgatattgttggtttcttcttgaagaacatggtaaatgagaaactgggtccaataagcaatgctcatgttgttcacgctgatatgagcgagtatggagcaatggatgagaagtgtattcagttggcagaactagcagcaactgctgtggacttccccaagacaggcaaaattgtgtcaatgccagcatcccttcgaccaaaattatatcctgacttcatgggaaaggaggatgctatctcctatagatcagagaagatccttggaaggctttatcggtcaatccaagaagcctccagcgatgatttggttccagaagaaacttgcacatctaacaatctgccttatgatgcagatatggaagttgctggtgcagctgattttctctcgagtgcttggcagtgcaagtgctcatatgaaacacaactgaacgcactgctcaaccaatatggcgtgcgcactgaagcagagcttgtgacagagcatatatggtcgcttcccaagtacagcagcagaaggcagggggacataaaggagaggttgaagaatgcatactatgctcttcacaaggagtttaggagcattttcgaaagcattgtgacagatcaaacagagatctctgatgatgagaaaagtcggttttacgagatgaaggcctccgcttggtaccaggtaacctaccatcctgaatgggtccagaagtcaagggaaatgttcaagtctgactgtgaggacatgccagcaaggcttagctttgcatggatcgcggttgagcacctggcacggattaagataaggtgccgtggagaagtgaaagtggacagcccaaggcctgttgagaggctcgcagcctacatatctgggagcatgtgagttgacgtgaagctccaagcaattgtgaagcaagaccactctgccctctttgccatgccatctgaactctgatgcatggctctgtctagtcacttctttttacgaattattacatagttgagacacagccactctataagcggctaaagcgtacgcacatttctacgaacgataatgcttttaagtctgaactgttcaatctctattactaccagaatgtttgtggacataaatattagttcgtggtgtctcaattccaaaacggttttcttggttgtgaagggtgttggtcacttatttttttattgctgtgaataaaaaacaacgcaacacaattgtttagtataaggacctttgtcctgtta

SEQ ID NO: 22228 - DNA, 3329 bp, Zea Mays
tttcactgtgccgactgggccgaacaaccccagactcggctgccgcgcgcctcatttcaacttcaccccgcgtacgcgcgcttgctctctctctccgcattcccattcactacccgcgtgctcgcgcgctcgcgctctctccgcgacgactgggtgtgggctaccgccgccctacgccaggtgccgaggcttcgtcgatctcttcgccggcgacgagcacccaccaggatgcaaaagcactcggggcttcggagcctcgaggggttccgatccctcgttggatccacctcgacagccatgaaggtcgcgaaccccaggccctccccggatactgggggtatttcgtatgggagcttcgccaaccttaagatcacagcagagaaattagtcaaggagcaggcttcagtgaagactgatctagaaatggcgcatgtcaaattgagaagagcaacagaacagataaacattatagagggaaaacttcaacaagctttgaatgaaaatgcaaagcttaaggtgaagcagactgaagattcgaagctctggcagggattagattcgaaactctcctcaacaaagaccttgtgtgatcaactgactgaaactcttcagcagctagctagtcagacagaacaagctgaggaagacaagaagttttttgaggagatgcttgggaagaattccaaagctctagatgaattcaactgcttgttgcgtgatttatcaacaaaactggagtatgcggaacaaaagataatttcagggagacaggagatgttgcagatcaaacaagagaaagaagagatggatcgaagttacaagggacaactgtattcaaatgatactacgataaaggaaaaagattcgctcatcaagcagttggagggttcacttgatgataataaatcccgcttgatatatcttgactcccgcttgcaatgcatggagcaagaactgaagctaaaagatgatgtttgtatcagcctgaaaggaaacctagctagcagtgaaagtgaaaagaacagtttggagcttatgaataagggacacattctggaaattaaaaaactatgccaggacaacaaggatcttaatgaattgtttagcagcttcatggttaaagtaactgagctagataaagaacatgcctctatgtcaagtcatgtgtctaggctgatttcttcatttgaaagattctatgaaatggcccaagaggagaaaatgctaatggcaagatcttctaaggataaatttgaacatcttcaaagccagtatgtagatttgacatcagaaaacaatgctctcaaaactgaaattgaagaactgaagtccagactcatagagttgcagagaactcaagaaattgttatggttcaacatgttgaagaatgccaagtggctgaagataagatcagaagattagagtctgaagctgaagtttctgcctccaacataaatcagttagaaaaattagcttcagaactacaagggagaattcagaagttactagaagattctacctttgctgaaaatcacaagcaagagttgcttcaaaagattttgaagctagaatcagataatcaggaactcctaggacaaatgcagtccattatggaagagaaatcaaataatgctgaatctctgcatggagagataactaagcgtgaccagcaggttgatacacttgagaatcagatcaaccagcttcgtagtgttctggatgagaaggagcaactctatctttgttctgtacaaaaagagaagactttggaggaacagaaattacaggtcgaagcattgctttctgcaacagagtgcaaacttagtgatgcaaaaaaacagtatgatttgatgcttgaaggcgaaaagatagagctatccaagcatttgaaagagctatctctcaaaaatgaccaggcgatcaatgaaatccgtaagaaatatgaacttgaaaagattgaaattactaatgctgaaaaagaaaaggcagaaaagctcataagggaaattgaaaacaaatgcaacgaaaagatatcacagaacaagcatgattctcagaggtatttgatttgccttaaggaggaacatggcacaacggtggcgagaattcagcaggataatgagcataaagagtcaactctccgggcttatcacaaagaagaactgcagcgcattcaatctcaggctgagaatgaaatgagggagaggttgtcattgctcagaaaagagcatgaagttcaaataaaatcactaaggatgcatcatgaggaagaatgccagaggatgcaggaggaactggagcttcagaagtccaaggaggagaagcaaagagcattgttacaattacagtggaaagtaatgggagaaagtcaacgagttgatcaagaagtgaactctaagaaggaatactctgtttcgtcgattaggaggagcgacccatatggaagaaaagaacaagaggtccagttggtaagtccggagaccaatcggaaggacgtaaacttacctgggattttacaatcaccaatttcgaacatgttgagaaaggtagagaaagtgtctcaggatattcctaaacatagaaaggtaacccaccatgaatacgaagttgagacagcaaatggaagaatcacaaagcgcaggaaaactaggagcactgtcatgtttggtgaaccgaactctcagaaaccattgcataatactactgacaaagatgttaaaaaactaaaaaaggttcctacaagatcccgtgcacatcctgcaaacattggtgaattattctctgagggttccttgaatccgtatgctgacgacccttatgcttttgactagaagctcacgcctggaagtatcatttttgcaagcacgatgacgaattctggaacacacaattaccaccaccgtgttgggtcaatcctacggcttttccctggtcatccgtccatcataatgtacatgactgccgttgactcatgtatctctgaagtattgctactgcaacaaccatcacgattgtcggatatgtaggtgtagatttgtgaatgaactgtacatgccataactacggagtaactgaatatcctcagataaaacgctttgtacgcgtcgtgcgatgctgttggattggaatcgtgtttgccctttcctccagatgccaaggcccggtggagtagatgggctccggtctggaagtggggcacagcatgtggatacaggattaatgccactgggtgtttgcatctatggaacgacggaaacaattcggatcgatatttgcttaacaaccatcaggcactgattggttggccagacgacgaattggagagggt

SEQ ID NO: 22229 - DNA, 303 bp, Zea Mays
tcgggcgccgtgctgaccgtccgcagcttgggggagcccagtactcctctttctcatcgaccaagtccccgccgccaccctcatgagggaagagaagtggccgccacctgccattttcgccctgccatcagttcgacctcggggaaggcgctcagggcgtcgatgatagaccgtgggagcacatccgagactcacctgcgctcggggaaatcgtgcattgtcggaatttctcatcggtgcgggcctctgctccgacatccgccccacaccatgggcgagggaaccgcatcgtcggcaccggta

SEQ ID NO: 22230 - DNA, 2177 bp, Zea Mays
ctgcatctgcatccatggaggccgacggagcagtctgccagtctcttctccatcggtagtcggtaaggaagatggagcgaggtcagaggcgacaacgacgtgtgtactgcatgccggctgccgttcgggtcccacaatctcgaaaatttatagcggccggggcgtggaatctgagccccgcggccggccagggcacctcaaaactggggaggattcacggccgttccgggcacctgtctactctgtgtgactgtgtctgtcctgtcgtcgcgggccgcagcctcggcttcccagttcccacaccccacgcggccacccaccccacccgcacccggcgcctcgcttctttattccgctccgctcagcccgcccgccagagcatcacatgccattgccaacctctcactgctcgtaccgcctctccactccacctgctgcccctgcgccctgaccgcgaggggagggcgctgagctaccaaggaagccaaccggcgcggaccgggtcggtcaacgcttgctgtgcacccgaccgaggaagctaggaggatcgagcacggacatgttggcctcggcgtcggtgccggccgtctaggaaaagctcgcccgcagaggtaatggatgggcggaggaggggcggcggagctatggcgtggctgctgctgcttctcgcctcgctgtgcaccggcgcgtgcgggctcaatgcggacggggtgctgctcatgtccttcaagaacacggtcaccgcggacttcggtgggaccgcactccgcctcctcaacgtttcgtccaacaagctcgccggcgctgtgccgaccgagctggccgccgtcgtccccgcgaacgcgacggtggacctgtcgcggaacaacttcaccggcgcgatcccacaggccggcccgtttgccgcgcagccggcggcggcgtacgagggcgccgaaaagctcaaggacttcgaggcgcaggtgcgcgccgtcgcccggttccgccatcccaacatcctccggctgcgcggcttttactggggcgccgacgagaagctcctcatccacgactacgcccccaacggcagccttgccaacatcgcattcagcaggcgcttcgggtcgtcgtcgccgctgcacctgagcctggaggcgcggctgcggatcgcgcgcggcgtggcgcgagggctggcgtacatccacgagaagaagggcgtgcacgggaacctgaagccgagcaacatccttctgggcggcgacatggagccatggatcggggacctgggcctggaccggctggcgtcgggcgaggcggcgccgcactaccgcgcgggcgcgtcggcgcggctgttcgggagcaagcggtcgatgcactcgacgagcagcctgccggacctgtcacagatgcccgggccgggcgcgagcccgtgcgggtcggcgtccgcggcggccgcggccgccagcgccgccccggcgccgtaccaggcgcccgagtgcctgaagaacctgcggcccacggccaagtgggacgtgtacgccttcggcatggtgctcctggagctgctctccgggcgggtctactcggaggtggagctgtgccagtggcacgcggggctggtggccgccgaggagcacggccgcgtgctccggatggccgaccccacgctccgcggcgaggccgacggccgggaggacgcgctgctggcgtgcttcaggctcgccttcgcgtgctgcgccatggcgcccggcaagcggccctccatgagggacgccgccatggtgctcgagcgaacggcggcggcggcggcgcccggcgccgccgcgagcagcagcggcgccgctgtgccctgagggggaaaaaacaactgaccttgtagcgcttggagccgttactgatcgcaataatcttactgcaagtgcacggacggtggtggcggcgtcggcgttgatcgccggtggcgagcttgtgtggtagggcgtgtacgtagatctgttactgattttggaggtgctgcgagaattaattaacctactaatcatctgtgtttgtgattgtggatttgaaagcgatgcatattccttttttttcgatcttgcgtctcggtggatctcaagatgtgtacttactgtgacagtgtcagtgtctgatggccacacgatcaatgggttcttctgaatctgatcgaccaaatcggg

SEQ ID NO: 22231 - DNA, 254 bp, Zea Mays
gctgacttactgatgcatgttcatgtaaggaagcagaagcatcagatgagtctgaatcattgggtactgatgcatgatcatgtgaggaccaattcaaatcagcataaaaggaagtttgaaattgaagaaatagaggaagtttggctagtttttagcatgaacaccggaacattcaatataatcatctttcattcatgcattacttgttacatgttctactagcaattaagaaccaagaaacatcatgatcttat

SEQ ID NO: 22232 - DNA, 3339 bp, Zea Mays
gcacaaacagagactagtccaaagcaccataacgagagagagggagagagagaaagagagaaaaaaaaacactcggaaacgatccgcgaactagtccaccggcgatttgttgttttgttcttcagtgcgtcagccaaccttaactgctacgatcggtcgatcaagggggaggaagtttctggagctctgcccatggcgtcggcgatgaagctgctggggagatcttccttggcgagccctgctgccgcggcgcccggacgggagcggcgaggcgggccctgcttcgccgcggtcggaagggaggggagcgcgcacaggaggaggtcgtcgctgaggtcgaccgcgccggtgggcgcgctggccgagcgggtcgtggtgacgccggcgccaccggagagggccggggcgggccccccggagccgcacccccagagcgtggccgcgcgggccgtggtcaccgtgcggcggaggcggaaggaggacgccaagcgccgggtcgccgagcagctggacgcgtacgccgaccgggttggccgcagtgtcctcctcgagctcatcagcacggagaccgacccaagaaaggggggccccaagaagagcaggcgctcggcgctggtgggctggttcgagaagaaggacgtcaagacggagcgggtggtgtacacggcggacttcaccgttgacgggtccttcggcgagccgggcgcggtcaccgtgctcaaccggcaccagcgcgagttcttcatcgagagcatcgtggtggagggctttccctccggccccgcgcacttcacctgcaactcgtgggtgcagcccacccgcgtggaccgcaacccgcgcgtgttcttcaccaacaagccgtacctgccggccgagacgccgccgggcctgcaggagctccgccgccagcagctcagcgacctgaggggcgagggtgccgacaccggcgagcgcaggatcaccgaccgggtgtgggagtatgacgtgtacaacgacctcggcaacccggacaagggcgccgagttcgcgcgcccggtcctcggcggcgagcagcagctgccgtacccgcggcggatgcgaacgggccggcccaagaccatcacaggcaagcctccgctttcccacgaccgcgcggagagccgggtggagtacccggagcccatctacgtgtcccgggacgaggagttcgaggacgggaagaacgagatgctgtcggagggcgcgctcaaggcgctgctccataacttcatgccgctgctggtgagctccgtgtcgcctgacatccgcgacttcgccggcttccacgacgtggacaacctcttcaaggagggcctccgcctgaagcaggccctgcaggaccagctgttccagaagatccccttcgtgcgcaagatccaggagaacagcgagggcctcctccgctacgacactcccgacatcatcaagaaggacaagtttgcttggctgcgggacgacgagttcgcgaggcaggcgctggctggcatcaaccccgtcaacatcgaacgtcttcaggcgttcccgccgatgagcaagctggacccggccgtgtacggcccgccggagtcggccatcacggaggagcacatcatcggacagctcgacggcatgtcggtgcagcaggcgctgcaggacgacaggctgtacatgctggactaccacgacatcttcatgccgttcctggaccggatcaacgcgctggacgggcggaaggcctacggcacgcgcacgctcttcttcctgacggccgcgggcacgctgaagcccatcgcgatcgagctgtgcctgccgccgatgaccgacgggtgcgcgcgcgccaagcgggtgttcacgccgcccgccgatgccaccagcaactggctgtggcagctcgccaaggcacacgtctgctccaatgacgccggcgtccaccagctcatcaaccactggctgaggacgcacgcggccatggagccgttcatcatcgcggcgcaccggcacctgagcacgatgcaccccatcttcaagctgctcaagcctcacatgcggtacacgctcaagatcaacgcgctggcgcggcagatcctcatcaacggcgacggcgtcatcgagtccgggttcacccctggccgctactgcatggagatgagctcgttcgcgtaccgggagctctggcggctagaccaggagggcctccctgccgatctcatcagaagaggaatggccgtggaggacccgacgcagccgcacggtctccggctgctcatcgaggactacccgtacgccaccgacgggttgctgctctggtcggccatcaggcggtggtgcgacgcctacgtggccatgtactacccgtccgacgagtccgtgcagggcgacaccgagctgcagtcgtggtacagggaggccgtgcacacggggcacgcggacaagcgcgacgcgccgtggtggccgcgcctgtcgacgcccgcggacctggcgtcgctgctgacgacgctgctgtggctcacctcggcgcagcacgcggcgctcaacttcgggcagtacccgctgggcggctacatcccgaaccggccgccgctgatgcggcggctggtgcccgccgagggcgacccggagtacgcgcacctggtggccgacccgcaccgcttcttcctgtcggcgctgcccagcctgacgcagaccaccacgttcatgaccgtcatcgacacgctgtccacgcactccgccgacgagcagtacctcggggagcggcctgatgaggcgtggacggccgacccggcggcgttggcggccgcgcgcgagttcgcggacgaggtgcgccgcgccgaggaggagatcgaacggcgcaacgctgacactggccgccgcaaccggtgcggcgctggcgtgctgccgtacgagctcatggcgcccacgtcggggccgggcatcacctgccgcggcgtccccaacagcgttaccatttagcctctcagtaccgacagacagccatgggcgcatgacagagatgatctgaaaggagaatttttttccactcattatagtcgggtggggagaaatctaagcagaagcaaatgaattttgcattatttctccccccattgccaaattgccattgatttggtggtccgaacaggtaaaatttgatttttgactaggggcaagactgtgaggaactgaatgggtgtaaataatttgttatatacaaaaatcaatggaatataatcattatagagttctctggataaagcaatgtcgttatacagaaatgtttgctatgctttgtattgctcaacctgtgttttcttcaaatactacggcattcttaccggcgacatt

SEQ ID NO: 22233 - DNA, 2094 bp, Zea Mays
ctcattctcattgcattgcacggaaattcacagctgcgtgcccacccgatcctcgcttgacaccggggaaatccacggcctgctgctacagagcatcgccgctgagcacactggggcactaactcagagtagtgtcgctcaatgaatttcctctaccgaactacgcagcctgcagcgactgagctgccaagaatttcagagcaagatcacaggaatgccttacaaaagacgacttcgacactggagggtctcattgcggacgattcacaccaccagccctcctctgcccacatcgaagatggagctgctaataatgggtccagggatatcagtggggattcttcatctgttgatttgaaaagcccagtcccactggggacacatgccgatgtcatggaagacgaaggatggatcacaattccatgcagtttgaggcacttcctgaaagttggaacgacatatcagaaatggttcagttgcaggctctggaccgttccttcctttttccaggttcctatactggcgtgcctgtcagcttctaagcaagatgtacaggttatatccccctttagaattgctgcagtaatgtctaagaatggaacttctatgcaaaactttacaaataaatctagccctgtcagtgcaaatggtcatgataatggagcagctggagaaagtggctatcaggatgttgaacccaatggtgaagcatctccttcaggacatgatattttggagactcaatctctccttcagatggaggatcataagcagcagatcgaacatgtgttgcgaagatttagagaatcaaatttttttgtccggattgcggaatcagtggaacctctatggtccaagaaaagtgtaacttcaactacgatggcagatgaacgatcagataaccagggaaatagtaagagctcaaggagtaatgtttataataccatttctgataaaggggtttttgatggtaacacatctgggggagttgctcgagatgttgtcaagtgttattctctgcaaaatggagacatagtggttgttttgcaagtgaatgttagcgttaacaaattggaagatcctgtgcttgaagtccttcagtttgagaaaacctcttctgttcagacaccaaataatataagaccaccaccaatatctgaaagtcaagaatttatgcctgaaaaacctgcaaaaaccccagatattataaatgatgggcaactttcgtttagaggagttcctttagaacctgaacggtattctaatattgctcctactcatgcaaaagatatagtcgtattcatcgatgcaattactattgtatttgaggaggcatccaaaggaggtgctcctttgtctttaccaattgctagtattgaggttgggcatggtcacagcttgccaaacctagcactcaggaggggcgaggaacactcttttattctcaaaccagcaactatgtcctcaagggaacggaagaccaacagtcatgcacctctggccttatcactcccaacgatgaccggtgctactttaaatactcatacaccaaaggctggtgagccgtatgctgatctaagcgaccaatatgctgtactgatactaacactcgaagctactaatatgacatccgaaaaccttacattaactgtccttgctcctgaagcatctggttcttcttcagttgtatccttgaactcatctccaaccaccccaaatggttcttttgatggtgttaatgagtcatcaaaaagatctgggctgggaaaagatggaattggctttcgaagattgaattctgtcctagctactccaaaagaaggtgataatggaggaaacagaatgagtaatgcttcaggctgtactcatctgtggttgcaaagtgcagtgcccctagggtgtgttcctgcccgctcaagcaccactgtcaaacttgagctgctaccattatcagatggaattatcacacttgatactctgcaaataaccgcaagggagaaaggccttgcttacattccggagcactccttggagatacatgccacctctgtactggaagcagaatcccagatcatggcccggattgaacggtag

SEQ ID NO: 22234 - DNA, 133 bp, Zea Mays
caggggctcagcgtcggttcttggcgcttggtgcgttgctcggtctgcggctgctagggtcggcatcgggagtcggcttctggcggttcctggcgcacggtacttggcgcctgggtggcattggggcttgagt

SEQ ID NO: 22235 - DNA, 2216 bp, Zea Mays
ccacaccattgccagtttggcaccctcctcaccccactacctcttcttcctccgcacagcgcacaagccgcggaagcagcgcagacccggcaaaatagtgatggctcagaagacgaaggaggcggagatcaccgagcaggattcgctgcttctaacaaggaatttgctccggattgccatatacaacatcagctacatcagaggcctattccatgagaagtacttcagtgataagtcggttccagcactagagatgaagattaagaagctgatgccaatggatgctgagtcaaggagactaattgattggatggagaaaggtgtctatgatgctttgcaaaagaaatatctcaagaccctcctcttctgtatctgcgagaaggaggagggcccaatgattgaggagtatgccttctcatttagctaccccaacaccagtaccgaggaagttgcgatgaacatgagccgtacggggagcaaaaagggcagtactacattcacttcaaatgcttcagaagtaactcctgatcagatgagaagctctgcttgtaagatgatcagaacgctggtttcacttatgagaaccttggacccaatgcctgaggagcgaaccattctaatgaagcttctatactatgatgatgtcacacccgaggattatgagcctcctttcttcaagtgttgtgctgataatgaggccataagtatatggaacaagaaccccttgaagatggaagtgggcaatgtcaatagcaagcaccttgtgttagctttgaaggtcaagagtgtccttgatccatgcgatgatgacaatgttaacagcgaaggtgatggcatgactgtggataatgagtctgatcatgatgatgacttttctgacactgaggttcatccaccaaaggcggatcattacatcatagctcctaatggaaaagacaaagatcaggacactggtactatttcagaagatgatactcaagatactgctcatgaggaagagctaacttcccaagtgaaggagtggatatgctcaagggacagcggaacaattaatgtttcagatgtcctttctaacttccctgacatatcaatggaattggttgaagatataatggacaggctacttaaagatggtatactatccagggcaagcaaagatggttatacggttaaccagaaggctgatccaaaaacaccacatataaagaaggaggccatcatgccagatgtatcaccaactaatgtaaccaaacacaacaatggggatctgctatatatgaaggcattatatcatgcacttcccatggattatgtgacaatagccaaacttcaaggaaagctggatggggaagccagccaaaatacagtccgaaagttgattgacaagatggtgcaagatggatatgtgaagaattcagccaaccgaagactgggcaaagctgtcattcattctgaatctaccaacaaaaggctccttgagataaaaaagatactggaagtcaatgaaggcgaaaagatggccattgacaccaatacagagcatcctgagcctgagcacaaagaccttctgagagtctatgaagtgggagatggctccactatgggttgcctccactcaattggatctgatcttactcgtactcgggagctgccagagctgcaacagaatgtgtccatgcagagcgggcaagaagcttccacagtgggtaaggattccagcaggactccaacaagtgtgcgtgagctggctgtacctgtttgttccctggaaagtggagtgcttggaaagagaatcaaaaggtctctaactggtggaaatgagatgcagtctacccaggacaagcgatccaggaaggctagcatggtgaaggaagcaatactccaacatgtcaagtgccaaaaccctcaggctcagtgaggtggggtgacaggagtagctaaccatagttcaggtccttgtgcaggcagacaaataaacaagtacaacagtcaccgcagaagtagcttccactccctatgttttgcaaggtagagagttccacaatgtagattgcagtcccaatgttttgcaaggtagtaaaagttatacgcatctgttagcctatcgatctggtgatgaacattttcttctacaaagtcaaaagatgttttattgacacggaaattggacatataaagcttctgttgaatgcatgatagttcaatagattatggat

SEQ ID NO: 22236 - DNA, 1697 bp, Zea Mays
gttcaacatttggtcctgcactcctgcaggtgcagccagttccaaagatggctcgtcgtggattgatggaacaggacttaagcaaactggatgtgacgaagcttcaccccctgtcacctgaagttatctcacgccaagcaacaatcaatatgggtaccattggccatgtggctcatggaaagtccactgttgttaaagctatatctggtgttcagactgttcggttcaagaatgagctggaacgtaacattactataaagctgggttacgctaatgcaaaaatctacaaatgtgaggatgacagatgtccgcgaccaatgtgctacaaggacacgacattctcatggctacaatgcttaatggagctgctatcatggatggagctcttcttttgatcgcagcaaatgaaagttgtccacagccccagacatcagagcatcttgctgctgttgaaatcatgcgtcttcaacatatcatcattctgcagaacaagatcgatcttatccaggaaagcgcagcgatgaatcagcatgaagcaatccaaaaattcatccagggaacaatagctgaaggtgcacctgtggtgcctatatccgcccagctgaaatacaacattgatgttatctgtgaataccttgtgaagaaaatccccatccctgaaaggaactttacctcacctcccaacatgattgttattcgctcctttgatgttaacaagcctggttcagaggtcgatgaaatcaggggtggtgtagctggtggtagtattctcaggggagtcctgagggtgaaccagaagattgaagttcgccctggcattgtcatgaaagatgagactggaaacatcaagtgcaccccaatctactcaaggattgtctcactgtacgctgagcagaatgaactccaatttgctgtcccaggagggcttattggtgtgggaacaaccatggacccaactctaacacgtgctgacagactggttggccaggttcttggtgaagtaggttcactacctgatgtttacgtagagcttgagatcaatttcttcctactccggaggctgttgggtgtcgaagctcaccaagggtgagatcctcatgcttaacatagggtccatgtccacaggcgcccgtgtgctcgctgttaagaacgatcttgccaagctacagctcaccgcgcctgtctgcacgagccgaggagagaaggttgctctgagccgtcgcgttgagaagcattggcgcctcatcggatggggccagatccaggcaggtacaacacttgaagtaccagcgtgcccggtgtaaagcgtcatactcagacgtgagctgaagttgtgtgcaaaagagaaaaaaaaatgagtttgttgttagtcctgtccctgcgttactgcagatccaaagtcctgggtcactctaattttattttgtttcgttcaattttggaggccgtttgcattatgattcctgtgaacattaccaggtcggaaaccagtattgtgaacattatgagtacggcatatggatcagcatttgccaatttcttctttcgcaccaaaatttagacttgccttcatatggtttgtgcctcaagaagtggctgtatgcctgtatatataagactgtctgcaactctctaaatttccctcctatagcgcactatacagccaccttattcaggttctattctctatttttttc

SEQ ID NO: 22237 - DNA, 5811 bp, Zea Mays
tggctctgtatctccaccccagaacaaccttgggttataacgttatctctttcatcctttctcactctgcctatccgtcccaagtatagtatatacgaggagtatattttcttagagatcgttaacctcatagtaatcgctccttttgcccaaaacctaaagggaagccaaagtgggagcaccaaaatactcgccgcgggtgcatagttgtttgtttagaaggagaagacgaggttaaggggagatgagcgagctggtgcgggcggcggctccggcagctgcggaggaggagaagaaggccgtcgcggctgtgactgtggtggcgaaaggaaaagagaaggcggaggtgacgccgaccgtggaggcctcatcggtcggcgacagggggaggttcgtggcctacccgtcgcgggtggcggagcacacggacgtggtggcggacgccgcgcgcttcagggcggcgctcgaggggctgcacacgcacatgggcaccaggctcaagtaaagcatttttccgacttccaatacgcacatgacctcgccgccggtgccgatccggttgccgcatttttaattcctctgttgcgttttcttctgcatctgatgcgatggtgccgttacagttgttactatccctgttgcttttaccatcatttcttgaattcaatgcgcgaaaattgcaacttggtataaatgcgtggtgggaaagagaagtttgtgggggcggtggcgattttagtagtaacgtgtgatgcaaatgcatgcgatctgggaggccgcacaccattgattttgattttgactaatcaacccgtgttcgtgtttcctttataacatttatttatgtgtggaccaaatcctccaacacgagttggggattgcggccatcgatatgtcggatggcctacattggtagcttgatgttattttcgattttttgggggatccattgcaacgttcctgttgcatctgggattcttgtttttgtcgaggatgaaatatgattcttgttttctggggaccttttcaggacattatgttagtttgtagtggcataggaatccattgcaacgggctatgtatgtgaaacacgcttacttttcgtgggtgtctgtattgaaatattggatttcgatcatgtatgggcattctttttatgtcctagtaataagagtagcgacatatatttcttattctatgagattctagtgtttgttagctagagtaatctttttgtaatgaaaaatgatgtctgatgtactccctctgtcacatgccaatcaaattttctcaaatttggctttaagtttgtagaaaatattagcaatatttatatcttcgaataaatttattatgaaaatagactcagtgatctatctaatgatactaattatatactataaatattaatgttttttctatccttgtttcttgtgggtttcatctctagcctaccccaacttgcttgggacaaaatgctatgttgttgttatttaaatatggaagtgagaacacagaaaagggacaaatggagtattgaacaaccaggatgtcatatgtcagcaaaagaactgtggagtattgaacaatgaggatgtcttttgtcagcaaaagaactgatttgtcctacttggcttgctttgtgagattattgcagattgcaatacaatgtaaagtttatttggcttcaagcttagtgttgttttcattgaaatgtatggccatccgatttttttctctcgaacacgcaggagagctgcacatcatttaatttagagaagaaaaaggtccaaaatggaccaagatacaaagcctaaaaaggcaagataaaacacacccactcacaacctgccttgcaacaacgctgcagcctccactattactgagaaatcagcaggacaacaaaggccacagcgaaaaaactgcaggcagaccccactctccacaaacactacgccctgaccatattaagggcaacctctaggcctaaattctcaagatgtttagctccaaccttactccaacacgccaactcatctaaaaaaacacttcaaactgtgcttaaagtagggttatgtccattgaagactgccttgttacagtgaacccataggcaccaggcccccagaatgatgatgatgttcataccctttcgcttgcttctgtgcaccttcttacatattttctgcaaaggcgatctcatcactagacggagagaaattaccaaaccccaagggcgaaaggatggtatgccaaaattgtcttgcaaaaatgcatgtgcacaggagatgttggacggattcctgcacgtggtcacataatggacaagactccgggtgatccaaacctctcctttccagtctatcagaagtccaacatttattccatattgccagccaaaggaaatatttgcattttggaggagcccaagacttccacagcctcccctatggctcaaaggtaatggatcccatgaaaaaggccttgtaacatgacttggaagtgaactggtcagaggaggtatgcagccacacatgtctatcagcttcatgtgttaacaccactcttcttatagcatcccataaatgcaagaattgttgcaccccaatcaaagaaagaggggtctcgatgtcactgacccactgccggctttcaataagcctgagcacagttctagtgcaaagagcgctcttaccgaccttagaggcaactgcgggggcaatgtccttggcgcaaccaccatctatccgaccaaaataaagtattggtcccatttccaatcacaataataatcgatgatgcaaagaacttcctgacttgtttcggtataggaaagtttagcccatgccaaggtctgttagggtctgttttctccaaccacaaccatttagcttgcagtgcccagctctggaaatataagttaggaaccccaaatccaccaagctttagtggccttgtaatgatatcccaagagactacaatttcctccattcatgtcatttccccctttccataaaaatcctcttcgaatcttgtcaatcaacttaatcacccacttagggatatccatggcaatgaggagataaattaggatggctaacataacaaaccacaccatagtcgtccttccagcaagattaagcagtcgagcctttcaattaggaagtcgatctgcaatctttcaaaccaagccatggggtctatccttcttagttttttgtctgaaatcagaagccccaaataggagcaaggaaaagaagctgagctgcaatgtagaatgttgcagccctcctacacagcctgctcgctacaccttatcggaatggcacaactcttatgcatattagatacccaaccagaaactgagccaaaacaatccaagatcattttaacacaattcagatcttcctcaaaaggctgaataaaaaggaccacatcatcagcatagctggaaagtctgttccgaacattttctccctgcagactctgaagcagccccctattttcagccaacaaaaatagactgctgaggagtgaggacatcataatcaatataaacaacataggagatagaggatccccctgacgaagtcctctccgatgactgataagattaccaggagacccattcaaaagcacttgagtggaagaagaggccaacagatatgaaatcagattacaccaattaggtccaaaaccaaggtgagaaagcacctcaataagaaaagctcaatagatcgagtcaaaagctttcgaaatgtccaacaactttctggacacagaaaataccgcaactaagtttttgtttttttaaaaaatggcttgcatgttaggcaaagttacttaaagttgtctacctgaatagttaatactatgccatctaattttttttctggaatacgcaggagagctgcgcatctttgtattaatagaagaaaagaaaaggggggggggggggagaaccccaatacaacacacacaccactagagactaactacggatcaccgactaaaacatggaagaaacacgacccacaccgctgttttaagccagcaactcatcgacttggaggaaggacaaggccttggcaccagtcatggaccagagcaccgcctcttccctagccatcctaatggccatgaccaagttgggattacaaccatcaaaaacacacctattcctatgcttccaaatggtccaagcacctagaatcactaaagaattgcatctgagttgcattcataattttctttagttttattaattgccatgcttcatctggttcatttataacccttttttgggggtaagggtgccgatcattggagggaaagatttggatcttcatcagctatataaggaggtcacatcacggggcggtattgacaaggtgaaggcagagaatagatggagagaagtgactgcatcatttattttccctgccactgcgacaaatgcttcttttatgctgaagaaatactatatgtcactcttatatcattttgagcagctatacttctttagagtgcaaggctggcatcaacaagaaatagattccagaatgaattcttccattgaaattaaaaccgaaggccaagcttaccacaaaagaaaaaggggcatcaacacatcttcagatccagcttcgtcttcagataatgttgacgtagatgtgatagttgatggcaaatttgaacatggctacatagtgactgttattatgggatcgaaatccactaaagcaatcctctataattgcactgaagaacctgctttgccaactccggagccacctgttgcaaataacagcactggtttgaagggtgtacgtcgccgaagacgacgtaggaagaagctaagtacaacggatcccaggcaccccaaaccaaacaggagtggctataatttcttcttccaggatcaacatagaattcttaagccacaatatcctgcacaagacagactgatcagtaaaatgattggtgaacgatggaacaatctaagtcctgaagataaagctgtatatcagcaaagaggtgtagaggataaggagcgataccggacccagttggctgcttataaagaactgaggacaggccaacctatcagcaatgctgtgcctatccaacagaggctccctctgacagaagtgacgattgatgaagtagactccaaggtgagccaagatgatatgctgctgtcaaaccaagggtacagcagtagtgatgaaagtgaccattcaggagagaaaaatgtagaagacgagctcaacactgaaacatcccctgaggtgagcatggaaacaactggttctcctggacaccctgatccctctcgagatggggaccactttgagttgcggcggagagaaaaccccaaggcagatgagaaagataatgcaccacctgattcatgacttttcgctttgaatggtatgtattcgaagatccgaaagagaggaatttccaagaggtgacaagctacactacacatacatacctgttgtcgtaggaacataggctatatgctgatgtcaatcagagttctattagcagttggaatacacttcattttggtagttctgaatttgtattgctaaatttctttcgaattaaaagagagagggggggggggggagggggtactgggtaaattttccatccagggatgggtacttggtatattctttcgttcaatatttatcattacgttgatctatatgttgagtatgtgtaatgtcatgtcagcgaaaatccaaatctgcatatctaattgtagctatacatgcttagtttcatatattataaaag

SEQ ID NO: 22238 - DNA, 2921 bp, Zea Mays
ggaaaaaacgtgcccttatccttcaagtttagagagactaataggctgtttggttggaggaatcatcacatttcaatttcacatgagatgtgcttcatgagtccgtttctcagttttggtggcaggattctttgttattattagcttgtgaggaatgaggtgaccactcatcaaacttttccacttcatgaaccaaacaaaaaaaaagtgaggaatgagtagagagtagataatgaactaactcattcctcttaccaaacaccccaagttaataatacccttcttgattctcaattttatccgcttagaatttatttttgtgccatccactttctgatttttttttgttggcatatgcatgtcaccagttcattctcccatgatatctcgttccataagaaacttgcagattgcagtattgagttatcaaaacaaaacaaatacttctgccgttacagatgtggaggagcacaagtgtctgaactcggagttgtggcatgcctgtgccggcccgcttgtctccttgccagcggtgggtagccgggttgtgtacttccctcagggccacagcgagcaggtagcagcatcaacaaacaaggaaatggagtctcagatccccagttatcctaatctgccgccacagcttatatgccaactgcataatgtgacgatgcaagctgatgcagagacagaagaggtatatgcacagatgacattacaaccactcaacccgcaagaactgaaggatccatatttacctgcagaattaggtttggtcagtaaacagccaacaaactatttctgcaaaacattaacagcaagtgataccagtacccatggtgggttttctgttccccgtcgagcagctgagaaagtgttccctccactggatttcacccagcagcctccatgccaggagttgatggcaacagatcttcatggcaatgagtggaaattccgtcacatatttcgtggtcagccaaagcggcatcttctaactacaggctggagtgtctttgtaagtgcaaagagactcgttgctggtgactctgtcctttttatctggaatgacaataaccagcttctgcttggaattcgtcgggcaaatcggccacaaacagtcatgccatcttcagtcttatcaagtgatagcatgcatattggtcttcttgctgcagctgctcatgctgcttcgacaaatagccggtttacaattttctacaacccaagggcaagcccttcagagtttgtcataccgcttgcaaagtatgttaaggctgtgtatcatacccgtatatctgtggggatgcgcttcaggatgctttttgagacagaagagtctagtgttaggagatacatggggactattaccggaatcagtgatcttgattctgttcggtggccaaattcacactggcgttctgttaaggttggctgggatgaatcaactgctggcgatagacagccaagggtgtcactatgggagattgagcccctgacaactttcccaacgtatacatctccttttccgctcaggctcaagcgtccatggccaacaggcttgccttctctgcatggtgggaaggatgatgacctggctaactctctcatgtggcttcgagataccacaaatcctggtttccagtcgttaaattttggtggacttggtgctttccaggatccaacaaagcaggcatcacccacaatgctgcagttccagcagccacagaacatagctggccgggctgcgccactttcaagtcagattttgcagcaagcacatcctcaatttcagcagcagccgtacatccaaaacatctctgagagcacaatccaagcgcagggtcagtctgagttcctcaaacagcagatccaacgcagccagtcattcaatgagcagaagccccagctgcaaccccagcaagaatcacagcagcagcagcaatcacagtgtctgcaagcccctcagcatcaacaaatacaacagaacatagccaactaccagtctgtatccaatgcattatcggcgttttctcagctgtcgtcagcctctcagtctacacctatggcactgcaaactatattaccgttctcacaggcacagagctttacagacacgagtgcaagctcattgtctccatccaacaccaacacaatgcaaaatacgcttcggccattctcatcagaagcagtttctcacctcagtatgccgaggcccactgcgatacctgttcccgacgcatggtcatcgaagcgagctgcggtggagtctttgcttccttctcggccccaagattcgtctcaaatgcaacagttggactctacaccagctagtatacctcatagctctgcgttggcaccacttcctgggagaggatgcttggtggatcaagacgcgaaccctgatcctcaaaaccatctcttgtttggtgtcagtatagattcgcagtcactgctaatggagggaggcatccatggtctccaaaatggcaatgattcgaccgctataccttattccacctccaatttcctgagcccttcccagaacgattttcctttggatcatactctgaattcttcaggctgcttagatgattcagggtacgtcccgccatgttcggataattctgaccaagtgaaccgaccaccagcaacctttgtgaaggtttacaaatctggaacctacggaaggtcgcttgatatcaccaggtttagtagctatcacgagctccgtagggaactagggcgcctatttggccttgagggccagttggaagaccctctgagatcaggctggcagcttgtattcgtcgaccgcgaggaggacgtccttctcgtgggcgacgacccttggcagtaagttaccatgaccgtccatcagtcttggtgatacatcctcaacaaatttcatgtgtttcttc

SEQ ID NO: 22239 - DNA, 656 bp, Zea Mays
gcaacacgtgacctctctcaagtctccagtcattcgatgtggagtccgcgactgccaccattcaagacggcagcgtaagtctgaaggttgacacccagcatctgagggatgtcagtttccgcacgaactcggtgtaccaattcattggtgaacttcagatccgtgaagttgatgatgcgattctactcgcgcgcatcggaaggaacgtcgatggcctcgacatgaacctttaccagcaggctctactcatccgacggcagcacgaagcaaagctgctgagctccaggagagcatgatctgcttgctatcttggagcaggaggcgcatggtggttgtagttattaggtttctttgtttctcaacagtgcaattgcatatgtaaacgtgaagagaactggaccaagaactggttaattgagagggtctgctgcatatgatttgcgatctctcttgccctccaaagggctgccatggcatgtgtagatgtgactgccaatttgtgatcatcttacttgcagcagaatgctggttttattttattgacatgagaacagccttgtggatcatgtttactgggatgctttgttgtgttaaaagttgggtcatgttcttttgttgtaaaggtataaataatggaggaggtcatggtgtgaaga

SEQ ID NO: 22240 - DNA, 1251 bp, Zea Mays
accattacaaccactcaaccaaactccaccttaaatagctgtagtgttggctgcgcaaatcccggtctgatctagactgaggacgcgggccaaacaccaccatcactccacagcgtcggcgaggaagtcggcatgagcgtgttcggcggcgacagctgggcgcgtgatgcgcagcagcggaagcggcgtctcgacgagctcttgctacccatcacggcgccctcgtctccctcgacgcctgattccttcaagaagctccacaacggcaagctcgcctgcctcatctgcccccaccgccccgtcctcgacaccccgctcatgctctccatgcataataaaggtgcacggcacatcgctgcagaatcgaggctgagggagaaagaattatctaagaagcacgaaattagcaagagactggctctctcttcagatgtttcccattcaaattctggcaatccacggaccagtgtttggcctaccaatatcaaagaaaaaccattgattgaggagacccggagggcaattctggaagcacagtcgagcagattcaatgatttccaaggaactgtccactggaaatactggatcacgagaatggagctgtaaaggacaatcttttgctggaaatcagactcaagacaagttattttctgacagacaaacagaagttcgaaagcgccaggagcaagaactttggttcactgcttcaggctggaaacgggatggccatggaagatggtacagagatgaaaatgttgaatttgactcagatgaagatgatcctaacatctgtctctcctgatcatttgagaaggcaatcggaattgaactatcctatggcccatctgggagtattgaattcatcacaatgcaatatcaagttcaatctctccctacaaaaaatggtccaatcagattttgtcagactgtcagcttttctgatcaatggaaatgtcagatcatgttcctgttaaacttaaatgtttgtttcattgtgagccaaacctgtataatgatagttgagaaatacagtgtgtatttattttgtgaaaacatttagagatcagagaattccgttttcaaagatgtagtctaaacctgccattagtcactgtaaagataggcgatgcattttggttttggagcttgttttcagactaatattttatttgtaaggaaaataatgaagagcaaaaaaaaaaaagggggctataccatacagaactgatagattttcaaaacatgacaaag

SEQ ID NO: 22241 - DNA, 2836 bp, Zea Mays
gtaatttaaatggcagtggcgcttgatctctagataaattatttccgtccaagaattggaaaaggaaatccaggattctagagagaagaccgagttttatcgcaccaagatgcaggagcttattctttacaaaagtaggtgtgagaacaggcttaatgaagtctcagaaagtatgtctgccgataaacgtgagcaaaatatgatgaaagatgcaagaaggttggagatgtggcatcaaaattaacaatggatgaggccagttttccgtgagatccaggagaagaaacttgaaatttataacgccatagttaagctgcaaaaaggggatgaaagtgatgaaaagcttcaggagcgggctaataagatacagtctgatcttgaggagcttgtgaaatcattgaatgaacaatgcaagagatatgggttgagagctaagccaactacattggtggaacttccttttggttggcaaactggaatacaagagacagcagctacatgggatgaagaatgggacagatttggagatgaaggattctccatcataaaggaactaacagttgaagtagagcctcccgttgtaccaaagagtcaacctactgttgaagatgtcaaagtgtctacaaatggggcatcaacagagaaagaagacaataagtttgctaaatctactgctgctgctgctgtggagcaggcagttgaacctgaagcaataccatccaatagcaaactagagtcaacaaaaagtcctccagttagtcctgtcaagaacagagacgatggttcgaccgatgagcttgatacaaagcaatctggaccaaatgacgtcttaccacgtgccactgagagcgtcagtaaccgtggaatggattcctctgcccatggagataaaacttatgatggacattcatgggccccatcatttgatcatggcactgacaatgactccctatggaactttggtcataaggttagattccattcacactttctgacatcgtatcatgttgtagatatactgcactatctggtacttacctccacgatctgtttctcaggatggtgagaatggtgattcagatctcttctttgggccacaaggtcttccaccgataaggactggaggttcctcatctaatagtttgtttgtcaaggaacagaaaccatcttttgattctgttcctggtactccaatggagaaacctttctttgattccatcccaggcacaccagttcagaagtccgtcttcgattactccgtccctagtacaccgatgcaaaactcagtctttgattattccatcccaagcacaccgatgcaaaagcctctctttgattccgtccctggtacaccagtgcagaaatcagtatttgattctgttccgagtacaccgatgcagaaatcagtatttgattctgctccaagtacgccaacgcagaaaccattctttgactcttttccaagcaccccaatgcagagatccatgtttgattctggcccaagcagagcagaatctcctactgctggcagcgtgtacggcaaagagcaaaagggattctttgattcttcagttccgagtacaccaatgtacaactcaaacctcacgcccagatacagtgaagcaggagatgattcatttgacacaatgtctcaatacagctccttcggcatgcacgacaacaattcttttggacagatagacagcttctcaagatttgattccttccggagcaatgctgataatggcggtaatgacgcctttgcgagatttgattctttccgcagcacttcagatcaaggcgggggcaacagcttcatgaggtacgattccatgaacagcagcagtgaccatgacagaacggatacatttgcgaggtttgattccatgaagaacagtgacttcaacaaccagggctactcatttgatgatgacgacccctttggaactgggccgttcaaatcaacagagacatcgaacagcccgacgagacatgggacggatgcgtggagtgcattttgacaggtattgtattatagaggtcatgttcttgtgcaccttactgcagatatacatacacgtacaagggcaagacattattttttttgcatgggcctctgctccgcaccttttggacgggacggggcttgcttgtgtgtttaattttgtacctaggctgggaacatgtgtttggagggatggtgctgcttataaacattctttataccttgtattgtacaagtacacctacaagatgctagtcaacccgttgggttgaagaactctccgagtgttttcttccattgtgtagggttttttttctctctcagtttcttctgtttctgcaaaaagttctgagctctgtacatacattttggctaagtcaacctagttatgaggatattgtgagcaattaagtcggttcagcgagaagctagggatcagtttgttcgttgttttaacaaaccgtgagggttgccctccataggggtggtcattctaaggctgaaacttgaacccgaactaaactcgaatagaccgaattgtcggtctatttgggttttttggttcaggttcgattcttatatgtgctatattttggggtatgggttctgttgggggtctgctgctctgcttcgtcgtcgaaggttctttaaaaagaaataccttcgaaagatcagcgtataatcaagcacaatgtgaaggtatacacgaagctgctgtcttcgaaagatcagtgtataatcaagcacggtgcgaaggtatacacgaagctgctgtctgaggagcttcggcataatgatagcttgagatgaagggctgcaccgacttaaaaa

SEQ ID NO: 22242 - DNA, 2266 bp, Zea Mays
gccttttgttttgtttcctatttcctttccttctcgtgtagcttttcggccggcgaccgcgacctgaccgtccgccactgcgcacctgccggcgtctgggcgacgccccgccgccagcctgccaccaccacgacgcctgcaccggaatccgacactgtctcaaccactccgtcgtgcctatccgaagctcaacggcggagcccggtgggatagggcggaggcgctgaggcctgagggggagactggacctgggctgcacgaggtaggctgtgcggtggcggaaggaatcaccgatgagcgatgcgcaggcgacaggggatggtccgcgctgcgttggctgcggcgggcgcgtgaagacgctcttcgtgcagtactccccgggcaacatccgcttgatgaaatgcgataagtgcaaggctgttgctgatccctacatcgagtgcgagttcatgatcatcttgattgatctcgtcctgcacaagacaagggcgtaccgccatgttctgtttaataagctgagcatgggatcatccgttgacaaggtatgaaatatgaatctatgctttctaggccgactctggttgctgtatcacattcctggaaacatcaaattggtgcttggctcatactgcaaacatcgagtaccacctttcttttggctggtctcatagtagtaatgctctaaatctctaatcatttatgcatttcactttgacttgccttacctaatcagtatgaaacaattgttactggagatgcccacttgtcgagtagttaatgtatggatgaagctaaatatggctttgtcatcgttatccatgctaaattgcctggacccaggtgtgctctcctttctgcattaaagcaaagcatttacttcttcggtatcttttctgtttcaattttatctcgtggagtaacacaagcaatcaggaaggtatggatggcattcaattttactcaataattcccatgcttctgcttgaaaaactggaacttttctttctgccttttgctaacgatagcattcctgtttcaccgaaccttcggccttttgtgatttttcgacccttcacaacagcatacaagaaccaatttgacaacaacatacaagaaccaatttggcacaaaaaagttttctatccgtataggttctaaatgaacagtttggcaatcttgttgcaatctgatctcatattgtagtgatttcataccttccctcaagaacatatttggtgggtatgtcttcatgaccatatataatttgattccttttctaaaatgtctgttgtgttctggtttgcagggaatactttaccggtctactttgatacacattgctcttgacacattcagaatatctttttcgaaaggaaacagagctggtggggcttcttccaggagcattttctcaacagtttccaattgcactgaggttgttggcgatgcattattgggaaacatcgtatttatattcatgttactcctgggagtgcgattttttctcaaattatctttcgatattataaggtatagggatattctgttcgctgtcatcatttcaagctacttcaagttgtttcttttcacaatgatggtttgggagtttccgtcatctgttatattcattgttgagatgtttgttctctcatcaaacgttgtagccctgagagttgtctcgcagtttccaagagcccactgtttcgcggtctgcttactagcgcacgcagcaaaatacttgacccagcgatggatccttggaacgccatgagagcctgaactcgtacagatcaatcatcctggtgcttccagcgacgtctataggtatactgtggcctgatgatgagctctggtttctatcgagttctttgactgtgttgccttgtctcctccaccccctctccctgtgactgtgagtactatcttcaatgtacttgcggcgaagacggatatggcatctttactcataggcagtagctgttgagtgttgtgtggttggtacttggtcccttgacccaaccaccggcctactactacgtagcatctgcggcgtctcctgttcacgaaagaatgcagcaaaggaaagacctactaggctattaccatcgtgttcttctttggcggttctgtcaacattacctgtgaactctcgtttcctggctgcagctgcagatgtgctccagtggagcctaccgctacgcgctaccactttgtgttggacacttgaactgcaatgcacatgcacagtcacgggcacagatagtct

SEQ ID NO: 22243 - DNA, 2061 bp, Zea Mays
catttttaagagtagagaagaaaacactggaccgccttcaccctgcttttcgtcttcctttcaccccgcttgcgctctctctccctctccccacctctctcctgcgccaactgggcgaccgccgccgccggctgccgggccgccgcacgcctccaggtgcccaggtcttcgtaggtcccttagctcggccttcgtcagggttcggggtccttcgctggcgacgatcacccatcaggtctcctttgaaagaagaattaggcagcacatctttacgaatcgaggatgtcagtttctatgaaggacctggacccagctttccgtggctctggacaaaaggacggcttggaaatatggcgtattgagaatttcaagccgatccctgcccctgcatcttcgtatggaaagttcttcatgggtgattcttacattatcttgaagacaacagccttgaaaaatggttctcttcgccatgatatccattactggattggtaaagatactagtcaggacgaagctggaactgctgcgattttaacagtagagcttgatgctgctcttggcgggcgtgctgttcagtaccgagaaatacaaggcaatgaaacagaaaaattcctgtcctattttagaccatgcatcatgccacagccaggaggagtggcatctggattcaaccatgttgaggtcaatgagcaggattacaagacccacttatatgtctgccatgggaagcatgttgttcatgttaacgaggttccctttgctcgatcatcccttaatcatgatgacatatttattttggatacgaagtccaaaattttccagttcagtggctcaaactcatccattcaagagcgagcaaaagctcttgaagttgtgcagtacatcaaagatacatttcatgagggcaagtgtgaaattgcatctgttgaggatggtagaatgatggctgatgcggaagctggtgaattctggggtttttttggcggctttgcccctcttcctaggagggcacctgcagaaggcaatgagaaacatgatgaaactgctttcaaattgctatgttttgaccaaggaaagctggagcctgtcgactgccaatctttagcacatgaattacttgagacaaacaagtgttacttcttagactgtggtgctgaattgtatgtttggatgggtagaattacatccctgatggagagaaagggtgctagtgaagctgctgagaaattgctctctgattcaaaccgaacaagaacacatataatcaaagtgattgaagggtttgagactgttacgttcaagtcaaaatttaaggagtggccacagacacctgagttgaagttgtcatcggaggatggaagaggcaaagttgcagctcttctcaaacgccagggcttaaatgttaagggtttgatgaaagctgctcctacacaagaagaacctcaatcctatattgattccactggcaatctgcaggtttggcgtgtaaatgataaagacaaggttcaactctcaccctctgaccaatccaaattttacaccggcgattgctacatatttcagtatacttatcctggagatgataaggaggaatgtcttattggaacctggtttgggaaaaagagtattgaggaggatagggtaatagcagtttcacttgcaagtaagatggttgaatctgctaagtttcaggctgtccaggcgcgcttttatgaggggaaagaaccgatccagttctttgtgatatttcaaagcttccaagtgtttaagggtggtcttagttctggatacaagagatttatcgctgaaaatggcatcgatgatgaaagttattctgaagatgggcttgcactctttcgtattcaaggttcaggaccagaaaacatgcaggcgattcaagttgaacctgtggcctcatcattgaattcatcatattgttacattctacataatggaaacactgtgttcacttgggctggaaatctgaccactgcattggaccaagagttaatggaaaggcagcttgatgttattaagaggactttggcgtcagtcagttaa

SEQ ID NO: 22244 - DNA, 3417 bp, Zea Mays
gcaaggcgcttgttataaagccgcaagtggtaccatttctcactcgccctctctccgctcgctcgctctctctctcaccgaatcacacacacaggcaggccagtgaggcaggggcacgaaggcgcggctccctctctcaagcccctcgccattactcgctcataaaggaagaacagagcgagcgggtagcgaggaagaagctgggccgcggggcaagaggagagaggtccccagccgtaggtctgctgtgcaactccggctcgccgcctgccaaccgcgcggcgcggccaccacgctaggcccctcgccctcctccgggcggagacgggaaggccgtgcgctcaaggatggcgcgcgagcagctggaggagtccatcgtggccgacggcaacggcaaggaggaagaggtcggggtcatgggcatcggcgccgcggacggcgccgacgaccagcacggcggcggcaagctcagcatgaagagcctgctgtggcacggcggctccgtctgggacgcgtggttcagctgcgcctccaaccaggtggcgcaggtgctcctgacgctgccgtactccttctcccagctggggatgctgtccggcgtgctgctgcagatcttctacggcttccttggcagctggaccgcgtacctcatcagcgtcctctacgtcgagtaccgctcccgcaaggagaaggagggcgtcagcttcaagaaccacgtcatccagtggttcgaggtgctggacgggctgctgggcccctactggaaggcggcgggtctggccttcaactgcacgttcctgctgttcggctccgtcatccagctgatcgcctgcgcgagcaacatctactacatcaacgaccggctggacaagcggacatggacgtacatcttcggcgcctgctgcgccaccacggtgttcatcccgtccttccacaactaccggatctggtccttcctgggcctcggcatgaccacctacaccgcgtggtacctcgccatcgccgcgctcctcaacggccaggccgaaggcgtggcgcactccggccccaccaagctcgtgctctacttcaccggcgccaccaacatcctctacaccttcggcggccacgccgtcacagtcgagatcatgcacgcgatgtggaagcccgccaagttcaaatacatctacctgctggcgacgctgtacgtgttcacgctgacgctgccgtcgtcggcggccatgtactgggcgttcggcgacgagctgctgacccactcgaacgccttctcgctgctgcccaagacccggtggcgcgacgcggcggtgatcctgatgctgatccaccagttcatcaccttcggcttcgcgtgcacgccgctctacttcgtgtgggagaaggtgatcgggatgcacgacgccaagagcatcttcaagcgcgcgctggcgaggctgcccatcgtcgtgcccatctggttcctcgccatcatcttccccttcttcgggcccatcaactccgccgtcggcgcgctgctcgtcagcttcaccgtctacatcatcccggccctggcgcacgtcctcacctaccgcacggcgtccgcgcgcatggtacgtatacatatgcatgcgtgcatttgcattgcattgcacccccgtcgtttagcaaacaataacaacggcgtcctgtggcctggccggccgtcgcgttgcctaatgcctactggttcgggtacgagtaagtgacccgatccgttcatccccgttgcctagctagagtgcagtagtaccgccaccagtcgcagcagctgtcacgaacagtggcaggactgcaacacgaaatagacagtggagatccgtgcacacgcagcagccagttcacgttagatgcaaagcaccggtcccccacttgggcaaatcccccaatcattgaatggagacaacagccacattcaattcgaagccggccccgcccccgcggcgcccgacaacgatatgggacgacggatcggggatcggaacaccgcatcacccccacgtcatcatccgcgtctctgcccgtcgcctcgccgaatgccggtgcccatggcagatgtaggcttcactgtgccggttccgacagctggcgggggcggtttcggagcgacttttttgcgagtacggcacggcggcgatggcaacgccggcgtgggtcaaggaaccgcttgcctgtgacggaagatctgacgtagcgccgatgcggtgctgacgttgggtgtcgcgctgtgacggaagaccctcctggcgaggcgcgacgcgacggtggtcgcgacgtcgcggcactggcgcgcgtctggacgcactcggccggccaatcgcgctcccaggtcccagggcccggcatcgtgtggcggtgtggctggaacgcgagagatgatggctcctctgtcctccgtagacaacgggatggcgatggagatgtgagatctcggtgtgcgctggagggttcctttcctcgccctccgttttccccagctttttatttccgaaaggaattcgagcagtgaccctgtgaaaatgcctcgaaaaggatagggctaggaacaagctaaggcggggcacgccgcgatgcttatcttttattcatgtcagtgcttctggcgatcgatttcattctgacgactgctgctctgtgtttccctgcaaaaaaaaaattatttgtttttgcaacagaacgccgcggagaagccgcccttcttcctgccgagctggacggggatgttcgtcctcaacatgttcatcgtggtgtgggtgctggtggtcggcttcgggctgggcggctgggccagcatggtcaacttcgtgaggcagatcgacacgttcgggctgttcgccaagtgctaccagtgcccgaagccgccggtcccggcggccgcgcagtcaccggcgccgctgccgcaccactagggcgcgcaggccccgtgacggcatggagctagcgtcgctgcttgcattgcagccggtgttaattgctactaggttttggtcgccttgtaatatacaagcctcctctagggtcgtagaactcgatcacagcagagtcacgcaaaggcggctcgtgccgtgccgtgccgccgccgcgttgctttcccgcccgccctcctctgcctgatcggtccgtcggcattggtgtcgttttgttttcgtttggcttgccaccggtattaaaaagttgagtgatggtcatggcttcttaatccatatgatgatatgacatacgtatcctatataggttcattagttatttttccttgttggttcgtggaggtcggtccatgttgtgtagcgtgtgggtgactgtaatggactgcgctggaatgctagctaaaggcagaaaacaaaaaaccacagtgcccttttgtttgttattgccctctgctcattagtttctcgctggaatttt

SEQ ID NO: 22245 - DNA, 3439 bp, Zea Mays
taattccgttttgtcggcccaagatcaccaccctctttgccaacgaacgaacgaacaaggcgcaccaaatgtccaaaccttaaaaccgacggaaagagaagacccacatctcaccgttcactctccctctctcctccccctcctcccagatcccgatccgcggctgcctccggcggatccagccgcttcctcccgccgcagatccgccgcggccgccatggagaagccatgctctctcctggtccacttcgacaagggctcggccgcgatggcgaacgagatcaaggcggatctggagggcagcgatggccccgccaaggccgacgccatgcgccgcgccatctcgctcctcctaaacggcgagacgctcccgcagctcttcatcaccatcgtccgctacgtgctcccctccgaggaccacaccgtgcagaagctcctcctcctctacctcgagatcatcgaccgccgggatccggccggccgcgccctgccggagatgatcctcatctgccagaacctccgcaacaacctgcagagtcccaacgagtacatccgcggcgtcacgctgcggttcctctgcaggctctccgagcccgaggtgctcgagccgctcgtgccgtccgtgcttgcgaacctcgagcacaggcaccacttcatcaggagacacgctgtctcctccgtatccgcgatctaccgcctcccgcatggggaccagctcatcccggacgcgccggagctcgtcgagcggttcctcgcatctgagcaggacgcgtccgcgcggaggaacgcattcctcatgctctgtgcatgtgcacaggaccgcgctgtcgcctacctgctctcaaacgccgaccgggttgctgagtggcccgatctactgcagatggccgttgtggatctcatccgcaaggtctgccgatcccagaaccgtgccaacaagggaaggtatatcaccatcattacctcgctgctctccacgcccagcacagcggttgtttatgaatgtgctggcgcgctggtgtcactctcttcagcacccacggcagtgcgagccgctgccaacacctactgccagttgctctcttcgcagagtgacaacaatgtgaagctcattctactggatcgcctcaacgagctgcacactttgcaccgggatgtcatggtgggggtggtaatggatgtgcttcgtgcactggccagccccaacttagatgtcaagagaaaggttcttgatttagttctcgatctgctcaccccgcgtaatgttgaggaggtggtgctttatctcaagaaggaggtggtcaagacgcaagctggagacctcgagaagggtggcgagtaccgtcagatgctggtgcaggccatccatgcctgtgctgttgagtactcagaggtggctgggtctgtagtacacctccttatggacttccttggagacaccaatgttgctgcagctgttgatgttgttctgtttgtacgtgagatcattgagaccaatccaaagctgcgtgtttccatgatccagaggctaattgatacattctaccagattcgagcatcccgggtctgctcatgtgctctctggattcttggggagtactccctctctctatcagaggttgaaagtgccattgctaccattaaacaatgtcttggggatctaccattctacactgtatctgatgaaggggaggcaactgattctgctaagccagccaaggcagtggtgaactctgtcactgtatcttccaggcggcctgttgttcttgcagatggcacttatgccacacaaagcgctgctactgagaccattttgactccatcagttgctcctgggtcattggcatcaaccctgaacctcagatcactcattctatcaggtgatttctttctggctgctgttgttgcatgtaccctggccaagcttgtgctgaggctggaagaagtgcagccatctaaggttgagtcaaacaaggcttgcactggagcattgctgatcatgacatcgattctgcagctgggccagtcttcttaccttccccacccaattgataatgattcatatgataggattgtgctgtgtgtgagattgctttgcaatactggtgatgatgtcaggaagatttggttgcagtcatgcagacagagctttgcgaaaatgcttgctgagaagcagttcagggagacagaggagatgaaggcaaaggcacagatctctcatgcccagccagatgatcttattgatttttaccacctgaagagcaggaagggcatgagccagcttgagttggaagatgaggtgcatgatgatttgaaggctgcaactggtgggtttaccaaggatgcagatgacgcaaacaagctcaaccgcattcttcaattgactgggttcagtgatcctgtgtatgctgaagcatttgtaacagttcaccattatgacattgtacttgatgttactgtaattaatcgcacaaaggagacacttcagaacttgtgcttggaattggctacaatgggagacctcaaacttgttgaccgccctcagaactacaccttggctcctgagtctagcaaacagatccgcgctaatatcaaggtttcatcaacagagactggagttatatttggcaacatagtttacgagacttcaaatgtgatggaacgatcagtggttgtcctaaatgatattcacatcgacatcatggattacatctcacctgctacctgtgctgatgttactttccggaacatgtgggcagaatttgaatgggaaaataaggtggcagtgaatactgtgattcaagacgagaaggaattcttgaatcacattatcaagtcaacaaacatgaagtgtctgacaccaccgtctgcactagacggagaatgtggtttccttgctgctaatctttatgcaaagagtgtgtttggtgaggatgctttggtgaacatcagcattgagaagcaacatgatggcaagctcagtggttacatccgaataaggagcaagacccagggaattgcactcagcttaggaaatccacgtgccagagataccagtgccgtggcattgaattgagtataaatgtttttttgtacaaaaggatcaaagaaacagataagacgacagttatgaggaagtcacggtgttagatccctgagcatgaagttctcggtcgaagatccatgttgctgtagtaacgatgctgttccaacttcctttgctgataaaatgacaatgtagaaatagttctgaagttcatgttgatttgtcgacaggtgggtcaattgtgatcctgtactattgttatgaatccctcttgttttgatgttatatttgctcttattttaattttatggtcttgaaactcaaactcggaggttgtcaccttattttattttttattcttagtttattgctactacggtttgtatattatat

SEQ ID NO: 22246 - DNA, 1847 bp, Zea Mays
gcagcagcaaactagttgtgtgccttatcaccttttgaatcctgggtgaccaccaaatgtcactcaggctcggatgcatgatgaaagcttacgatatgttctgccagaccaagctatagctgcccttgccgttagtcttccaaagggcccaacagaggtgtttgctgtcatagcagaaactgacctaagcatttcaagatttatgctagtgatggaagactactttgctactgtgaccgcaaaaaactggaatggtacattcagcgtaatttggcgaaattgattgaaaatagtcctccagcaatcatgcttctctttgaacctaaaggtcgtccagaggatgaagataacgagttctatattcagagcaagaaaaatatttgtgtgggctgtggagaaaagagccattatattagatacagaataataccgtcatgctacaggatgcattttccagaacatttaaagagccatcgttcacatgatattgtacttctttgtgtagactgtcatgaaatagctcattcagcagctgagaaatacaagaggcgaatagcagaagaatttggaatacccctttttgtgcaaaagataatgaactcgggtgatataagtttgattaccaacacatcagtatctgaagataaattgaatggaacaggtgtctccccattgcagctgaggactgctgccatggctcttctacgtcatggatccactatgccattgaagagatgtgaagagctaatgcagattgtgaagtcatactatggtggtagagatgtgactcctgaagatctcgagatggcattacttgttggtatgagccctcatgagcgaaggcgtcttgaaaagaaaaagggatattcgtttagagctcaggctcaaactattattagaaagagcagcagcaataccatctcagaagacagtggacatggatcagaaaattgtcatgccttatctgcgcgatttcctgaggttggaactggtagtaatggtcagcaagagtttgatgagacagggaatcaaaaccagctagagaatttaaccctgagccagggaagctcaagtttgccagtcagcatggaggacaccacttctgatcatgacactgtgacactcgagaccgataccgagcagcaagcaagaggtgcctgtactcctggaaacagtcatgacgacaaggaacaatccatatgtgacaattctagtcaggtcatttccaagaatgctgagaagatatccctgttgggtcatgggcatcatggtaaacaagttgtggaacttttgttttctaatggtggagaggaatttgttaaccagttttgccaaaggtggaggcagatctttgttgaagctgttcacccccgttatttaccttctggctggaatattaaccacagtggacggcgggattttggtgacttcagtgtctacaagccaccaaggaaagatcctcaatctgcaactgcaagggattaggcttacgcgggtgtcatgctgtcgttggtaccctgaggttcaacttactttccagaattggttccattcccttaaacttgatcttgttgtacttgttccattcccttaaacctgatattgttgtacttgtatgtatctcaatctgtgtgtttgttcgagtaccttgaaataccaatttcatctcctatgtatttctttgagatgaactttgcatcagttttgttgagccgtttttttatacgtgaggatttagagtactaacaatttaagtccaagaaaaatcaacagtgaagttcaactcagcagattaaatcttcaaagtgccgtttttaactgggagttgagctcaaattggtttcttc

SEQ ID NO: 22247 - DNA, 256 bp, Zea Mays
tttagactgcgacgtgaacgaaggcctttagccgaaggtccaaaaaaaacaccttccctttgctagaatagcgaatgacactgacctgcgggacccaccaaactgtggggctctggacatataaataggagcttgcattgcaagcatttcttgtgccatttcagttgcttccattgtgctcgtctttttaaactttcttgctttgttgagtttaattggatttcaagcttcggcatttcaacaaccatagacttaa

SEQ ID NO: 22248 - DNA, 287 bp, Zea Mays
atcagaatttcatatacacaacaattacataactagacatcatcacacagtgctcaaataataacttaaagaggtattaatttgattacatcatgatgtccgagacattcacatagtcttaaacatagatcaaagtgcgaatacaaaatatagtaatataaggccttcacaggcagccgactgggggtgtgccgctaacccatacctataactcatcatagtcttgaaactcctagaagtcctccgccttcatcttctcctgagcaggggttgcattgcggacaacc

SEQ ID NO: 22249 - DNA, 1204 bp, Zea Mays
ttcctcgcgcgcgcagcgccttgtcgccttgcgaggtgcggcgctacgtgtaccatgacgtcgtccgcctcggcgacctagagaagctcatcgactgctcctgtgtccagtgccaaggtgatcttcctgaagccgaggccgcagtccaggcctttcaagggctccggcaacatctgcctcacgtgcgacaggatcctccaggagcccttccacttctgctccctctcatgcaaggtggaccacgtgatgacgcagggaggggacctgtccaacatcctgcagcactacggcgccggcggtggcggtggcggtggcacggcggacccggaccgcctcgcgttcccgaggttcgagaacctccgcgtcgtcgacggctcggacctcgacgacgacgtccaggtcgtcaccccagactccaccctcgaggacccgaccaacaacgcgggcggcgggtccagcgacaacggtactgacgacgccagacggcaggtcgtcgtccatggcggcggcgaggcggccaagcggaagaaagggggcggcttcttgccccagatcgtgctgtcactcggcggcggcggcggcggcggcaacaggaggaagggtgccccccacaggtcccctctggcctaagcagcgctaccttcatgcatgcgtccccctgctgctgctcgttatatatcacaagtcacaacacacgtagcgcgctgtggttgcatgcagtgatgatggtgtgggtggtagctacagtattaattagtagtagcgtgttataatagtatcttaatggtgattagcctcgtagagagacgacgacaagctggtagctggtcgatcggttttgcttgggggggaaggtcttggtggccttgtgatccgtctagcagctcgctaggaccaaccatggccgccgcgccatctcatgagactttagagagagagagagagagagagggtcatgggggaggtagaggggggagagacggttgtaaaagcagttcccattgttacaggcaccaggtagtaactggtcagtggggcccacttctgcaggcggtggggcccatacgatcgaggtggctaccaattttgtatttgatgtaccaagggttactcgcggtctcgcgcatacaatttccacacctatatatgttatatataaatgataatatatctgaattctgtcccagactaaacaggttgtttt

SEQ ID NO: 22250 - DNA, 676 bp, Zea Mays
  misc_feature (676)..(676): n is a, c, g, or t
cggaaactcctccgctccgctcctcactcccgctcccccgctcgctgttggtggaaatctagggtttcggtggggttcttgccgctgcggttgttcgtgcggcgcggatttagggagggttctgaggcgagggcttttgccccctcgagcgatttgcagctttgggtccgatacagtgctcatgctcactaaatggagtctcacaatggcgaggccaatgacttgcctccaccacctcctctgattgctggtgttgaaccacttaaagctgatgaaacaaagatgccattgaaacctaggagtctggtccagagaaatggatttggcagaaaggggcagccaataaagctgataacaaatcacttcaaagtttctcttgtgaatgctgaagaatttttctaccattactatgtcaatttgaagtatgaagatgatacaccggttgatcgcaaagggtcaggaaggaaagtgattgaaaaactgcagcaaacttatgctgctgaacttgcaaataaagattttgcctatgatggtgagaagagcctgttcacaattggtgctcttcctcaagttaaaaatgagtttactgtcgtggttgaagatttttcaactggaaagactcctgcaaacggcagtccaggaaatgacagtcctcccggaagtgaccggaaaaggn

SEQ ID NO: 22251 - DNA, 693 bp, Zea Mays
tgcacttgcgtttgctgactagtggaggttgaagccctggtgatccaaggccccaagctgggcaccgtgctcagccaggtgaagaagctggaggcctccgtgctggtgctcggccagggcaggccgtctccctgctaccgctggctaagctgtttcttgcggagcagcagcgaggagttcgtggagcagtgcatcgaccaggcggagtgcctgacgctggcggtgaggaagcagagcaaggccgtcggcgggtacctcgtcagcacccggtggcagaagaacttctggctcctggcctgacagccattttacttgctacacgatcgatcatattttattactcccacatatctctgctaccatttcgtgtaaccaagtgcgtcacaactgttctctatctctctgtgccatgccgtgtatgcgtccgccatggatcgtcctgccagcctcctcccgttgtaaagccaaaaagagccccagatctctgaccgccctcctataaacctgtattctttcttcattttccctgcgacgagtcttgacttcttgagcgtgcgcgtgtctgtacgggtaaccatcatgtaatgctgcatctgcatatctgttgtacacggtgcttcttttgtttgctggagactggagttggctttaggctctcaagtttgtgccgattacgctaccggatggacgaac

SEQ ID NO: 22252 - DNA, 551 bp, Zea Mays
aaagcccgtcagccggtgtgtagacccaatacggcccggccgatttgtcgctgacgtcacctcatcttcaccaccggagtccggagtaatgcgcaggccacagggtcgggttcgctttttcttggcttcttctctcgtccatccacagggggaaggagcaggagggagggagccatggttgtcagcacattcactggccccgggattgggatcgggttcggtgtcggctgcgggttcggcgtcgggtgggggttcggaggaatgcctcttaacacgttcggcttgggtattggtgggggctgcggagttggtcttggactaggatggggctttggaaatgcttttggttgtcagtatcgatcttcaagagtccagttccagggcattgaatttcagaagaaggctggaggagatgaatcacaaaaagttgtttcacccgagcttgctgaaaagtctcatccttatggctagtattcctgctaccacaaaatccacagagactgagttctgtgtgctgagttgcagtttaattacatacattttcttttctc

SEQ ID NO: 22253 - DNA, 1317 bp, Zea Mays
ttatattcaagatgttagagatttagaaggagaatattggtgaagcaataacttgatattgggttctagaccaaagaagcaatggaaaaggaatcatctgccacatacgagccaaaaaggaacagtgaaataagggtttttgagagttcagatgagatttcaacggatcttgctgagtatatctcacaagtttcagaaatttctgtcaaagaaaggggatactttgccatcgccttatctggaggtcccctagtcagttttttggggaaactttgtgaagctccatacaacaagacactggattggtccaaatggtacatcttctggtctgatgaacgtgctgtggcaaaaaaccatgcagagagtaactataggttaacaaaagaaggattcctcgccaagtaaaaaggttgatgccgattgcaagtagagcacatgttgaggtaccgattctgaatggccatgtctactccataaatgacaatgccacagtggaggatgcagcaacagactatgaattcatgatcaggcagctggttaaggtccgcacaataggagtctcagagagaaacgactgtcccaagttcgatctcatccttctcaccatgggctccgatgggcatgtggcctcgcttttcccgaaccaccctgccatggagctgaaagacgactgggtcacctacatcaccgactctccgcagcctcctcctgagaggatcaccttcactctcccagtgatcaactcagcatccaacatagcaatagtgtccactggtgatgacaaagcaaaggctgttcacatagcagtttctgacatggccgaaggtcttgatgctcctacatcactgcctgctagaatggtccagccaacggacgggaagctggtatggtttctggacaaggcggcggcatcattccttgactccaagaacgacgacgacgacgcttgctacgatcgtcacgagtgactaactctgaggatcgttggtcgttttgaagcgaatgaacggaggtgtgtgtaagtaggtggtggcgtatgatggaagacgcgctgttccccttttagctcgatgcatgggttaattttgttctgagggtttttagctccggaaatctgaaattgcccttggtccttttgcagtgaggtgatttaaaagcgatgaaatgtgtatgcgatgttgagtcgtcaaagaacaccggaatttaactgtggtcgtataatattatgtgctacattctatgctatggcagttagttttttttgttttgtattattatttgttggcatgccttgtccatggtactgttctaaaaacg

SEQ ID NO: 22254 - DNA, 568 bp, Zea Mays
ctgcgaaaaccctagagatgctggttgaggaggtttgggaacggaggagccgaagcgagcagacgcggatcgaggaatcgccttccagggagactacggacgcagagagagccgggcgcagcggacgcggattcctcgatctccttccatggagagcttgggcgaggaccgagagccggggcggcgatttggggcgaggccgtgggattgcgggagagagagttgggcgaggagagccgggcgggagagagagtgaggggtgctggttcgcggacgcggcgctgggcacgaggggagcagaggcggtggtcgcggagcggaggatggcacggcgggacacgacgggatgatggagctaggggcgaagacacggcggcagtcacgggatctggggtcgcggacgggagcgtgtggagggggctcacggacggggacgggatgcagggaagggacggcgcgggcgagggcgagattgaagggaaaggacgacgcgcgggcggtggcgggattgcagggaggaagacggcgcgggcggggctggagcgggggcacggtaagggtggtggac

SEQ ID NO: 22255 - DNA, 1255 bp, Zea Mays
gaattcttgctttgtttgtggcctttgatctgcaagagggtctagcactgctaatctcctctatccaggctctgctagaactggtggaagcagtttgtacgggctaaccaagaagatgtggctgaggataacgctatgcttcttcctaggtcctatggtgattgtcatgtacccagatagtcattggtaatcggagctccgaccgagggactgcaaccgtgctctgtgaccatgtccaggtcgaggggttcagctcgggagccttctctgacctcgtcatgagggttcaattcgatttgcatgtcattgcaccaaacaagtttatgcttcgtctgcagccacctgacttcaagacaaggaaggtgatgagttgcataggaactccgatgtgctagaaatcctcatgaataccaggtttctaatggtctatgtgcagtatgagcgttcactagaaacaatcataggacacgatcaaatcatctggctcgggggcctaaattaccgaatcatgctttcccatcagttagtgaaggcccttgtcgagatgcgcaattctagagaaagattaggtgagagcttggtaaccctcaggtttcttttggttacccagtagtccagctaccaacacttgaaacaagctcttcagatgagaagcagcagaagcaacttttctttagaatctacttggtttctaaggattgtcagcatcataagttttccgccacatcctttcttatagggtgatggtttttgcattatcggttctttagcgtgtcgactgtatattttgttgaaccatggctttcattcaagatttttgaagatctatctagaacttccaccaatagtccaaccattacaaatggaagaggatctagagcaactgaaagtttttgaaaacagctatcggatgaaggtgatcaaagtggagcaaaatgcccgtggtgtggatgcacctgaggtgcattgagaaaatcgaagcgctgacgtgagcgagaaatatccagtagaaaatgatggcagagcgagtgctttgcattgctatcagtgtaggcttgataggagacttttggttgtgatatcttattttctaaatagtatgataccagataggggggccgtaagggcgccttttgctctagtattaggctgtctccagcaacgtctcctaaatttcgtcctttaaagtaatattctttatcatttacagcatcctctaaaaaattcgtcctctatattttcttcatctccaaca

SEQ ID NO: 22256 - DNA, 3048 bp, Zea Mays
agattctattcgcttgctacttccctctgctcctctgctactactacttcagttctcgccttctctttctgccctcacctgactcctcccttcctgccatttctctctcgatagtcgataccaccacacctccgctcccctccaagcctctccttttcctaagccccgacgtcttccgacttccaggtcggtgccgggcaacaataacttcttggtcaccgagccaaaagggggtcttttcggttcttgcgatcgattgatgagcggcgggtggcggcgatgagagcggatctcagcaccatccagcagacgctcacgccggaggcggcggcggcgctggcgcgtgccatcgacgaggctgcgcggaggaggcatggccagaccacgccgctccacgtcgccgccgcgctgctcgccgcgccggccggtctgctgcgccaggcgtgcgctcgcgcggccgccgccggtgccgggcctggcgccgctggtagcgccggcggtgcgcacccgctgcagtgccgcgcactcgagctctgcttctccgtcgccctcgacaggctgccggccgcggcctcggcggcggcggcggcggcgtcgcatgcgtcggggccgccggtatcgaacgcgctcgtcgcggcgctcaaacgcgcgcaggcgcagcagcgccggggatgccccgaggccgcgcagcagccgctgctcgccgttaaagtcgagctcgagcagctcgtcctctccatcctcgatgacccgtcagtcagccgcgtcatgcgcgaggcctccttctcctcttcagccgtcaagaccaccatcgagcagtcgctcgcgtcgccttctccgccgccctccgccgtctccaccccgaccgtcgccgcgactacgaccttggccccgtccccttctccgctctcacgactcggctcagccaacgcctacatgaaccctcgcctcgcagccgccgcaggcggtggcggggacgacgcgcgcaaggtgctcgacgtcatgctcaagccggcgcgccgcaacccggtgctcgtgggcgacgccgggccagacgcggtgctgaaggaggcggtacgcaggatcccgatggctggctctccttccctcgccggtgcgaaggtcttgccgctcgagagcgacctcgccaagctcgccggtgacaaagccgccttggcggcgaggatcggggacctgggcccggtgatccagaggctcctcgtggaccacggtgccgtggttcttgatcttggagatctcaagtggctggtggacgggccggcggcagcagcgtcagaggggggcaaggcggtggtgtcggagatggcgcggctgctgaggcagttcggaagcggcaaggtctgggccgtcggtacagccgcttgcgccacctacctccgatgcaaggtctaccacccaaccatggaggccgagtgggacctccaggcggtttctatcgcccgcagcgcgccgctcgccggcgcagctctcaggcctgggagcactggaattctgggcaactcagtggggatgttatcgcatactctccggcctatgccggtgacaccaacagcactccgatggccgccaggggcagggagtgacaatcctctgatggctaagccggtcatgtgcctgctttgcaagggtagctatgaccgtgagcttgccaagcttgcagctgagcagaaggaaaacccagcatcacgcgctgaggctgctaagcctggtttgccacactggatgcagcccagcagtgatcaaccacagaccaaggagcaagagttgaaacggaaggaggctgccgaagagcttgagaagaaatggcgtgaaacttgcgcccgtacccacggtaaccgtgctggggcgccagctctctccttgggattggctgccttagttccacgcccgccagttgagccaaagatacaacattccaggggtggtgttcccacccttcagatgaacaccaattgggagaagcctgagggtacccctacgtctgagcttcgtaagagtccgctaggcagcccagtgaagactgaccttgcgctaggtcccatggatcctggtgctactgtagagaatgaccagaaggaaaattacacagaagggcttacttctatgcaaaaggctaagatagctggaatctctgatatcgagtctttcaaaaggctcctcaaggtgctcacacagaaggtcagctggcaatcagatgctgcctcagcaattgctgctgttgtaatacaatgcagaactggcagtgggaagagacgtaacattgggacaaggggcgacatatggctcctgtttgttggtcctgaccaggcaggcaagaggaagatggtgaatgcattgtctgagctgatggtaaatgctcaaccagtggttgtaaactttggtggtgactctcgtttgagcaaggatggtaatggactcaatccgggtttttgggggaaaacctcacttgaccgggtcactgaggcagttcggcaaaatccatgttcagttatcattcttgagggcattgatcaagtggacgctgttgtgcggggaaagatcaagcgggcaatggagactggtcgcctggtagactctcggggccgtgaggtcagccttggcaatgtcatctttgttctcaccacaaattggctacctgaggaactcaggagaccaaagtttgaaacattgctccaagatgaaggaaggatgttggaggtagcaagctctaattggcagctagagctttctattgaggacaagcaggttaagcaccgagcggattggctatgtgatgatgctcgtccagcaaaggtagccaaagaactgtccggtgggcaaggtctatcacttgacctcaatttagcagttggggcattggatgacaccgacggctcacggaattccagtgatctctctgtggaacaagagcatgaaaaagggcaccttgcagtcaagtgttcaacaccagcccctgactatgatctgttgaatctcgttgatgatgccattgtgtttcggccagttgacttcgcaccagcccctgcc

SEQ ID NO: 22257 - DNA, 855 bp, Zea Mays
cccgcggtacgtgccctccttctcgcgctcctaaacaatcgcccgacatcctccccttccattctaggctccgtgtctcgctgtccccactacgtctcctccggctccatctcatcccgctgccgctccttctcatcgtcgtcgtcccagtcccggagtcgctcccctcctctggctaagcgcaggtcaagctacattccgtgctattcaaaggccccaaggatgacggcttaccagtgcttatggacctttgtttgttcgggacactacctttgctaatggggaacaggtaagcggtaggctatatatcttgtttctcttttgaaataatgcaaaatactcttacatctttacataagctttaatgttgattgttgcagatttttttggtccagggttaattatattttattttgttaatataattagaaatgatcacaataagggagctacatttgagttatttgagttgtagggtgcgttcaggagactatagggtcgtgggtgtaagatatggtttagagaatgtgtctactggaacatcctttgtaccaattccctgtatacatctatctatcgttaaaacaccttctattggaacatattttcactatacatacacttatgagtaaggtatttagctcaaatttatctatacaatatccttttgtattcctaaatagcctgccgaaagaagaagatagccacaattatgcatgaaagctccgtttctacgattgtataccgtcacaacgtacgggtattggactagtttgtatagaaaagagagaagggaaaatctgaattttcttgcctctacatgtccatctccaacaaagcaacaactacaaccca

SEQ ID NO: 22258 - DNA, 1869 bp, Zea Mays
ggttgcattcggaccgtccgtagcgcccagctgacctctaaacccttgtctccctcccccaagtgaatccgtgttgtacctctcgccgccgccgtaccatcgcccgaaatcctagccccattcaccgcctcgctcggaatccaagccccattcggcgccgccgcgaccgccggacaggaggtcatggacgacgtgtgcgaggggaaggacttctccttcccggagcaggaggagcgggtactcgagctgtgggcgaagctcgacgccttccacgagcagctccggcgcacggagggcggtgaggagttcgtcttctatgacggcccccccttcgccactggtctgccccactacggccacatactcgccggcaccatcaaggacgtggtcacccggcaccagtcgatgcggggccgccatgtctcgcgacggttcgggtgggactgtcacggcctccccgtcgagtttgagatcgacaagctgctcggcatcaccaaccggcagcaggtgttcgacctcggcatcggcaagtacaacgagacgtgccgcagcatcgtcaccaagtacgtctctgagtgggaggccatggtcacacgtacggggaggtggattgacttcaagaacgactacaagaccatggacctcaacttcatggagagcgtctggtgggtgtttgcgcagctctgggagaaggacctcgtctataagggcttcaaggtcatgccttacagcacaggatgcaaaactgcactgtcaaactttgaggcagcactggactataggactgttcctgacccagcggtgatggtatccttccctattgttggtgatatggacaatgcagcttttgttgcatggactacaacaccctggacacttccaagtaacctagcgctgtgtatcaatgccaatctcatgtatgcaaaggttagagacaagtcaaatggaaaagtatatgttattgcagaatctaggcttgggcagttaccagttaaggccaaagcttcaggaaagaagcaggcaccttcaaagggaagcaatgctgaagctgctcaggatggtttggataaggaatcatatgagctgctggtaaagattcctgggccatatttggttggcttaaaatatactcccctatttgattttttcattgaactacaagagactgcctttagagtgattgcggataactatgtcaccgatgatagtggaactggcgttgtccattgtgctcctgcatttggtgaagacgaccatcgtgtttgccttgctgctgggatatttgagactgctggacttgttgtcgctgttgatgatgatgggtgctttattgaaaaaatatctgattttaaagggcgatatgtcaaagaagctgacaaggatatcatcagtgctgttaaggataaaggaagacttgttagtaaagggagcattgaacactcttatccattttgttggcgatcgggtactcctcttatttatcgggctgttccaagctggtttgtcaaggttgagaagattaaagaccaattgctggaatgtaacaaggagacttactgggtgcctgactatgttaaggaaaaaagatttcacaactggcttgaaggtgcacgtgattgggccattagcagaagtagattctggggtactccacttccactgtggatgagtcaagatcgtaaagaaattgttgttatggattctatcgaaaagcttgaaaaattatctggagtcaaggtcactgatcttcaccgacactatgttgatgatattacaattccctctaagaggggacccaagtttgggacgctcaaacgtgttgatgatcttccattaggcattaagatatttagatggaggataggttga

SEQ ID NO: 22259 - DNA, 4868 bp, Zea Mays
cttctctctgccttggtgttggcagaattcacagtttaatgattcgtaaagatgagatgaaatataggttgagtctatgcaatcaatgattcgcattgttggcctatctgctaccctgcctacctacttagaggtcgcacattttttgcgggttaatccagacactggacttttcttttttgactcaagctatcgtccagttcctcttgctcagcagtacattgggatcagtgaaagggattacacaaagagaagtgaattattcaatactttgtgttatgagaaggttgttgagtccattaagcaaggtcaccaagcattggtttttgtccatacccgtaaggatactgggaaaaccgctagaaccctgattgacctagcagcaaaagcaggggaattggaattattttcaagtgcagatcatcctcaatttccattaatcaagaaagatgttagtaaagcaaaaagtcgtgaagttgttgaattttttgaatctggatttggtatacacaatgctggaatgatgcgatctgacagaagtttgatggagcgcttgtttggtgacgggcttttgaaagtccttgtttgtacagcaactttggcttggggagtaaacttaccagctcatacagttgttataaagggcacacagctatatgatcctaaagctggtgggtggcgagacttggggatgcttgatgtgatgcagatctttggacgtgctggaaggccacagtttgataaaagtggcgaaggaattattatcacaacacatgacaaattggcttattacttgaggttattgacaagtcagcttccaatagagagccagttccttggatctctgaaagataatttaaatgctgaagttgctttgggcactgtaacaaatgtcagggaggcttgtacctggcttggctatacatacttatttataaggatgaagactaatcctctggtgtatgggataacttgggaagaggttatgggagatccttctatgggtgcaaagcaaagaacatttattattgatgctgcacgagcactggacaaagctaagatgatgcgctttgatgaaaagagtggtaacttctactgcaccgaacttggtcgaattgcaagtcatttttaccttcagtactccagtgtcgagacttacaatgagatgcttcgacgtcacatgagtgaaagtgagttgattactatggtggcccattcctctgaatttgagaatatcgtagtaagagaagaagaacaggatgaattagaagcccttgcaaggaaagcatgccctttagaaattaagggtgggccgactgacaaacatgggaaaatttcaattctcatacaggtttatatttcccgtgctccaatcgatagctcctctttacattctgatgctcaatacattagtcaaagtttggcacgcataatgagggcactatttgagatttgtctgcgtcggggatggtctgagatgtcatccttattgttgcaatattgcaaggccgtggaccgcaagatatggccccatcttcatccacttaggcagtttgataaggatctttctcctcaggtattgtggaaactcgaggaaagaaatgttgatctggatcatctttatgagatggaggaaaatgaaattggagctctgatccggttttctcatcagggaaagttggtcaagcaatacgttggatacttcccgtatgtcaacctatctgcaaccgtgagcccaatcactaggacagttcttaaagtggacctgcatataactcctgaatttgtgtggaaagatcgttatcatggcatgtcagaacgatggtggatcattgttgaggattctgaaaatgataccatttatcattcagagctattcacattaacgaagaagatggcaagaggaacacctacaaagatatcttttaatgtaccaatatttgaacctcatccgccacagtactatatacatgccatctcagactcatggctacatgctgaaacactcttcactgtttcttttcataatttgacattgccacagacacaaataacacacacagaactcttggacttgaagcctcttccactgagtgctcttggcaacaaaacgtatgaggatctgtacagattttcccatttcaacccgatacaaactcaggcttttcatgttctttatcacactgataacaatgtactcttgggagctccaactgggagtggcaaaacaatttcggcagaacttgcaatgctccatcttttcagtacacaaccagacatgaaggtagtttacattgctcctctaaaggcaatagtacgagaaagaatgaatgattggagaaaacgtcttgtaattcagcttgggaagaagatggttgagatgactggtgacttcactccagatttgatggccctattgtcagctgacatcatcatttctacccctgaaaaatgggatgggattagtcgaaattggcatagcagaagttacgttatgaaggtcgggctcatgatattggatgagatacatcttctgggagctgaccgtggacccatccttgaggtcattgtatcaagaatgcgatacatatcatcacaaacagaacgttcaattcggtttgttggtttatcaacggcattagcaaatgctcgtgatttagctgattggttgggcgttacagatgacggtctattcaatttcaagcctagtgtgagacctgtacctcttgaagtgcatatccagggatatcctgggaaattctattgtccaagaatgaatagcatgaacaaaccagcttatgcagccatatgcactcattcacccaataaaccagttctcatttttgtgtcatcacgtcgacagacaagacttacagctcttgatatcattcagcttgcagcatcagatgaaaaaccaaggcagttcctgagcattgaagacaactccctagacatggttctttcacaggtttctgacagtaatttgaggcatactctgcaatttggcataggtctgcatcatgctggtttaaatgacagagacagatccttggttgaggagcttttttcaaacaataagattcaggtgctggtatgtaccagcacattggcgtggggtgtcaatcttccagctcacctggtcataatcaagggcactgaatactatgatgggaaaacaaaaagatacatagattatgatatcacagatattctgcagatgatgggtcgtgcaggtcggccgcaatacgaccaacatggcaaagctgttattcttgtccatgaaccaaaaaagagcttttacaagaagttcctctacgaaccgtttcctgtggaaagtaatctgagggagcacttgcatgaccacataaatgcagaaattgtttctggcaccatcagcaacaaggaggaggcgattatttatctcacctggacttacctatatcgcagattggttgttaatccggcctattatggattggaggatactgaaacaaacacattgaattcttatctatcaaggttagtcgaaactacatttgaagatcttgaggacagtggatgcataaaagtggatgaccactctgtaaagtacttgattttggggaaaatagcttcacagtattacctgagctacctcactgtttcaatgtttgggtcaaatattggccccaacacaacgttggaagtctttctacacatactgtcagctgcatcagaatttgatgagcttcctgtacggcacaatgaggacaatttgaatcgaatactcagcggaaatgtcccgtatccagttgatcaacaccaccttgatgatccacatgttaaagccaacttactctttcaggcacatttctccagagcagaattgccaataagcgactatgtcactgacttgaaatcagttcttgatcagagcatacgcatcatacaggcaatgattgatgtatgcgcgaatagtggatggcttacgagtgcattgacttgcatgcatctcttgcagatgatcatacagggtctctggtttgagagagattatgaatccctctggatgttgccatccatgaatgatgatatattagaccatctcaagagtagaggagtctcaacagtcccctccttactagatctttcccgtgaagaattgcgtagggtacttcaaccattttctgcgtcagagttgtatcaggatctgcaacatttccctcatgttgatgtgaaagttaagcttcataatgaacaggagcgatccaaacctccaactttaaacatcaggttgcaattgaaaaattcgcgacggtcagcatcaagagcatttgcccctagatttcccaaggcaaaacaagaagcttggtggcttgtcctggggaatgctacaagttcagagctgtatggtctgaaaagaattagttttgcagatcgggtgattaatactcgcatggaattgccacagacgttcaatgtgcaggagacgaagctgatcttggtgtcggattgctacctaggttttgacttggagtattctcttgagcatctcaccaagggttgagtgctttattcagagctgtttgggctgtttcattttgtatgggttcagcaaccagctcatcctagattgatcctgtaatcacgagacatgagttcattccatgaatttttgtttgtatgactacatccctcgtgttcatggttatattatatttaatagctatatatacgagtggataggtttataactttcatgaaatatcttttccgtaagcatagtagatgtttgagctctaaggttatgaccaacaaattgtgtatatggtcgtgcaaaatactattttataatataaactatattatttacatggtgaaaaaaagaa

SEQ ID NO: 22260 - DNA, 957 bp, Zea Mays
cccttccctagtttgcttactgctgagaagtttctcaaattgaccatggtgttgtaaatttgaccaacaaagaagattcaagaattaccgttttgctggattgccatgggatttctccattcagatttccaatgcaaatgatgaggtcatttgtcactgtagctcaagaaaactacccaaatcgtcttggagtattgtttgttgtccgccttcctccagttgtcagagttattgcacagacatttcttcaagttttgaaaccatctacaaagcagaagttacgttttgagggagattcatacaagaagacgttggcggagttcttgcaggccgtgccagcgtttctgggcggtaaatgcagctgcccacgatgtgagaagcctcgtaatagttcagtggtgcaggcaggggaagggagcaagaaccaggctcgcttggtcagcgttgatggcggatcacctgtcgtggacttcgacttcgatgaagaagagatcccatcaccttatagctgcgagaacgccatcagggctgcgataatctgcctgctgatggtgtgcatcttcatcgcgtttctggctgggatgaacgaccctgcatccgttccgcccagtgcctgagagctatggaatcgcctagtctcccatagtagagcttagattgtcagttgagtatatacacatctgtgttgctatttaggatgctactagggtgttgtattccctggcagcttctttctcggttgtcgtcagatcgccttctctcctaatgtgagcggagcagatgaataaatatcctgtgtgtggcaaatgttggttagcagttcaattagcccttcgatagtgtctttctttgcgtgcttgctgcagtagggcagtgtgatttctcgttagtgtacgtaaactcaaagttttcaaccacaaggcaacaacacactgactctagtggtttcagctcttt

SEQ ID NO: 22261 - DNA, 1336 bp, Zea Mays
ttgaaaagaaaatatgtgatgatgtgtctatatgatcactattgaatgaagggagaatatcctgagagagcgggacagccagagtgtcagtattatctgaagactggaacatgcaagtttggccctacatgcaaatttcaccatcccagggaaaaggctggaattgcagggagggtgcagctaaacacatcaggatatccactccgcccggtttgtcttccgttgccatttatatctcctcttctacatatgtctgtttgttttgctgaaaagaagtccactttgcttctgtagaatgaaaaggagtgtgcatattatttaaaaacaggacactgtaaatatgcaaatacttgtaaattccaccatccggaacttttcaatgtggtgccttcgtcacgtggttctcctatttatacctctgtacattcctctgcgagtgctggtccgcagtcctatactggaactatgccaagctgggcttttccacgagcttcttttataccaagccctaggtggcaaagtccttcaaattatgcgccgatgattgtacctcagggccttgttcaaatgcagagctggaattcatatactggtcagctgcagtcacctggggctcaacaaacttatggaagttcacaacaaggagaagctagtacaggaaatcagggaatgctgtcaccatacagacccagttcgtttcccgtgcctcaatatgcgctgcagagagagaatgtatttcctgagagacctgatgaaccagaatgccaatattacatgaagacaggagattgtaaattcggtgcagtgtgcaagttccatcatccccgggtgagatcactgccccctccagattgtgtcttaagtccaatgggtcttccactacgtccaggtgaagaactgtgcaaattctattctcgttacggcatctgcaagttcggcgccaactgtaaattcgaccatcctacagtggttgctccaatggtctatgcttgacctacttcgatttataaaatccatggcactgcctcaggcgctgtgaatgtttctcctaacttcctgccgggatcaaagttctgtaaattgagttgctaccggagatgtacagcccctttttttttggttaatccagatctttgggaataactctcgaaaccgaataaactttggatacagagatgccagttttcaggtgcctgcactatttgacattattgctgcacctatggttccgaacagaggaacagttgaattctctggaggggctgaagcctgcacttgtgcagttgagattatatcatcgcgtcgatttattttggaacctgtattcagctggtgt

SEQ ID NO: 22262 - DNA, 1114 bp, Zea Mays
aagaggaaccctagtccctagcaacgcctacagcgtcacggaacaccggcgaaccaaacctcggagaaaccctagcaaggccgcttgcccctctcaggcgcgacacagcatcggcgactagcgatgacaggatatcgcagccgcagtccgagccgaagctacagcccacggaggcggtacagccggagccctcctaggcgcaagcgctacgacgatccacgcgaccgctaccgctgggccggggccggcggaggcggggaccgacgtggttacggtcggccgttggcgcagtccggtctcctcatccgtaatatctccctcacagccaggccagaagatattcgagctacatttgagcaattcggccctatcaaggatgtttacctgccaaggaatttccacacgagggaacttcgtggttttggatttgtcaaattccgctaccctgaggatgctgcagttgccaagcgtgagatgcatcatcaagtcattggtgggcgagaaatttcaatagtttatgctgaggagaatcgaaaaacgccacaagaaatgcgcatgagaacaagaactagtggtaggtacatggatgaaagatacacaagactgtcaagatctccaaggtctcgttcccactttaggcgtgacttcaggggcagggagcgcccggatagttattcccctcagtactcgcactctccacgccctcgggacagcaggcaccacaggtcagatggtcgctctccaactccaagcctagatgaccacaaacctaaggcgacaccagtcaatggtggacatggtccagcagttgcatccagatagtatgatgccattatggatgccttgaattgtgttcggaggctggagactgcagactatcttttcaccaatcttctctaagagatgagtagggttgtagtaaacagatacttggtagttgtattacaggtgatggtttcggttatgaggtgcgctgttgcttttgtgacgctgctttaatgctttcccaaccgagggtagtagggtaccgtcgtggaattttgcgtgtttgttttttggctacaatattactaatactagtaacttgctcgcttcgagcgcgagtctttatcta

SEQ ID NO: 22263 - DNA, 1785 bp, Zea Mays
ccactccttgcgattgcggcgacgagagacgagagagagggaggtgccgaaaaaaaaaacggacaagagagggcgaagttaacactaacagggagggcagacggagaaccaggagcggcgtcgagctaaaagccccggcggcggtcatggccaccgcagaccagagccgtattttcatgaaggacgtcaaacgcgtcatcatcaaggtgggcactgcagttgtcacgaggcatgatgggcgagtatccacaggcaattttggtgttctttgtgaacaggtgaaagagataaatgctctaggatacgaggtgatcattgtgtcctcaggtgctgttggtgtggggaagcagaggctcaattacaggaagcttgtcaatagcagctttgctgatatgcaaaagccacagacggagctggatggaaaggcttgcgctgccgttggacagagtggcctcatggctctctatgatatgctatttactcaacttgatgtatcctcttcccaacttcttgtgacagacagtgattttgagaatccaaacttcagggagaggcttcgtgaaactgttgagtcactattagatcttaaagttgtaccaatatttaatgaaaatgatgccatcagcaccagaaaggctccgtatgaggattcatcgggtatattttgggataatgacagtttagccggtcttttggctatagaacttaaagcagatcttcttgttctactcagtgacgtggatggcctctacagcggtccacctagtgaacctcaatcaaagatgatacatacatacatcaaagataaatatcataacgaaattacttttggggataagtcacgtgtaggtagaggaggaatgacagctaaagtgaaggctgctctcgtggcttcaaacagtggcacacctgttgttataacaagtggatctgcatctgggagcatcattagagttctccaaggagagaagattggtactctctttcataaggacgcgagtttgtgggaaccatccagtgatgttagtgcatgtgagatggctgttactgcaagagaatgttcaaggcgtctgcagaatttgtcgtcggatgagcgcaataaaatattgctagacgtggcggatgctttggagaaaaatgagaatctaattaggaccgagaatgaagccgatgtagctgcagcgcaagatgctggatatgagaaatttttggttgatagattgaccctaaagccaggaaagatatcagccctcgcgaaatccattcgcactcttgcacgtatggaagacccaatcaaccaaatactcaaaagaacagagattgctgaaaatttaattctcgagaaaacatcatgtcctttgggtgtcctattggttatttttgagtccaggcctgatgccttggtccagattgcatctttagcgattcgaagtggcaatggtcttctcttgaaaggtggaaaagaagccatgagatcaaacaaagtattgcataagcttcatgatgtaattgatcttgtcattccaagaggcagcaataagctggtttcacaaatcaagacatcaactaagatccctgttcttggtcatgctgatggtatctgtcatgtatacatcgacaaatcagctaacatgaatatggcaaaacaaatagtgatggatgccaaaattgattacccagcagcctgcaatgctatggtatgtctaatttgttacaatttatagtatttaacatgtctcttttcagcttgcatacttaactactcttggcacgtccttactcaag

SEQ ID NO: 22264 - DNA, 3446 bp, Zea Mays
ggactatctccagtgcttcctcaagaagaaagtactcccttttggaagttagttctgaagcagtttgatgatttactcgtcaaaatattgatagcagctgctgtgatctcgttccttttggcccggatgaatggtgaaactggattatcagcatttttggaaccttcggttatctttatgatactggcagcaaatgcagctgtgggtgtgattacagaaacgaatgctgaaaaagctcttgaggttgcttttctatacttccagcaacagaacttgtcccaggagatatagttgaagtaggagttggttgcaaagttccggctgacatgagaatggttgaaatgttaagccaccaattgcgtgttgatcaagcaattcttacaggagaaagctgttcagtggcaaaagaggttgaatcaactccagcaatgaatgctgtctaccaggacaaaacaaacattcttttttcgggcactgttgttgtagctggtagagcaagagcaatcgttattgggattggttctaatactgcaatgggaagtatacgtgatgctatgctaagaacagaggatcctcacccctcgatttatatggtgattattctgctcacagttaaaaatctcacaatattacaggaagcaacgccgttgaagaaaaagcttgacgagtttggtacttttttggcaaaggtgatagcaggaatctgcatacttgtttgggttgtaaatatcggacatttccgagatccttctcatggtggctttgttaggggtgccatccactattttaaggtggctgttgctcttgccgttgcggctattccagaaggtctcccagctgtggtaacaacgtgcttagctcttggtaccaagagaatggctcgcttgaacgccattgtcaggtcacttccctctgtcgagacattaggatgcacaacagtcatttgcagtgacaaaactggtacccttacaacaaacatgatgtctgtgtcaaaggtgtgtgttgtgcggtctgtgcaccagagaccaatgactgatgagtactccattagtgggacaacatttgctcctgatggttttatttatgatgctgatgggttgcagttagagtttccccctcaatcaccatgtctcctccatcttgctatgtgttcagctctttgcaacgagtccactctacaatacaatcctgataaaaaatcttatgaaaaaattggagagtccactgaagttgctctgcgtgtgctggtggagaaggttggtcttcctggttttgactcaatgccttcatccctcaacatgctaactaagcacgagcgtgcatcatactgcaaccattattgggaaaaccagtttagaaagatatctgttttagagttctcccgagaccgcaaaatgatgagtgtcctctgcagtagaaaacaccaagaaattatgttttcaaaaggtgcccctgaaagtataatggccagatgcacacatatattgtgcaatgacgatggttcttcagtaccattgactatggacattcgtaacgagttggaagctagatttcaaagttttgcagggaaagacacgctaaggtgcttagcattagcattaaaacggatgccagctggtcaacaaagtatttgttatggtgatgaggccaacctcacatttataggattggttgggatgcttgatccaccaagagaagaagtttgggatgctatccactcttgtatgtctgcagggatccgtgttatagttgttacgggggataacaagtctacagcagaatcgctgtgtcggcaaattggtgcttttgagcacttgaatgacttttcagggtattcctatacagcatcagaatttgaaggattgcctcctttggaaaggacaaacgcattacaaaggatggttctgttttcaagagtggaaccttcccataagaagatgcttgttgaagccttgcaagcacataatgaagtggttgctatgactggagatggtgtcaatgatgcacctgctctaaagaaagcggatataggaatagcaatgggatcaggaactgcagttgctaagagtgcttcagacatggttttggcggatgacaactttgccacgattgttgcagctgttgcggagggaagggccatatataataacaccaagcagtttatccgatacatgatctcatcaaatattggggaggtggtttgtatttttgtggcggcagtgcttgggatgcctgacacacttatacctgtccagctactctgggtgaaccttgttactgatggattacctgcaactgcaattggtttcaataagcctgatggcaacatcatgtcagtcaagcctcgaaaggttaatgaagctgtggttagtggatggctctttttccgttatttggtcattggagcttatgttggtcttgctactatagcgggttttgtttggtggttcgtttattctgataatggccctaaattaccatattctgaattgtgtgtatttactggaactattgttccatggcctgctgtcaactttgattcatgttctacaaggcagacttcatattcttgcagtatatttgaggatcgtcatccatcaactgtttcaatgactgtgcttgttgtcgttgagatgtttaatgccttgaataacctaagtgaaaaccaatctctgcttgtcattcatccatggagtaacctgtggcttgttgggtctattattctgaccatgcttcttcatgtagcagtcctgtacattgaaccactatcagcccttttctctgtctctccattgtcgtgggttgagtggaaaattgttctttatctatccttccctgtaattttgattgatgaggttttgaaattcttctcaaggagaagcccacgaggtcgaagattccctttaaggttgtggagacgtgagatacttccaaaagagtcgagagacaattgattttaggcttcagcatatcagatgcatacaatgcaaagcgaaaagcttgtcttctgttagtattgagcctaattttggcaaatgttcatggatgaagatgacattgtacaaatctttatgtggctgatatctagggccgagcatcttcgagaatagagttcgcgactacacaattcattggggggggggggggggggggttctcagaatgctagttttgctcagaaaacatagagaagcttcgaaagccttctcactagttatagacggtgctacacttgtatcagaatgtcagatgcttacaaaaggatgagttcatgcaacacccctttctcccaaccaatgaaatcactgtacgcatcaggttctgtcaaattttcagggtgacagacgccgttctggtatttctgccattttatacatcgcaaaagttttgcaccttgatattgttggaaacaatggcatgttcggctgaaatttacaaccactgccg

SEQ ID NO: 22265 - DNA, 1134 bp, Zea Mays
ggccgcatcctctccccccgcggccgagctccacccccacccacccacacgcacacactttgccggcggcgagcaccaccaggacagcaggggctggtgagggggcttcacgtttcagcagtatccctgtctctcatagagagggttcaagcagcatgcctgtacaacacatccaggcttcgagtagtacaccaccggctactggtgagcctcgcattggtatgcgtagttgccccatcgatgtggaagccatcgatgatgatgccgttatctattcttcaagaccactgcctcgagcaagacagcagttgaccacgacagaaagtattactatcataatagatgatgattccgaaacaaacctagaaacagcaggcgatgctcttgacgagcatgtgaacttactgctatctctgggcatagaacgctcgcatgagcctacaagtgcaaccaacaccttccctggaataagcatggtggacacaccaaaagtaaacaccttcaagtggatccaggtgcctcctgaacctgtgaaggaggttccgaaggaaccgaagctcagctgcccgatctgtatgaacgagataaccgaagcggcgtcgaccgtatgcggtcacattttctgccagccgtgcatcaaggctgccattaaggcccagaagaagtgccctacctgccggaggaagctcactccaagacagcaacaccgggtgtacctcccatcgccttagtagcccagtgcagagtcattttgctacaagttctgccgtgccgggggctgtatgttggaggcaactggggggggggggggggggagcatagaggtcctgtttggttcgttcatttagtgtcataatcagttaacagggtaatctattaccattgctttatgtttggttagactatactgtaaacgattgcagtgggatgcaataccagccaatacaaaattattgccgctgctttttgactgttagccaactccgatccgtctttttggatcccacgttgcaaccaaacatagactggtaaccgttcacagcaaaggatagcaggtgcaataagttccattctcattaccactacctgttgccgaaccaaatagcacgtcttagtgttacgggaaaaaattgc

SEQ ID NO: 22266 - DNA, 165 bp, Zea Mays
atcgaatgtcacatcttactatataacagggattctatacaaaataaataattacattttaaggagacaatggtccagcaacccaaagttgactgggagacgacggcctagacctctcacgaatacatcgcagcatcatccatgcgcatcatcctgcggtacctg

SEQ ID NO: 22267 - DNA, 1618 bp, Zea Mays
acaccaccaccaccggcagcaagaaaaaacattctttgtcctcttctcctccgctccccatttctcttgctagggtttctacccctccatatcctcgctccacggtcatggcgaagacgaagcagggaaataaggacgtggattcgtacaccatcggcggcaccaacaaggtcgtctatgtgggagactgcgtgctgatgcgggcgtcggactcggacaaccagccgtatgtggcgcgggtggagaagatggagggcgacgggcgtggcagcgtgcgggtgcaggtgcggtggtactaccgccccgaggagtccaagggcggccgccggcagttccacggcgccaaggagctattcctctccgaccatttcgacctgcagagcgcccacacaattgaggggaagtgtgttgtccactctttcaagaactataccaggcttgacaatgttgggcctgaggacttcttctgccgattcgagtacaaggcggccaccggttcgttcacccctgaccgcgtggcagtgtattgcaaatgtgagatgccgtacaaccccgatgacctcatggtgcagtgcgatgcttgcaagcactgattccagggagcctgcggtgcgatgggcttgctcagagcttcactgagcatggtgccaagttggagtgttgcttcgtcgatttggtgcgctcccatgacgactcttatgccgccttgagcaatgataggttgattaggagaacaaccgctccgaacacgtcaacaccaagtgtgatgactgatgattgtgtctccaccttagaagctgctgccacaaatctcagcacctgatgcctggaagtggaggccgctatcgatatctaaagctgaacaagttgacaaagcattggtggactgaatagtgtttgacaaattttgcaccacccacgggtgatgagttcaccttccatggctgccaagcattcacccgacgggattcaagccaccttgacccatgatcctgacatcggtcagcatgacctggatactgggtttgggctggcacaacctggacccatgtcccggtggttccatccatcttgtgtggctatgaccattgaacaggccaaaaagctagatcactttgtttgctcagactgtttcaaagaaaatggttcaaagagactttcaaatgcatatgccacttcaccaaattttgagcctaaggctgaaccaaaaaggcagaggaggtaacaaactgtgagtggtaacatccatatgggtaaggggagatgtgctgcttctgtggtgaatcagcccttgccctttgctgtggtgagagcagaggtgtacagtgtactagaccagtgtttgctgttaggggaacgggttttgttcgatgtgtagaccgtgtggcatggcatgcagttgttggtagaggtcaaaagaacagtcgttgtgttcacttggtcagcttagcgccttagcccttgttaatgtgttaatgcactgtgttaactcagcgagccccccttgtggctgataatgcaagtcatgcagttgttgatacaaatgttgctgcggccatttcatcgactgtcattgttcagtggtactggagtttcggttttgccagctcagtgcagg

SEQ ID NO: 22268 - DNA, 314 bp, Zea Mays
ccggagctggagcttcgtcctgggcggtggggcgcagtggcggaagacggcgccgcgccggcgagtcggcgcctcggcggccgcggacaggggcgacgacgcaagaggctggcggcggcgcaggcagtcgcagtcgcgctacgcagtggctcgctcggctgggaggaagcgggcgttaggttagggtttaggtgggtgcctgatcgtcgtccgctcgttattctgggggttagggttttagtatgtcatggactgggctagggtttaaagttgtaggtccgtccatgtttgaaccattgagatttttgttatta

SEQ ID NO: 22269 - DNA, 2359 bp, Zea Mays
tgtacaaacccatctgattgacttgacagatggtgtgaggggtggatatacacatgtgccacccagaattgccttgaaggactggtccgaatactgagagatgtatccaacagttcatatgctcctgaatacgacattggtggcatcacagatccattcttacatatccgagtgcttaaactcatgcggatactgggccaaggagatgcagattgcagcgagtatatcaatgacattcttgctcaggtttcaacgaaaaccgagtcaaataagaatgctggaaatgctattttatatgaatgtgtggagacaataatgagcattgaagctacaagtggtttacgtgtgttggcaattaatattttgggtcggtttttgtccaaccgcgataacaacataagatatgttgccctaaacatgcttatgaaggccattgctgtagacacacaagcggtgcagaggcacagggcaacaatattagagtgtgtcaaggatgcagatgtttctattcgtaaaagggccctggaacttgtttacctacttgtcaacgatacaaatgtaaagccattgactaaggaacttgttgattaccttgaagtgagtgatcaagatttcaaggaagacctcactgctaagatatgctcaatagttgaaaagttttccctggacaggctatggtacttagaccagatgttcagagttttatctctggctggtaatcatgtgaaggatgatgtatggcatgctcttatagttctagtgagtaatgcatctgaacttcaaggatattcagtcaggtcattatataaagcattgcaagcatctagtgaacaggaaagtttagttagggtggctgtttggtgcatcggtgaatatggagaaatgctggtcaacaatcttagtatgttggacatggaggaaccaattacggtaacagaatatgatgctgtggatgccgtagaggctgctcttcagcgctactctgcagatgttactactagggctatgtgtcttgtctctcttttgaagctttcctcccggtttccaccaacatcagagaggataaaagaaatagttgcgcaaaataaagggaatactgtgcttgaattgcagcaaagatctattgaattcagttccattatacaaagacatcaatcgatgaaatcatctttgcttgaacggatgcctgtattggatgaagctaattatttggtgaagagagctgcttctatacaggctgcagttccatctgtaaattctgctccagcagtcacttctggaggcccatttaagcttcctaatggtgttggaaagcctgcagctcctttagctgatttgcttgatttgagttctgatgatgctccagtgactacctcggcccctacaacagcacctaatgattttctacaggatctgttgggcattggcttgactgattcgtctcctataggcggagctccgtctacaagcactgacattctgatggatcttctatctattggttcatcttctgtacaaaatggaccaccaacggcaaactttagccttcctggcatagagactaaatctgtcgctgttacacctcaagttgtggatcttcttgatggtttgtcctcaggcacatctcttcctgatgagaacgcaacctaccccacaatcacagcattccagagtgcaactttgaggatcacattcagtttcaaaaaacaacctggaaaacctcaggagactacaattagtgcttctttcacaaatttagcaaccactacattcacagatttcgtcttccaggcagctgtgccaaagttcatccagttgcgtttggacccagcgagcagcagcactcttcctgccagtggaaatgggtcagttacacaaagcctcagtgtcaccaacaaccagcatggccagaaaccacttgcaatgcgtatccggatgtcttacaaagtgaatggtgaggacaggctggaacaagggcaaatcagcaactttcctgctgggttgtagggccacctgtgtctatagggtttgggttgctctttcagacttatgcttgcctgctagtgagttgtgtacactggtagttggtttttggccgtccattatctctttatatatatagtgtacagtagatgacagcgattaatgatatatcctcagttttgccgaaatgtatttttatcttggtgcatatcggacttcagggtaaccaaaattttcacccttttccccgcgtaccaagcaccaaaggaatgtgttgtaccatgatattccccaatgtaattatttatttttctaatcattgtacaagcttattgtgcagacaaattatttgtttttcatgtgcgtttcttcaggc

SEQ ID NO: 22270 - DNA, 1715 bp, Zea Mays
gacattttatccacttgtacctacttgtttttcccctgtggcctcagtgatagtaaattgccaaggctgttgtaatgggggtcaacggtcatcacgaacctcgcagaggatgtaatggcaccgtctgcaatggtagtgtaagatcactagatcattttggtgatgtagatccatggacggcatgggcatacaagcctcgaacgatctcgctcttgctgatgggaacatgctttttaatttgggcaagtggtgctctcgatccagaacggagctcatctgctgatcgtgtttcgtcagtcaagaggggtgtatttgcgatgattgctgtttttttggcttactcttttcttcaggcgccttcaactgtactcattagaccacatcctgccatttggaggctagttcatgggatggcagttgtttaccttgtcgccctcactttcttgcttttccagactcgtgatgatgctaggcaattcatgaagtatcttcatcctgatcttggtgtcgaattacctgaaagatcatatggaactgattgccgcatatatgtacctgaccatccgaaaagcaggtttaacaatgtttatgagataatttttgatgagtttgttatcgctcatatcctcggatggtggggtaaggctataatgatacgaaaccaaccacttttgtgggtgttatcaattgggtttgaattaatggagctcacttttcgccatatgttgccaaatttcaacgagtgctggtgggacagcattgtcctagacatattgatctgcaattggtttggtatttggactggaatgagaactgtgcggtacttcgatgggaggacatacgaatgggttggtttgagccgccaacccaacattatcagtaaggtaaaaaggatgctgggacagttcacaccagcgcagtgggacaaggatgagtggcaccctacgcggggtccttggagattcatccaggtgctgagcctctgcgttgttttcatggctgtcgagctgaacacattcttcctcaagttctgcctgtggatccctccgcggaaccccttgattgtctatcggctggtcctttggtggttaatcgcgataccaaccatccgcgagtacaatacctacttgcaagacagcaaaccatttaaaaaggtgggatccttctgctggctttccctggctatatgcattgtggagctcctaatctgcatcaagtttggacacggtctgtttccaaagtcaatgccttcgtggctgatcacattctggtcagcagtcgccttgcttctcgtgctctttgtgtggacgtggaaataccgaacaatgaaaaggaaaatgatataattgtgaccaaaaaaatgatttgtttgcctccattctttacccgatttagtgttatcgtgtacataaaaatttattcaaattgtgtacatgtgctagcagtcaagtcttggtgatctgaagaggattatccatgagaaatttctatgccttctttgtctttgtattttccgtcagcgaagtaggatactggttcccctttggccctttaattcgtctgtattgccgcgtactacttcgttggccgtctcttaaatgtggagaacccttgatgcaacaacctatgaaataatgggattcgaatcccaaactgttgaataatgtttctcgatggcccaggaaaccatatctgcaggttgcacgacactaaca

SEQ ID NO: 22271 - DNA, 1520 bp, Zea Mays
aagccgccgccgccaccaccgcctcacccaagctttcatttgtcatgctggttgcccccgccttatcgtgcggtatcataaactgattttttgtggttcagttagacgagagcgatgaagagcaacttttgtgaactagagtttcagatgctaccatggtagtatttgacgatcaaaccctttttattagtagtttacttatgttgttttttacttcctgttctgagaagatgaattttgaatggtgatgaacaactgtgttttggactagagtttctgatactagtggtagttgaagaccaaaccgttaactgtctgaactcaaatctatcgagcgggcaatacctgacattttagatgatttttttttattaaatgcgtccattaccaattctgaaggaagactctgttcctctttgtataatggctcggacgccacatggtattctaaaatagttgtgtggttatatcctgattggttgcgttcttttatggcaatccaatcctggaaaggccgcatatattccatcgcatgcaaaactgataatttttccacgtttttttggtaataccttgaagtgatagtgcctgacctgcttgatcgtgtatcatgatatttcttttatatcggatacgatgatctgatagattccttatcttttttctcgtatgagttgtctaaaaagaggtgggtgacgataacaaagtaaaatacagccaatgttgcagaacaggccaacttttgcctattatattttggtatctcttaactagtggtgcgaggccaattgttcacttgttaatttaactaactaattttaaatgttggttggtttggtatcttggtaatattttggtatctctgaactaattttaaatgttgttagggtatattttgtttacccttgtaattgatgtgttaatgttgtttgtttcgaggtttctcttgaatgtaatcatcactggtaacattgtgtcttgagaggcaacaaattagagtctttgatgggcttctttctgtagctcattcagcgctttacgttgccaatagcaagcttggaataagttatcatgcattcactgtcttctcgaacagtgtgtgcatccccatgtccaacattcctcactttgcttaaacgctttgcaaaatttcttctgttgatgtgtgtttggcttgtatgtgactataaataacaactgccttactgcaggtgacttttttctgggatggagctcatatttgcaggtgattgattcatcttggggctgagattgaaataggatatggcacatatgataatgatcagagtggtttctgaacatacgaagtagccgcccaagagctttcaacctgccaagtttcagagctagtgctgttacatcgttggcaatgccacaacattttttcacatacatttatttcccaatgcgttgtccttaatgccatgtccttatgtagcagttcatgaacaagattggaaggatataagcactcaacgaccttcgtcgacagagctgaa

SEQ ID NO: 22272 - DNA, 438 bp, Zea Mays
cgaaaatagtggtatagaatcagatattcgaacgactcctgattgttgtaaatagatctttccaagatgttgtgagaacagtttgttgttagtttaggccaagtcatgtctgcagtatgccagtatccctaatatgtatttccagcttcctatctggaatgtgggctgagcagtctcattgtcatggtccttatggaaatctctttggagtggcgaagtagattaccgaattttccacatggtttattatgttctgaagctgccctacaactaaaacaacctgcttttacttagcagacgtgtgatcttcttaaatctaaggttggattgctcgagttccttcaaaagctcaatggtattcagaagtcagtaggtcagaatggtgcagttgaacctgacacatcatgggatataataacgtcagtggatttgtgggaa

SEQ ID NO: 22273 - DNA, 773 bp, Zea Mays
gaggatatcatggcatgcccatgtcttcgaatggttaggtttttgtgcatggaagatgacaatgaggtcactggagagtcacctgtggctgatgaatgggatatgttgtccctgacttcatcaatatatgctagcccattattccgaagaggatttgatccaattaatttgcctggatatgggaatgtgattaatattcaggaaggcacacaaactggattagtcatgtcagatggcttcgtgttccctccaagtgagcatgaaaatttgccaatagaaccagagcatgaggatttgccaatagaaccagggcatgatgaatcaaatacaaacagcgttgaaaaggaaagtagttgtgctggaaataacgatgatgactggtgtcatgtttcacctgaagaaatcgatgacgtaagtaatgaaaatctagctgacaacagtgacttgcctactgccagtgaagctacggtaccagattcccagcctacagaaataaatgctaagcgagagaaagatcataggacatgcaaggctgatcatacttgtgaaagatggtggaaaaagaaaaccacgtatctatttcatcatataaaaggagtgactacactctgctcagttgtggcagctggtgctgttgttggttttgttgtaatgggtcagaggtggcagcaggaccattggcaccttcatcaatttaagttcagtgtcagcggtgagctcatccgcgacggtcatccccggcggatatggggcggcgtttctctccatctgtg

SEQ ID NO: 22274 - DNA, 3294 bp, Zea Mays
gcagaaagtggaggcccccgcgtcgcccccgcttgggcggcgctaaccgtcgtctcctcctcttcctcccctctctacctcgccgccgtcggagctagccggcgggttgttcgcccggctcgtgaggaaggcggcggtggggcgtttcggcgtgtcgtggctcgcggcggcggtggcctgtgctcgcgcgcacgccaacggcggtggcattgctgtgctccaacgcgtggccgaccggtttggtaagcatggcggtggtggtgacgaacaacagggcgagagcggagctggcgtggctgcagtggcgggagcaggtgccccggagttagctgatggcttgctcgcggcggcggtgtggctcacgcgcctgctcttccgtcgagtagtggcatccccggcaatcgctcttgaggctggctcgcggcgccgctcgcgtgttcgctgcgtgcgcggcaacacacgcggggaggagtgggctatgtgggctttggtcggcggcggatctggcattgtcggcggatctaggccccatcggcctagatatggcccaccctcaactgatctacgccttggcgatggttgtcattgcggggtgcatgttggtgcgcaacggaggcggtgcgcccggcgacagctggtttcgatgtcgcgggtgccagggccagtggcggtagctcaagctggtttcagctctggcgagtgggcagtgtggcgcacaaggcaaggtgttccctggttccatgtgcccaaccggaagggatggcagccggcgcagctttgcggctgctgcggcagccggcacggtgcccctctggaggggtgtgtgcggaggcaagggcggtggcgacgacagaggctgcatgctttgacctagggtcctggactagcgatgagatggagggcatcttggacgaaagcttcggcgacagtgacgcctgtgtgcgccacttcactctgttgagggcgacgcattgctatgtcttccatgggcgaaagcccgatccatctggaatgtgacggtggcgtcctggatgtcactcccttcctaaaggcgtcacgtttgagtccgtcttggcctcgacgttgccttcggttgatgctttcgcttctcgacgtctggattgcgggtcgaggtgggattttttgaaacatgaagtcgaagctgccacattaggagatgtggctcgttaacgatgacatgaggcgaacctccttcttcgtggtttggattgttttggaggtcgagcaaaaaactggaggtgggtgttggatcaagatagttggtgaagaatcggagctgcctcgagtgtgggtgtgttgaggcttagcaacgatggcgtgtcacggtcttcctccttctgtgccaggttttaggtgtaggtgccttcgtgtttcttttgaccgtgtgcggcccgtctggtgaagttggagctgcccgtaccttgtgttgagctcggcaacggtgactctgtatgggctttgtgtgtggggttgccgctgcttatgttgtttgggcactctgtgaggttgttgttggtccagagaatagaactgttgtttctaaagacaactttctgagagtgaatctcattggtgattttggtggttataccagcatcccagcatttgaggacttctatcttgtgacccctaggaagagtgctggtagtggtgagccacaaaaccttggtgctgaatatagaaagtggatgctgttggagagagttcgttttacagacggtgtcgaatgtaacaagattggtgttggttatgaggctttccaaaaccaacctaacttttgtgcatcgccatttgagagctgtttgaacaatcagctatggacctttttggagtctgacaaaaaccggataagcatgagccgacagccccaatatgttgtgcagggaaggtttcagaggatcaatcaacatccagatgcaagtgttcattctttttctattggagtgacagaagttattaatagcaatttacggatagagctgagtgctgatgacatagaatacatgtatcagaggagtccagggaatataacagacattagtgttccagcatttgaagtcttaagtcaatatggtactgcaaaggtcacaactaagaatattggtacactggaggcttcgtataccttgacatttcactgctcaagtggcatcagttttatggaggagcagtactatatcctcaaaccgaatgaagagagtacccgtttattttacttgcacgcatctacagatcaagcagcaaagtatcaatgtacagctattctgaaggcgtcggattctagtgaactcgacagacaagaatgtgttttttctactacggctacagttcttgataatggaacacagattatcggttcaaatggctacaaattgggtttctttgacaccatcaaaggctatttggttagcttctgggattttctgattgatttaatcagtggcaaatcctgcaggctgaacaaatgtcggagcttttttgacttcagctgccatgcgcagtacagatgcataacctggctcgtcatgttggtgctgctactttttatgttacccgcaggcgcaattgtcctgtatcttcttcatcagaaaggcttcttcgacccagtatacgactggtgggatgacctgctgggggcggactaccgcgcgcaccggaggcacaagaaaggccgccgccaccaccatcaccaccacgaccaccatcaccaccggcaccaccaccaccacgggcactcgcacggccatgaccaccacccccacagtcaccaccacgcgcaccagaggagaaagatcgagcccagccaccaccacgtcctacacaggcagcagcccgggacagcggcagaaggccaccggcacaagcacgacccggcgctcggcgtgcagcacagggaggccgggcacttggggcacaagcgtcggcatggcaaagcggtggtcgcggaggacgccctggacctggagttcagggaacgaaggccatacgaggtcaggcatgccgggcacctgcaccgcgaccaccaccaccaccaccactcctgggaagtgtaggaatagttctgaccgtctgaactttaagacatctagcgtaagatgaagttggtgtaccgtgggcacgggacatgcccttttgcatgcatgcagtgagttagtgggtgtttaatttctagtaaactaatttgtatcgcttcattttatttcattttagtctttaatttgcttaatattgaaactaaaatttcatattcgacaaattagaaaataaaataaa

SEQ ID NO: 22275 - DNA, 2280 bp, Zea Mays
agaaatcacattgtcctgtactactaatagtaatcacattgtcctcgtcgtcgtcctatcttctcttgctcttctcctccggcctcctcggtccttgctcacccgaaccagcaaccctaatccgtggccgcggacccgccgcaagctccatcgcgcgaatagattggggattcagtcgaggctacgcgggaactggtcgcgctcgagatcttagcctccgcacctgaaaccattggctccattgctattgctgtcgtggttcaggtgatgaaatcttggggagcgcgcctcgctcggtcctaagatgctggcgagctacggaggtggtggccgcggtgtccatctctcctcccacaaggacatcctcctcggccgcggcggccggagcttcctcttgggcaacacgtggtttctcctctccacctacccggcgcgcctcctgcacaccacggaccgccgcgcgcccgccgctttcttggccgtgatcaaccggcccccctgcatgcggccgcaccgcgctgggcagggcctgctgcagaggggtggtattgtcatggctgcttgcggctatgctcttgggcgagctgagctgggtgctgccaagcgccagcagccggataaggatccatctgcagggacgcgctcctcgaatgttgcagccacgggatcactgggcagtgcagcacggccagacgtctcttttaggtacagaggggcggattcttgtaagaaggtagctgcaagcttgaagtcgtctgagccatgggggaacagggcattctggacaaacgccgctgggccaggttggaagttgagctttgctgttgagccatggaccaagggctttagcacgtcgtgtgcggcgccatattctgctggagccacagagcatcaattatcgctcgatgagaaggtggataactccaccgttgcatctgattctgatggtcaccagtttctgaaaaattgaagtttctctctggttcatgttacttgcctcaccctgataaggaggctactggtggtgaggatgcacatttcattagcattgatgagcatgtgattggtgtagcagatggtgttggtggttgggcagatgttggtatcgatgctggactatatgccaaggagctaatgagaaattcaatgagtgcaatcaaagatgagccagaagggaccatcgatccaaccagagttttggaaaaggcttatatgagcaccaaagcaaggggatcatccactgcatgtatcatcactcttaaagatcagggtatccatgctgtaaatcttggggacagtggtttcgtagtagtccgagacggtcgaactgttctcaggtcaccctcacagcagcatgatttcaacctcacttatcagcttgagagtggaggtggcagtgatcttcctagttctgcacaagtatttcacttcccggttgcccccggtgatgttattgttgctggcacggacggactttttgacaatctatacaacaatgagataagtggtgttatcgttgaagcgctcagggttggacttgaacctcaagttgcggcacaaaaaattgctgccctggctcgacaaagagccacagacaaaaataggcagtcaccatttgcatcggccgcccaagaagctgggtaccggtactacggtgggaagctcgacgacataacggttgtggtgtcgtatgtgaaaagcgcttgattcgagcctttctttttattagatgtaatgtcaaaatcttagtcccgaatttaatggcacatgtgttctcaaggtgtgaaatcccctgagatactagaagcactcctgctgggtttagccctggaatacgttagcaaaccattacaccattttacttgtttgccactgtgagtaatcttctttttatatataattctctaaaaccagggcggtcgtttcgcccttggagttggagggggaggataatgacctgctggaaccaaattttgttgtaaatattgtcgattgccgaatgataacatgttggactcaatggtggattgttgatgctgtttgaaatgtttctcttgaccccggagaacggcttctcaatatattgtcagtatgagttccatagaattgaaatgcaagagccaagaggggtgagactgatggctctatcgatctatttattagtatttattacggagcacaagaattttacgagcatgagaagagtgatggcctcgaaacaccatgagcctacgatgcagttgcagtccaaacgcctaggcgggcgagtttgatgctgcg

SEQ ID NO: 22276 - DNA, 2116 bp, Zea Mays
aaattgggttggtttctcctacacttccatgttcgacacgagcggcgagccaacttccctctcattcgtcttccacaaaccctataaccctagcaccgccgccaccatgtcctcgtctccatcttcagtgaaccgccgtcccccgggcccgctagcgttggggctggagtccttggcgaagaagaatacacataggaagaagctcaccgtcaaacctcatccagatccagtcgttgccctccaatggtcggatatggaacgtctcgtctcttcctttggattcagcagccggtgctcctcctctggatctggtggtcaactccatcacccgcagcttctatggcacctcccctagtccccctccatcgtcgccttcacccaccgcttctatatcgccacctctctcattgtagaagaagacactgaggatctgatgtgcatgcttgtccctcttgcactgcttgtctgttacctgcagcaatctttgccaaacggacacagggaacctatgcccccacaggattgcacaacacgtgggataggtaatgcaggtattgcccccgctggctgtggctggccggtgtgcaattcactaggctgccaaatgagccctaaaggccccagcatgggcgaccctctccagagtgattcttatcaatcttgcattggaaaaacacggagcctattattatcagggaagcatttgagccaaagtactatgtacatcaccatgcttttatgtgactatatatataaatataacaaataaagttttattggaccagttctttgaccatgccattggtatcaacgttccaaggtcccgcttcctaccagttaaggcgacatcagatttgaagctagtacagtctgatctatataccttggttgatggcttcgttacacgtaattcagccagaacaaatccatcaaatccctcaattgaacttggtcctgagttcaagaaggttgggagcttccttggtcgcttcaagtccatacctagcattgttgagcttgacatcttgaaggtttccggtgatgtttggttcggttctggaattgtactgaaggggaaagtgaccatcactgcaaaacctggcgtcaagctagaaatcctagacggagcagtgattgggaataaggttcacatgttaatgcatgcaactgaagtgcattaccaatgtcccaagagggtaagggtacagtctgatgtatctgaaaggattgctaatggaactagtgttcatgtaaatactcatgttcaaaatttgaatctggatattgaagagcaatcacacaaacactcgatttcacacatcgaggagccaaacactaataattcagaaggatccctggctggtgctgctgtctgggatgtatttcgcaggcaggatcttccaaagcttaatgaatatctagctgttcatcgggaagaatgtgcagctagatgtcaagcagtgtcttctgttaaatatcctatttatgatcaaacagtgtaccttaacgattatcataagaagatgttgaaggatcaatatgagggactgaagacaatcgagcagattacaatggactcagcttcggtcgagaccaatatgttcaagctctgcaaggtgaggtttgttcagtttggccaaaaaggcatcccctacctgaacacctacgatggtcgcgccatccgctacctcgacccgctcatcaaggccaacgacaccatcaaaatcgatctggagaccaacaagatcatggacttcatcaagtttgacgtcgacaacatggtcatggtgactggcgggaggaacaccgagcgtgtaggagtcatcaagaacagggagaagcacaagggcagcttttgctgcttggagctttttgctatgtctagttttctcctatttgttgtacaggaaaacttagaatagaattcaaatttggtggtcacaaaagtgtggagactttaattcatatataaagttaggcttaacattagtgcaaacagttgtattttagtttagatttagagtacacttatgtatgcgttgtttgacaatgcttatttatgatatattgaatggtacttatttatattatattaattataatgttgttcaatata

SEQ ID NO: 22277 - DNA, 2707 bp, Zea Mays
cgcgattctattctacgccgctataatcagtcgtgcggcgtcgtcggcgaccttgccgcctgcggcgcggaccacgcggttattatacagctaaccggggctttgagctacagccttctcttgtggggaggcatccccgtcctctacttcgtcgctgccctctgctgcgcctggactggcgtggagtggagatccatccacccgcacttgccacgatctcttccttctcgtgtcgagttggttgcggatttgcttactttggtgcgccgcccggcaatccaaacaatcctgcttgggttcgattcgcttcgccttcgtcttcagcgctcaagatcagtttagccgaggtgccgggcgcggtttggctgtccggaggcttttagagttactggaaccccgatgccccaagtgaagtccagctacgatggcgccggcggggactacattaagtggatgtgcggcgccggcggccgcccgggcggcgccatggccagcctccaccgcggggtgggctcccttgttcgtgacatcagcgacccctgcctcaatccctccccagttaagggaaacagaatgctgaaaccagaaagatggcacgcgtgttttgacagtgacgggaaggctatatgtttccgtaaagcccttaagttcattgtcttaggaggtgtggatccttctattcgagcggaagtttgggaatttcttattggctgctacaccttaagtactacagcggaatataggggaaaactaagagctgctcgaagggagaaatatcgttatttaattaagcaatgccagagcatgcatacaagcattggtacaggtgagcttgcatatgctgttggatcaaagctgatggatgtcaggaccttgcccaaagaaactgaaggtggagaagtcagcacaagtcagcaagctgaacatgaagtgccttgcagtttagcagaaaattcgaatttgatttatggttctggttgcacaacgcggccccataaaaggaaaatttgtagtaaatcagctgaaacagttggtttcaatcaacataatgataactctagaggttctggagattgtgatgtcattggtgaaccaaggtatgacagtgatgccttcatcgattttccttccctaactggtacaaacttggtcgcaaatggtgacggggatagcaatggagttgaagaaaatccttgcaatttcttggtctctgaacatagagtaaggccccatgatgaacacatgcacagcttccagatcaataataacatagatctcataatagagtcaaatacattctccaatgatatatttcgacctagcagtagtgactcagccatctttcactcagatgcgtacaagcatgatagatggttagacgatactggctatagtgaagaaattatagattccttgaggatatctgatgcaccagaatcagatttagttgatggaatgaaatcaaatggttcaatagctgacaaagatagagtctctgaatggctttggacactgcatcgaattgtggttgatgtggtgagaacagatagccaccttgatttctatggagaatcaaggaatatggctagaatgtctgatatacttgctgtttatgcatgggttgatccttccactggatactgtcaaggtatgagtgatctgctgtcaccttttgttgtcatatatgaggatgatgcagatgccttttggtgctttgagatgctactgagaaggatgcgtgaaaatttccagatggagggaccaacaggagttatgaagcaattgcaagcattgtggaagataatggaactgacagatgctgaattatttgaacatttttcggcaattggtgctgaaagccttcattttgcttttcggatgctgctagtcctttttcgtcgagagctgtcctttgaggaatcacttatcatgtgggagatgatgtgggctgctgattttgatgaagaagcagtcaggcatttagaagagaactgcctagaaccattgctagtagatctgagcaatggcttatcatctgaagtcaaagaagtgcatcggatcaacagttccacaagaagaaaacccagaaccaggaaatgccatagtagaaatggtgaaatctgtggagcttgccaccctggaatgaaatctagtacaagaaatcatctctgtggcttgtccggtgctacaatatgggcaagacctcagcagatgccacatccaagtgcaagtgtgctagcaaagggtggagattatgaacttcctatattctgtgtggcggctatcttgataattaaccgccagaagataataagagggactcactcaatagatgatgcgatcaagatgttcaatgataatgtgctcaaaataaatgtaaaaagatgtgtacgcttggcaatcaagctaaggaagaagtacttgtacaagtcattgaaaggtggctctagtgatgataaagaaagctgaagaacctgcacttcccttgtagaaaaaactagatatttctccatcatgcattgctatctaggtgtgctggatcagtattgacctgaagtatggtacatgtccaagatccggcattattcaggattgcaaggcaatctgtacatattatacttgaaaacaacagatgaagctgtggaattaaagaaaagaaatcaagtccactgaatggttgtatttctggtggtgtcattgttttttt

SEQ ID NO: 22278 - DNA, 410 bp, Zea Mays
cccgcgtgcaccgactgcttttctcccgcgtgcgctggctgcttttggccaccgatacgctgcgtcggcgctccaaagttccaggtcaggagaggctagagttccaaatcgtagttcgtgtgaaccagtgtgaaccagttgaatctcatcaatcttatcaagtcatctaataaaaaaaggttcgacgcgtcttagagttctacgatgcatccaagaattcagaggatgaagcacacccaggttaacaaagccattccagattctacatgttccaagaatgacaacagttagaccatcctgaaatacatcaaggttgggcggcttccgaagtcattcagacctgcgtccgagcctacatcatcatttggtttgaatcgcggaacgatgtcgttcgtcactgcgttgttcta

SEQ ID NO: 22279 - DNA, 595 bp, Zea Mays
gtaaccatccttttcccagaccaaaacagaagaaaggaaagtgctactgggcattggctactggcctactgccaactacccgtggggtcccgtggaagagaagagagcatcgccggagttggggtcggcgcgccgacgaggaacaaaagaagacggcggtggggcggagatggggagtcctctgggcgggtggccgtcttacaacccgcacaacttcagccagctcgtcccggccgacccatccgcacagccctcgaatgtcacaccagccacttatgttgcgacccacaggactgatccgccacccaatcaagtgataacaacggagtcgaggaacatcctgctgaggcacttctaccagaaatccgagaagctgaggcccaagagacctgccccggacaacctcgctccggagaacaacaacagcaacaacaagcagcccaggggaccggtcggcgacgtcggtgggcagtcgtcgagcgcgagaagctgaagccacagctggtggccgtccactcctccccctgcctgcttgtttctcatctctgggtttcgtcatgcagaggcagaggcagatgcagccctgtgttgtctg

SEQ ID NO: 22280 - DNA, 85 bp, Zea Mays
cttcaattattttctttatagtttctatagtgcaacactgaataatctgcttttgtatctttgggctagtcaaagtgcaattacc

SEQ ID NO: 22281 - DNA, 987 bp, Zea Mays
caatcgtccaatcccaagcacaagcagcagcacaaaacagataaggcggatggacacacggcagcctagaaggaaacaggaacagacagctctgaaagactgaaactcacggccatggccatcctgggtgccctcaggctcgcgccgtctccacccgccctcgccggcgccgcgccaccggcgacgtcgccgtatacggctgtacgctcctccgtgcacttccgcctcgccaatgccggcgccgccgcgctcgtcgccgcctcgctcctcgccgccgaccccgccgtggctttcattggaggaggaccgtacgggaagcaggtgacgcgggggcaggacctcaccggcaaggacttcagcggccagacactcatcaagcaggacttcaagacgtctatactgaggcaggcgaacttcaaaggcgcgaacctgctcggcgcgagcttcttcgatgcagacctcacaagcgctgatctctctgacgctgatcttagaggcgctgatttgtcgctggcgaatttaacgaaggcaaacttatcaaatgccaacttagaaggggcacttgccactgggaacacttctttcaaagattttaccgatgtgccgctgcgagatgatcaacgggagtacctctgcaaaatcgctgacggagtaaattcaaccactggaaacccaacaaaggagactctgttctgcagctgatcgacggaaggacctgggacttgtgacttattcaacgtcttgataaacttgcatctgctgctgtaagcacgtgaggaatgtaaattgagttatagagggttcctagaaataataactggtaattacgtgtaaatcaaccaacaatataagtgtgtgctgccctttgaatgtgcaaacgattttttattacaactcaaatagttgtggttcttcaagcactagagacgcttaaagatacaatttgataaaagcaagttaataatatagtcgacggctgaatgcaac

SEQ ID NO: 22282 - DNA, 2127 bp, Zea Mays
ctgaaaataagctgtgccaaacagtgccaaaatgaaaaccaaagcagcagcagacgtctgccctcctccctcgcctcccctgccctccattaaagacaaggacaaggccatcctcttcctccttgcatccccatccccatcttccaccctcccttgctcactcaccagtcacccacacgcacactcctgcagtttgaaatccctattgtattgtttgaggtaaaaagccaagcattgccccaacagcaacatgtaacaagccaagcttcaccatcgccatcagctacccaagtgggagtgcagattgagtggcctgtgactacagtactggcatcacttcgcttccactcctgtccagcccgcccgcccgccatgcagtccggctacggcggcgtgtctgagttccagcagttcatcatggacggcggcttcgccatgtccgcgcctccgcagcagcagcagccgcccgccaccgcccaggagatgggtgggcccttcaggcggcctctggacatcgactacttgcagagctcaagcagcagcaagaggacggggaaggagaaggtggccacgccggctgcccccgccaattacttcaagaaaggcgacgctgcggccgcgggcggcggcaactacaagctgttcagcgagctggaggccatctacaagccggggagcggtggcgcccagacgggctccggctcctgcctcaccggggacgacaatgccatcctcgagccggccgtggccgacctcccggccgtgggcccgcagcagctcaacacgtcggagacgtcggccggggaggaggcggccgcggtggtgcagccgcagcaacagccccaggcgtcggcggacgcggcgcggcgcaagcggaagcggcggcggcaggagcagctgagcgcgtcggcgtccttcttcgagcggctggtgcagcggctgatggagcaccaggagagcctccaccgtgggttcctggaggccatggagcggcgcgagcgggagcgcgccgcgcgcgacgaggcgtggcggcggcaggaggccgacaagttcgcccgcgaggccggcgcgcgcgcgcaggaccgcgccagcgccgcggcgcgggaggccgcaatcatcgcctacctggagaagatctcgggcgagtccatcacgctgccggccccgcccgccgccgcggcgtccggcgacgacgccacggcggccggcaaggagctggtgccgtacgacggcggggacgcgacagcggccgagggtggcggcgggtcgctgcacctcagcagcacgtcgcggtggcccaagcacgaggtggaggcgctgatccgggtgcggacgggacttgaggggcggttccaggagctcgggctcaagggcccgctgtgggaggaggtgagcgcgcgcatggcggcggcgggctacggccgcaacgccaagcgatgcaaggaaaagtgggagaacatcaacaagtacttccgcaaggccaaggagagcggcaagaagcggccggcgcacgccaagacgtgcccctacttcgacgagctggaccggctctactcccggtcggccgacggcgggggaggcgaggccaggcagctggggagctcagagctgctggacgcggtgatcaagtaccccgacgtgcgctacgggccgccggtgttcggtggcggcaatgctaataatgaaggtggagaggacgacgacagcgacggggaggaggaggaggaggaggaggaggacggcattggcaaggggagggccggggatgatcaggacgacgaggtggacaacgatgatgagtagctagctaacagtacccccacccctcgctcgcatgcatgtttgttgaacaaatttgcttagcaatctgtttaattttctttcttgcttgttactaaatcactgctagctagtagtggtaggtgttatcgctagtgcatttcaacacttgttattattttagctagcactccactgcttctgcttctagctctgctgttattattatgttgtatactatcataagatactgctaatctaatgaacaaattaagtaagtaatggtatgatatatgtagaatgaatattccgttgcattgcatatgtggagcagtgagtcgttccaat

SEQ ID NO: 22283 - DNA, 1114 bp, Zea Mays
acatttcctcggtccagcaggagccagcgtatacctgagagacggaaggcgcctgtgtcgtgcgctgccggagacgggatcactccgcagcgacttcaccagctgcggcagagcccccagggccttctgcccccaagccgccgccatcgcctccctcccgcttcgcccgtcggtcggctcctcggcaggggcggtcgttctagaggggtcgggaaattttgcataacggaaattcgaacgggtcccacttgacgattggaaattcggccctgcggttggttgggcctttggttatttgtttacacacattttcaactctgtactgggcgtaggccgtaggccgtagggcgagctcccaggtcgacgtggcggggatggctgcgacggccggcggtggcggtggtggaggggctaaggcggcagtgaccgagcagatagcacaagcagtgcggtccacctccaacctcctccagctgatggagcagtcctcccccgctcaggttcatttggcaaaactaccgaagaacctgctggaaaaagcatcctttgcaaagaacacagagcatgtgctgcaccagctacctcaagtaatatcatccttggatgcttatatggacaggagtttgcaaagtgcctctcaaattaagactgttacacagctcttgtcaaacatggagaacactcagctgaggtacatgttgccttcctctcaaaagaagaaagatcaaaagagtactgaaccttaagaattcagagtcgactgatgtgttcaccgagacataatggaaggatatgttcttgccgttttgtgctaaagaaatttgagttttgtggctctcaagagatggcttggctttatctggtgtaaggatccatcgttgtctactgtctgtcccacatttgctgagttcggttgggggacgctgttaatggaaatattcttctttcttcaaaccatttacgggtgcctaggacctgtatcataaggcaagcatgcctgttagttgtcacacattctggtctatgaacacgttgctttcttgtaattgcattggttgttttagcagtaaattatggtagaaattatgaagtgatcaaagtgtttaacgtggca

SEQ ID NO: 22284 - DNA, 195 bp, Zea Mays
ttcctttgtatagtgtaatgttcttatgcatatatgtttgtttgtttgttcctgtttgtcttcgcttcgcgttgcgattagatcacgatttgtttccgcgctccgaggaatcgacgatcaagcgtcggtgaccaaatgatcaagctctctgagttttatgaggttgaagatcctgagcatctgtttggtgaaggc

SEQ ID NO: 22285 - DNA, 562 bp, Zea Mays
tttaccttatacaagttttggctttaaacccctttcccctcgcttgccgctgctccgccgtcgccgcgccccgaccagcatcggcgaatacctcccgcgcactcaaccgatggttgtagttgaatgtaatcgattggtgttccctggcaccatctttgtctgagttccgattctggaattgcgggattggttggtcgggtccggtgagcacgctcggggcggcgccggccgatggcggagctggtggggccgcgcgtctacagttgctgcaactgccggaacaacgtctgcctccacgacgacatcctctcaaaggcttttcaggtccaaactccgtgaatcacctttcctccacttccggacgtgtcgtttgttcactagcgcttatcaattcagcaattacctgttgtgcttatctatatcctagctaggagttgctccgagaatcgacttcttgtgtaggtgcgatgctggatgcacgtttgttaattctggaggacccggttgcattgtactacttctgattccactataagaaactgattgaagcgtatttcttttt

SEQ ID NO: 22286 - DNA, 591 bp, Zea Mays
taacgtgttgcatcgctggcctagaatcgtctggatccagcgtgccacgcgctcacgccagttcatgcacatccacacttacagagttacagttacagccaaccaaccacatcgcatatcaaagaccagaaagctcaaaccaagaccggcgtgcgcggacgaagcacagatccatcggagtgacagcgagcgagagcgagagagacagagagattgtccgcgcgtcagcgactcccggcgaagacgatggggaaggggttcgcatcctacctggcgatgaagacggggccggagggcggcgacgcggcggcggcgcagcaggctctgatcgacgcggacctgcgggagctcggcgtcgccgcgcggaagctcgccaaccacgcattcgtcctcggcggcgggctggggttcggcacctccttcctcaaatggctggccttcctcgccgcagtgtatctcttgatattggatcgcacaaattggaagaccaacatgctgacagctctcttggttccttacattttcttcaccctgcctaatgtgctgttttctctgatcaggacttgcatgttggttacttgttgatgtgaa

SEQ ID NO: 22287 - DNA, 3863 bp, Zea Mays
atagcacgaaatggttttgccttcgcttttgcttatgcgtacgcgcggcgaatcacggcgcccaccttccaaccggacttgagtcacttgactccgccgcgggattccccgccagatctcattctcgccccaaccctaaccgccgacggtggccatgatggccaccgagcccttgtccccggggaatctcgtcgaggacgtcgaaacactacccctggactcctcctccactctcgcggctacgacggacccgctgctccgcccacctcccccctcgtccaccttctctcccaccgccggtgagaaccatggcgcgtttctggacgaggaggatgaggacgtggtggatgacttcacgcctccgctggctccccatgccgctacggccgcgacgaagtcccgcgaggcgtcaccgtggttcgctgagatcactgtctccgagcctaggaagcacgcggagcccgcgaccggagccgtgggcgtcattcccggctcggccagctacgtctcctacctcatcgccactcaggtgcccgacggaggcgagttccgcgtgcgtcggcgattccgtgacgtcgtggcgctcgccgaccgcctcgcggagacccaccgcggcctctttgtaccggcgcggcccgacaagagcatcgtcgagggccaggtcatgcagcggcacgacttcgtgaaccagcggtgcgtcaccctccagcgctacctccgccgcctcgccgcgcaccccgtcgtcggccgcaaccccattctccacgccttcctcaccgagcccagcggcatccccacttccgacggtgagtctcccaggtggagccctgcgatgagtgctgctacgtccatggctgcttccgctccagtgacgcctaccaagagtgggagagacttttttggggtgttcaagggcctgaagcagacagtgacgaatgggtgggtggcggtaaggccgcctctagtggaggaggagattgacacaaagtaccttgtgcacaaggccaagcttgaggacttggagaaacatctggtgacagcatctcagcaggcagaggcatttgttaaagcttttgacgatctaagatcaacgacaggtctcttgggaatgtcattcatcaaactggctatgtttgaaaaggagcaggctgcgtgtagttctcagaaaagacgagctgctgacatcagtaattttgccagtgctgttattagagttagcagatcacagacaaaactaaacactgaaattgtaaaacatctgggtattatccatgagtacatggagacaatggcttctgttcataatgcttttactgatcgttccaatgctttgcttcgtgtgcaaaatttgtcagcagatctatatttcttgcatacccgggcaggaaaacttgaatctgtatcagcgagaggaatggatcaggagagatcaaggtatcaaaagatagaagaattgaaagaaacagtaagagccacggaagatgcaaaaacacgtgcacttaaagaattggaacttatcaaggaaaataacatgaatgaaattaaaagatttaacaaggaaaggcgccaggatttggtggagatgctaaaaggctttgtattggatcaggccacatactcggatcattttgctaccatatggacaaaggtagcagaagaaacaaaaggatatgcaaacagcagcagttgaagtaggatgtacatattcagaattgatggcaataccttaaggctttatacatctcactgggcaccagagcgatggcaggagtatgaaccacttctgaattactgccgtgataatggaataaagcttgttgcatgtgggactccacttgaggtggtaagaactgtgcaagcagaaggaattagaagcctttcaaaagctcaaagaaagctttatgctcctccagctggctcaggcttcgtttctggctttacatccatctcaggtcgatcattgatagacaaaatttcatcaactcgtggttccccttttggcccaagctcatatttatcagcacaggcaagagtagtcgatgattataccatgtcccagacaataatgaaagaaattagtaatggagatccttcaggaatgctcgttgttgtaactggtgcgagtcatgtaatgtatgggccacgaggaattggcgttcctgctaggatatctaaaaagatgcaaaagaaaaatcaagttgtgatacttcttgatcctgagaggcaaagtataaggagagaaggtgaaatccctgtagctgatttcttatggtactctgctgccaagccatgcagtcggaattgctttgatcgtgctgaaattgctagagttatgaatgctgctggcaggaggcgtgaagctttacctcaggatcttcagaaaggaatagatcttggtgtagtttctcctgagatattgcagaacttctttgacctcgagaaataccctgtcatggctgaactgattcaccgtttccaaggttttcgtgaaaggttgctagcagaccccaagtttctgaatagattagctattgaagaggccatatcaataactaccactcttctagcacaatatgaaaaacgaaaaggacgtttttttgaagagatcgactatgttctcactgatacaattaggggttctgttgttgacttctttacagtgtggcttcctgcacctacaatttcactcttatcttttgccgacgatggctctggtgagagtgtggagcttctgaaaggaattttaggatcactgccagataatgcatttcaaaagggtattgttgggcagaactggaacattaaccagaggtttgcatcggtgcttatgggtggtctaaaacttgctggagttggattcatttctagtattggagctggagttgcttcagatgtcttatatggtgcccgtcggattcttaaaccttctgcaaatatggaagtggggcgcaaaagatctccgatctggaaatcagcagctgtttatagttgcttccttggaacatcagcaaacctgcgatatcaggtcatagctggtctgattgagcatcggctaggagagaatctgatggcctactatgaccagccacttattgctaacctgttgtcctttgtttcaaggacagttaactcatactggggaacacagcaatggatcgatcttgcacgagttacaggcgtgcaaagaactaacaaagagctgccttctcctgaggtttcgagcgcatctgaaatgccactgctagaatgtggcacggcagaggtacagaatgcggacgacagcagtaaccagtcaaatgacttgacataagttatcgcgcagtggccatacaaaacacagagcagcttccttccatggcacaccgtatactagacaaaccgtacatgcatataaatgggactgtcttcttagagccaggctgtgaagcttagccatcgcgtcatgtggagagacgaatctgaaatcctgaagagtaaagcttttgaagactttcgacttgttatgatcacagccatttttacacaccatcatggggtgaataccgtttgtacattcatagaggagacggccgaagaattctttggagcacgtacagcattttacacgtgaaatttgttcagaaaacattactggagattgtcacatggcaaaaaggatcaggatcgttgcttgtgaattgtgatgcaccttgtatgcaatgcacttgaatccagagtgcacgtgtgattttattgtctgaacgaaccgtgcgacggcctgatgtttcctgtggtattgctgtggtgtgatcaaactagtccctatgtttccagtattccacgtttgcctttccaacgctggtgagtcagtgagtggtgaacca

SEQ ID NO: 22288 - DNA, 915 bp, Zea Mays
aagagaggtaactgaacgaagcatccggtgtgtgccctcgtcatccgccgccgccgccatgccgggcttcgctcagcgtctcgcgggcatcccgtggcggagcatcgcgaggcaaggcctctcccgcgtgttcctggtggcgaaggcctactgcgtgatccacgtcgtcaacgaccacctctgctcggtgaccttagtgcggggcgccagcatgctgccgtccctgaacctggcgggcgacgcggtggcggtggacagggtcagcgtgaggctcggccgggtcgcgccgggggacatcgtgctgatgatctcccccgaggacccgcgcaagtcggtcgtcaagcgcgtcgtcgggatgcaaggggactccgtcacctaccttgtcgaccccggcaaaagcgactcctcctccagaaccgtcgtggtaccgcaagatcatgtctgggtgcagggtgacaatatctttgcttctaacgattcgaggcaatttggagctgtgccttatgggctgattacagggaagatcttttgccgggtttggccgccggagagtttcggcgcaattgatgacgcaaccaagcagtcttaacgctgaggaggagccgaggagagcacatggacccatattgtttgctcgcgcccagagattctataatagccaactgcagggggggcccttccttgagctcgagagctttcgacgacctaccgcagcgcatttctacagcgaagcaaagagcgtgtcccgtgtttttatagttttggtgtgtgacaagttctgaaacccaaatcggcacaggtttcgagacagtttttttttttttggtgctagtgccaacctgggtttgggtttgcaactacactacaacttcacatgcttattccaaacatttgaactgatttgtcaaaaaaaag

SEQ ID NO: 22289 - DNA, 1669 bp, Zea Mays
acggaattgaagatcggatctctaaacaaccacagctccggaaaaaacatcgtgtggacctagagagactaacaattacatcgcgaccattcaagacattgtcattctttgtgttagccattgctcagaatttggaaagaacatgttcatctgttctgaaaaaaggttaccagttaaaaaccgcaatgcttttggttgttgctacttggcttctgctcatgttcactgatggcctgaatgaaaagcatctgcaggagctattttggtatgtcaggtttggattgtggtggattatactaggggttgcttcatccattggattaggttctggtttgcacactttcataatgtatttggctccccatgttgccctgttcactatcaaagcggttcagtgtggtagggttgatttgaaaagtgctccttatgacactattctccttgaaaggagaccatcctggttagagaaagactgtctgcaatttggacccccaatttatcatgaaacaattccattcagcaaaatactgcaagaagtttatcttgaagctattctttggggcattggaactgcacttggagagcttcctccatattttctctcaagaacagctagcatgtcaggccgcataattgatgaattagaagatttggatgcttccatttcagaaggctttctatcatcagctttacgtcaggccaaacgatggctcatgtctcattcacagtatttaagcttcactctaatattgctacttgcttcggtgccaaaccctctatttgatcttgccggtatcttgtgtggacaatttaacatccctttctggaagttttttctagcaactttgattggaaaggctattgttaaagtttgtatccagactacattggtgattactctctgcaataaccaacttcttgatttggtggagaaaaggcttatatgggcatttagcaatgttcctggagtggcatctgtccttccatcttttgtttccaaactgaagatggacaaaaataagtttttatcagcccatgttgctgcatcagcttctacttctgttaagggaaagaagtggaatctgtcattctctttggtctggaataccctggtgtggctcatggttgcaaacttcattatccagatagttacttctacagcacagggttatctcaggacacaacaggagcgagagatcagtaaaaagttggaaaccgagctttctgcctcttaacgttcttctgcgcaccaaaatgattcgccctgggtaccgatctggtttcttcaatcttttacatacttatatcgagtttagagaggaatattaacatgaataatgtggtaactgactgggaaattcaaaccgtgttcaccaactatttgccgctactgttcttcaggaaagtccaatacattgtacataaccatgcatcaaccatcagctcaagactaaaggctctcctgcagtattgtggtgcactgactattggtctatttctttcgaaagagagagagaggaaagctattagctagtgctagaaatataatggtgccccacttacaattgtaagtttgtggccttgtacatagcaacaaatattattaggggacaaaaatatctaatgatacaagttaatacctgattttgtctccgcattggcaatgatc

SEQ ID NO: 22290 - DNA, 1297 bp, Zea Mays
ccagcccccacccggccgtccacctaatcccgagtctcgagcgagtagcgacggccgcgcctgcgcctgcctgcgtcttccgtggcggcgcccctacctctcgaacccgtcaggcggtctggccgacctcgcttcctcggctagctacctactcgccagcgtctattgtccagcaggcgcccagctcccaagcggccgcagtgcccctgcttctgcccttgcacgttcggcccctgtgctgcactgcacagtaaggtttgttttcttccattcagtttgttgtactgtggagatcaaactagctaagggcagagccaaatttggggattcttcaactgaagccttgtatagatatagtttgaaagatgatgaacgaacacagagaggaggatgccttgagaggtcaagcagtcaaaaaccagaaggcgatatgggacaagaccatggaaatgagattcttgctgcagaaggcgttttctacttccaacaagttaccccaggaatccatcagaacaaggttttgcaatcatgataagcagatagagcaagcatatgatgatcttttgaattcgacgaaacatactttgagcagcatgatggagctgcaggaggctttgcttgagagtaatcaggctacaaaggatgccaatgaaattccttctgcctcaaatggagacaatgacgagtggtcagaagtacagagattgcaggcaaggataacaacattcagaaataccgagatagataaatggcacaggaaaatacaggtgacaacgggtgctgctgcacttaaaggaaagctacatgcatttaatcagaacattagtgatcaagttgctggttacatgagagatccaagccggatgattaacaggatgtacttgaccaactctgctgttagagtatttggaaaggatgtgggagaacctggaacagctgaggaggggcacattatggaaggtgatcctgaacttattgatgattctgagttttatcaacaacttctcaaggagttccttgagtcatgtgatagaggggcatcaaagtcggcattttactctctaaaaaagcagcaggttaaaaagagaaagcttgtcgatcgtcgtgcttcgaagagcaggaagatacggtaccatgtccacgagaagatcactaatttcatggcaccggagcccatggttcttcctccaatggctccgaagttgtttgagaatttatttgggaatagcagctagaatccataaactgcacggatgcagctcatgggagcttcctgagcttgacctgcgcgccgtgc

SEQ ID NO: 22291 - DNA, 889 bp, Zea Mays
cgctgctgttttttcccccttccctgtggcgttctcgcctcaaaccacaaggcgcctttggcaacagatcggactcagtttttttttcacacacacaaaaagaaaagtaaacacaagtcagtttcacaaagagcaatccgtcgacaccgctcaagagccaaacgcacgtcgctaacacgtcattagcgtctcagagatgacgatactcaaatcctctgcgtagaggacggaccgacggacacgcattaaataccaccgcgaggagtaggtgggaacagatcacggagtacagcagccgttggagttgggagctgacatcggcagagaagagttctctggttcacagcgtcaaattctgtgtgcaatcccacatgtttccccctcagaaccacccccgttccggcaccgcaaaatccccagatgacccgtgcggcgacaaaactaacgtcagcgtgtagagtccagttatgtgtaaaggacgcctcagcatagcacctacagttatgtgtaacactcatcgtgtcggcaggaaccaacgttcgttgctaggtcctgataataaaacatactagaaaaaaaccacttgctagcatgaaaccaatcaaaacggcaagggaaatggggcccaaaacggcagcgagcaatagagaaagagggagatagaaaggtcaaaagatacggttggcttcaacaaagcttcagcacgagcatcaggctacttgcagccaggatgcttgtgcaaagaaaagctggggaagattagcgggggcgacagcaaatcgggaatgtgattcctttgttctcatcatctgatgggctaaacagcttcaacagcaattcatgaaccttcgagtccgaatcattcgtaacagggggtagtaaaagaaaa

SEQ ID NO: 22292 - DNA, 3870 bp, Zea Mays
tcgcatctctcgccacttcgcaattcgccagtcgccaccggcaccaccacacccaccctcgcggccgcgaacaaacgacccactgaccactggcgggctgcacggcagccatgtctgcgccgaagctggaccgcaacccgagcatccgcgaccgcgtcgaggacaccctccacgcgcaccgcaacgagctcgtcgccctcctgtccaagtacgtgaacaaggggaagggcatcctgcagccgcaccacatcctcgacgcgctcgacgaggtccagggctccgggggccgcgcgctagccgagggacccttcctcgacgtcctccgctccgcgcaggaggcgatcgtgctgccgccgttcgtggccatcgcggtgcgcccgcgcccgggagtttgggagtacgtccgcgtcaacgttcacgagctcagcgtcgagcagctcacagtctcggagtacctccgcttcaaggaggagcttgtcgacggccagcacaatgatccctacgttctcgagcttgacttcgagccgttcaatgtctcagtcccacgcccaaatcggtcatcatctattggaaacggtgtgcagttcctcaaccgacacttgtcctcaatcatgttccgcaacagggattgcttggagcccctgctggatttcctccgtggccaccggcacaaggggcatgttatgatgcttaatgatagaatacaaagcttggggaggcttcagtctgtgctgaccaaagctgaggagcacttgtcaaagctccctgctgacacaccatactcacaatttgcttataaatttcaagagtggggcctggagaaaggttggggtgatacagcagggcatgttttggaaatgatccatctccttctagatattattcaagcgccagacccatctacactagagaaattcttggggaggatccccatgatttttaacgttgttgtggtatcccctcatggatactttggtcaagctaatgtattaggcttgccagacacaggaggacagatcgtctatatactggaccaagtccgtgcactagaaaatgagatggttctccgtttaaagaaacaagggcttgatgtttccccaaagattctcattgttactcggctgataccagatgcaaaaggaacatcatgcaatcagcggcttgagagaattagtggaacacagcatacttacatattacgagttcccttcagaaatgaaaatgggatacttaagaaatggatatcaagatttgatgtgtggccatatctggaaacatttgctgaggatgctgctggtgaaattgctgctgaattacaaggtactccagacttcataattggaaactacagtgatggaaatcttgtggcatcgttgctatcttacaagatgggaattacccagtgcaacattgctcatgctctggaaaagactaagtatccagattcagacatattttggaagaatttcgatgagaagtaccatttctcctgtcagttcacggctgatataattgctatgaacaatgctgattttatcatcaccagcacataccaagaaatcgctggaagcaaaaatactgttggacagtatgagagtcatactgcctttactctgcctggtctgtaccgagttgtccatgggatcgatgtcttcgatccaaagttcaatatagtctctcctggagctgacatgtccatatactttccacataccgagaaggccaagcgactcacctctcttcatggttcaatcgaaaatttgatttatgacccggagcaaaacgatgaacacattgggcatctggatgaccggtcaaagcccatcctcttctccatggcaagactcgacagggtgaagaacataacggggctggtcgaagcttttgctaagtgcgctaagctgagggagctggtaaaccttgtcgtcgttgccgggtacaatgatgtcaacaagtccaaggacagggaagagatcgcggagatagagaagatgcatgaactcatcaagacccacaacttgttcgggcagttccgctggatctctgcccagacaaacagggcccgtaacggcgagctctatcgctacatcgctgatacccatggtgctttcgtacagccggccttctatgaagcgttcggtctcaccgtcgttgaggccatgacctgtggacttcctactttcgcgacgctccatggagggccagctgagatcatagagcatggcgtctcgggcttccacattgacccgtaccaccccgagcaggctgctaatctgatggccgacttcttcgagcggtgcaagcaagacccagatcactgggtgaaaatatctggagcagggctgcagcgcatatacgagaagtacacatggaagatatactcagagaggttgatgacactggccggggtctacggtttctggaagtacgtgtcgaagctcgagaggctggagacgaggcgctaccttgagatgttctacatactgaagttccgcgagctggcgaagaccgtgccgcttgcaattgaccaaccgcagtagcttgcgcaactgcgactgcgtagcacttggtacaagactgaaacctgaaggaccttcagtaatttaggcgcggcagacggtagccaataaaatgtgccggagctgaactggtttttattatgtacataatggcagtataacaaaattactgaaggcaggtgggttgcagttgtgtgttcgttactgtttactgtaatatgtcaagctgtcggctgcaatttctttgctggcaagccgcaggcactggtgaagtgctgataaatacatcatattctgttgacctgtgaagaaacttgttcaaggtagattccattgtactagctctgttgctcagcatctccttgtttgggaacattaacaaccagctctcacccctcaataaaatagtcgcatcatgtagctacagttttcatctcaaatccatgtggatcggataagtcaaaatccttaaatttttttttctaatagcatccaatctatatgccataggatcggaataaccctgaaccacatgtctgagacatgggagtgtcaaccgtgccaaacgattcaagaaagaagaacgcgactacaagctcattaaccggctttaaatgtgaatatgtcatacccccttaaccgaaattaatctacaattcgcaacgcaacgcgccgcgtcgttgccagtgtgccacacgggggggaaagaatggtgctaggcactgtcacacgctgatgtcgtaccgtggaacactctgcggtgcggcggcgcggcagagcgggcacgtcgtgctcactcggaaccacgcctggatgcactccgcgtggaacccgtgaccgcagcccagcacgagccgcgtagcggcctcgccgtccccgggctccgcaaggcacaccgcgcactcgaccttgccgtccgcgccgctgcgtgccgtggccacgggcaccgacaccgagagcgagagcggcgatgccgtcgttgcgcgaggcggtccgtaggccgccgccgcgtcccgaggcgggcaagacagcggccgagcggacgaggtggctccgccggtggcgttgcttctggttccgtgcttcctgcactgccagatgaagcgccacacgaggtagagcagcacgacgaggacgctgagggccgccagcgctgacgaggcgcggctggagacccgcccgtgcggcgccggcgcaatgccaccgctatcggtgtccatcgtcgacgagtatcgggctatcggcctaggctctggccacccccgttagctgacaaaactagccggtacgcaccagctcgcatagccggtatagtacgcactactacgcagtctatgcagaggggaagttc

SEQ ID NO: 22293 - DNA, 2110 bp, Zea Mays
gtcgggaaggagcccaagccttccgcttcctcaccccgctagtcccataccctagccagggggggatcgcacctcttccgacgatgtcgacccacgccgcctcccgccgctcctcctcctcgtccgcggtcgccaagcgccccgcgatagcggagggagctaccaaggcggcgggaccgggccccaccgccgcgcaggcgaagaagcgcaccgcgctcgtcaacatcaccaacgtcgccgctccgggggcgagggtcgccgccgttgggaaggtcgcgccaccggtcaccggcgcgaagttgaatccagctacctcaggtgcacccttaaagaagccatctttggcaaatgctcgcaccatccggggttctgctgcgaagtcggcttccatcaagccagctccaccagtatcacgccatgacagcagctcagagcagaagcataatgttcttgtgcctaccactgtccatgtgccaagtcgtgctcctgccttggtaccctacagcagtttcgtgtctcctggacgttcaagagattcagtttctactgatgagacgatgtcgacttgtgactccatgaaaagcccggacttcgagtacatagacaatgggggttgctcgatgctggcttcgttgcagcgacgggcggatgaacatctgcgtacatcagaggacagagacgttgaagaaaataagtggaagaaaaatggccctgccccaatggaaatcgacagcatctgtgaagttgacagtaacctcgaggatccacagttgtgcgccgctctggcttctgacatctacatgcatctgcgagaagctgagatgaagaaaagaccatcgactgatttcatgaagacgattcaaaaggatgtcaaccctagcatgagggcaattttgatagactggctcgtggaagttgctgaagaatatcgtcttgctcctgataccttgtacctgacagtcaactacatcgaccgttatctttctggcaacgagatcaatcgccaaaggctgcaattacttggtgttgcttgcatgcttatagcggcaaaatacgaggagatatgtgcaccccaggttgaagaattctgctacataacagacaatacatacttcagagacgagaaatggaagcttctgtgctgaactacttgaagtttgaaatgacagcgcctacggcaaagtgtttcttgaggagatttgctcgttctgcacaggcgtgtgatgaggatcctgctctgcatctggagttcctggccaattacatcgctgagctatccctgctggagtacagtcttctgtcttaccctccatcactaatcgctgcctcagctattttcttggcgagatttgtactccagccaacgaagtatccttggaactccacgcttgctcactacacgcagtacaagccgtccgaattgagcgagtgtgtaaagacactgcaccgcctttccagtgttggtcctgggagcaacctcccagcaatcagagaaaagtacagccagcacaaatacaaatttgtcgcgaagaagcagtgcccgccacaaatccctgccgaattcttcagggatgcggcatgctagacaatagaaagaagcccagcggttgcttacttgattgattcttctccctgatgtggccagttcctgtttgtggtcatgtatgttacaaatccagagagttcaatagcagcactccacggcatgcatatgtatctggaaccatgtttagctactacgctgatggaatctgcaagtcaagtgctgtgccttgagatagatatatgtaacgaacagctagttcgaccttggtacagaaaagcattcttccagcgccctgtacgtatatgcagctgggtctgatctgttgtatgcctgaactgcacaacaacagatgaagaaccaaatcatgatgactaaccaatttaatttaatttattagctgtttctgacctagctaatctgcgctttggagttggaaacacacagcatcatgctggctgctgactctataatagttttgttcttttttgttggtatatgcctgttcgtttcatctcagtatggctgtctaacaacatctgtacaccaaataaacacgttgtaaaa

SEQ ID NO: 22294 - DNA, 2260 bp, Zea Mays
gttgctttgggcgttccatacataaatcgccatcgcggcatcgggccaagcgcgaaattattgcgagtttgctagccccaaccacaccaacaccacccgctccgcgtggccatcttcctcctcgtctccactctccactgcaagagctagacgaattaatgctgaggcgtctagctcttccctcgccggcactggccgcatgctaaggcgagagtggccttcttctcatgaccagtgcatggttggtccgggcgtacgttcccatgttgctccgtagcagaatctcgtcggcgtccatggagaagacgcgccgtcaccgggtgctggctgtgctgctgctgctggtggtggtgctggtctccgctctccctgatctcgggagctgccacaaagatgatgccggacaaggaggaactacgaacccagaggaagatatggtctctgtctccgaagctaggacaacccaccacggtgaccggaccaggaaattcctgcacgagcagcagcagcagaacaggtactggtccggggatttcggcgacaaggtgtcgtcgttgacagactccagccagtaccctccagacagtggaggcagttcttctcaaagcccagcgtcgacgttcaagccagaccagtggcagccatggctaccgtgggcacccaaggccccgccaccgatgagcgttcctccagcgcaggccccggcacctttccccgcgggggtggtctcaaaccctgggcacagcatcgcgctgcccccgcagccggcggtggtggtgccggccgacgccggcagtaggccggcggtgggtgccggcgttccggctggaggagcgggagcgaggccgcgctctggcggtgttggcaggcctgtctacgccatggctgcggccggggcctccctcgccgcggccgcggccgtggcgctcctcgtcctctgctaccggtccagcagcgtggtcaccgtcaggccctgggcgacggggctcagcgggcagctgcagaaggcgttcgtcacgggcgtgccgtcgctcaagaggtcggagctcgaggccgcgtgcgaggacttcagcaacgtcatcggctccctgtcggattacatggtgtataaggggacgctgtccaccggcgtggagatcgccgtggtgtccaccaccaagaactctgccaaggagtggtccaagcactgcgagtcacaattcaggaagaagataacaagcctgtccagagtgaaccacaagaacttcgtcaacctgctgggctactgccaggaagagcagccgtttacgaggatgatggtgttcgagtacgctccaaacggcacgctcttcgagcatctgcacgtcagagaagacggttacctggactggcccactcgcctgcgcgtggcggtcggcgtcgcctactgcctggagcacatgcaccagctgagcccgccggagatcctgcgggcgctggacacgtccaccatctgcctcaccgacgacttcgcggccaagatctccgacgtcttcttctgcgacgagccccgccggcaggaggggagcctgtccctgtcggcgctgtcggaccgggagagcgtggtgtacagctacgggatggtgctgctggagaccatgaccggccggttcacggcgtccgacggcggcctgctagaggcctgggccgcggcctacctgagaggggagcggcagctccgggacgtgatggatcccgccctgcggcggtccttccacgccgccaccgtggacaggctggacggcgtcatcaggggctgcaccgaccgggagcccaggaggcggctgaccatagcggaggtcgccaagcgcctgagggagatcactgccatgtcacccgacgcggccacccccaaggtttcgccgctgtggtgggcggagctggagatcatctgcgcagaggtcaactgaggtcaacctgagacggacgtgccaatgtttgtcgtgaaaaggctgtttcgtggtagatacacaggttgcttctttttgatatttttattttttaggtttatgttgaagtttgtgtccatctgtacatatgaacaaaatgaagtgtgcaaccaagctgattgttttaaaatattattttaataattaattattaaaaagaattgcaaaagttgtacgatttcaagatctgtctgtcttaagagctggttccaaccttcataggtaacgatatctcttcgcaatttatttgagctcttaacaaattttagttaaaaaatgaatagaaataaata

SEQ ID NO: 22295 - DNA, 1439 bp, Zea Mays
gcgagccctgggtcaaactaacttcagagaccggctgctggttctccaccaaactaaccaaccatgcgtccgtcgtcgcgttacccgccgcaacccgcgctacctgcccctagccggggagcagctccccgacgccgtggactggcgcgagcgcggcgccgtcgccgaggtcaaggaccagggccaatgcggtgcgtgctgggcgttctcggcggtggcagcggtggaagggatcaacaagatcgtgacaggcagcctcatctcgctgtcggagcaggagcttatcgactgcgataagttccaggaccagggctgcgatggcggcttaatggacaatgctttcgtgttcatgatcaagaacggcgggatcgacaccgaggccgactacccgttcactggccacgacgggacgtgcgatctcaaactgaaaaatacaagggttgtatccatagattcgttcgagcgtgtgcccatcaactacgagagagcgctgcagaaggccgtggcgcaccagcctgttagtgccagcattgaagcatctcggcgcgcgttccagctctacagttctcgagggcggcaaggactactggatcgtgaagaactcgtggggcacccagtggggcgaggccgggtacgtccggatggcgcgcaacgtcagggtgagggccggcaagtgcggcatcgccatggagccgctgtacccggtgaaggagggcccgaacccgccgccgggcccgacgccgccgtcgcccgtgaagccgcctaacgtgtgcaacgcggagtactcgtgcccggaggccaccacctgctgctgcgtctccgagtaccgcggcaaatgcctcgcatacggctgctgcgagctggagaacgccacctgctgcgaggaccactcgtcctgctgcccgcacgactaccccgtctgcagcgtccgggacgggacctgccgtaagagcgccaacagcccgatgatggtgaaggctctgcagcgcaagccggcgatgtatactggcggcggcggcggcggcgagcaaagcgggaggagcagctggtgaggagattgagactgtggtggtgcgtggcgtgtactgttcatcgttcagacagatgacttgctggccatgctgtgggctcaggaactgcttcttcacagtggcgatgttctgatctgtaatgcacgaagcacgatactatttgttgtatatgtatgtatgtgtaactacagataagattaggaacggtgtgaaagaataaagaaaccgatggaataagtgatttgggaacaatctcagaatcaatttatgcagccctttaggataacttcgggaacagtcttgcacaaacaacaaggtaataatgcattcactcgtcgtgttatgtaaaacatgttctccagaacaaagctcagatttgcagtgaatatattcctgaattcaagttcg

SEQ ID NO: 22296 - DNA, 3377 bp, Zea Mays
ctcgcctagatcggcacgaccagcaggcagcaggagcggcggaatcatccgagagggcccgttgcgatctacaaaaagggaatttcccccgatccgcaaacctccacgacatatactccgaatcatggttctgaagtcgcacacaaatctgctagatatgtgttgtgaagatgtgtttgacttccaacaacctttaagatctcctcgtcatgtggtgaactctcctggcatcatatctgaccctgattgggaaagtagtaatgatggcaactcagttggttctatgcctttttgttttaagagaaagattattgttgcaaatttccttcctgtgatctgtgcaaaaaatgaagctaccggagaatggtcctttgccatggatgataatcaactgcttgttcaactcaaagatggttttccaattggtaatgaagttatttatgtgggtagtttgaatgttcaagttgatcctattgagcaagatcgagtttctcagaagctcttcaaggaacacagatgcgtacctacctttctcccagctgaactccagcatcaattctatcacatattctgcaaacagcacttatggccacttttccattatatgcttcctgtttgtcatgacaaagatgagctctttgaccgttccctttttcaagcctacgtgcgggccaacaaaatttttgctgacaaaattgtggaggcagtcaattcggatgatgattgtgtgtgggttcatgattatcacctcatgcttatcccaacccttttaagaaagaaactgcaccggatcaaagttggtttcttcctccacagcccatttccctcgtctgagatctataggacactgccagtgcgggatgaaattctaaaatcacttcttaatgctgacctcattggctttcaaacttttgactatgcccgccacttcctttcatgttgcagcaggcttttaggccttaattatgagtccaaacgtggccacataggtatagagtacttcggccgaacagtgagcctcaagattcttgctgcaggtgtacatgttggccggcttgaggctacattgaggttgcctgctacaattaaaaaggttcaagaaattgagagtagatatagtggcaagttggtaatattaggtgtagatgacatggacatctttaaaggtatcagtctaaaactgcttggcttggagcttcttctggaaagaacacctaagcttcgaggcaaggttgtccttgtacagattgttaatcctgcaagaagcatcggaaaagacattgaggaagcgaaatatgaagctgaatctgtagctcaaaggataaatgataaatatggttctgctaattacaagcctgttgtcctcattgactactcaatacctttctatgaaaagatcgcattttatgctgcatctgactgctgtattgtaaatgctgtgagggatggcatgaatttgataccgtatgagtacaccgtatgcaggcagggaaatgaggagcttgataagctcagaggtcttaataagagctcatctcacacaagcacacttattgtgtctgaatttgtgggttgctctccatcacttagtggagcattcagggtaaatccttggagtatggaagatgtggctgatgcattatacagtgtaacagacctgacacgatatgagaagaatctgcgccatgaaaagcactatcgctatgtcaggtctcatgatgttgcttactgggcacgcagctttgaccaggatctggataaagcatgcatagagcaatacagccaaagatgttggacaactgggtttggtttaaattttagagttattgccctttcacctgggtttagaagactgtctctagaacacctagcctcgtcttataagaaggctaacaggaggatgatattcctggactacgatgggacccttgtgccgcagacatcacacgacaaatctccaagcgctgaacttatctctacccttaacagcttgtgcagtgatatgaagaacacagtatttatagtcagcggacgaggaagagattccctaagcgagtggtttgcttcatgcgagaacctcggtatcgctgccgaacatggttactttatcagatggaacaaagcagctgaatgggagacaagcttctcaggtatttattctgaatggaagctcatcgcggaccctatcatgcatgtatacatggaaacaactgatgggtccttcatagagccaaaagagagcgctttggtatggcactatcagaacacggatcatgactttggctcgtgccaggcaaaggagctagtgagccatcttgagcgagtcctatcgaacgaacctgttgtcgtgaggcgtggccatcagatcgtagaagttaaacctcagggagttagcaaggggatttccgtggacaagatcatccggaccttggtcagcaaaggggaagtaccagaccttttgatgtgcatcggaaacgatcggtcggacgaggacatgttcgagagcatcaacagagccacctccctttccgagcttcctgccgctccagaagtattcgcctgttccgttggccccaaggccagcaaggcaaactactacgtcgatggctgcgacgaagtaatcagactgctgaagggtgtcacagccgtttcgctccaaaaggatactgccggccatagccatgcggcattcgaggatacgcttgaggttgtcagctgatccacacaagtagtcagtcagctcaaactagctacgtccagtgtgttcagcgtgccaatctcaaatctccactgcatgcaagccactcatcactccaaaccatatgtgccaagtggaactctaaattggacggagacaagtatcgccattgctgacacagagacagaacagcggtcacaaactgcaagttcgagcgaatggcgtcgcggttgatgattcactgacgacaacggaaatcacaaaccgcaagttttcaattcgtaggctaagacaactagtgggacgccatacattttgtaggcggctgatctggtggtgaaagggtggatgtccctgctagagccccagcttacggcatctgggagagccttggaagttggaccccgacgcttgtgctgcactgaggactgttacactattttctttgtacagaacaaacaggtgtggttaggcgattagcgctgtgacgattgattgtaattcacccacgtaccattgaggaaattaatggctgcgatggtgaagcgccgtgcgcatggcacattgtatgacgttcactcagtgttcggttcgagtttaaagtaggatgatgcggggtaacactgttgtctcgtttttaccataacaacaacaacaataaagcatttttgttctaagc

SEQ ID NO: 22297 - DNA, 1678 bp, Zea Mays
gtgtgacgactgacgactgaggtctgacgaggcgtaaacctcgctgactcgccctgccgccgccccgccccgcccgcgcgttctccgccgtcgtccccggaaggtttttgcctcagggcatgtggatctgttagttcacctgctgcaagcaagtatagctatagggttgaccagtgcagaagtatgaatccttactttgttgggattcttgtccccgtcgcggtctccctgctgctccgcaagaggagaaaggcccaaaggatgaggggagtgccagttgaggttggtggggagcctggatatgcagtccgtaactatcgttttgaacaacctgttgagacacactgggagggggtgtccacacttgctgatctgtttgagcaatcttgcaaagagtatgtatacatgccactccttggcacaaggaagctcatttcaagggaaactgaagcagcacctggtgggagatcgtttgagaagctgcatctgggcgagtatgagtggaagtgttatgcagagtgcttcaagagcgtttgcaacttttcatctggactaattagagtaggtcaccagaagaatgaacgtgttgctatttttgctgagacacgggctgagtggcagattgggttgcaggcatgcttcagacaaaacattacagttgtcaccatctatgcctcattgggggaggaagctttgtgtcactcactaaatgagactgaggtcactactgtagtttgtggtcagaaagaactaaaaaagttgattgatataagtgggcaacttgacactgtcaagcgtgttgtctatatcaatgaggaaggcatctcaactgaagtttctttagctcaaaactgcactagctggatagttgaatcatttgaggaagtaactaggttaggagctgaagcacctgttgaagcaaacatgcctctaccttccgatgttgcggtgataatgtacacaagtggtagcaccggattgcccaagggagttatgatgacccaccgcaacgtcctggctacactctcagcagtcatgaccattgtgcctgcacttggcagtaaagatatatacttggcctaccttccacttgcacacattcttgagttggcagcagaggcactaatggctgctgttggggcctcaataggatatggatcacctttgaccctgattgatacatccaataaaataaaaaagggaactctaggtgatgcttctgcactaaagccaacattgatgactgctgtacctgctatacttgatcgtattcgtgatggtgtcaggaaaaaggtggatacaaagggtggtatagcaaagcaattgtttgacattgcctataaccgtcggcttgctgcaatcaatggaagttggcttggtgcctggggactggagaaactcttgtgggatacacttgtgtttggaaaggtgcgtgctattttgggaggaaagattcggtttgtactttcaggtggagcacctctatctggagatactcagagatttatcaatatatgccttggggctccaatagggcaaggttatggtctgactgaaacttgtgctggagggacattttcagagtatgatgacacatctgtcggtcgtgttggtgctccactaccttgttcgtatattaagtgaatgagttcttactgttgacctcccacagttcctg

SEQ ID NO: 22298 - DNA, 2392 bp, Zea Mays
acgaaacctgtgtgtgaatgtgtgatgagggcaaaaagcaagtaacccatctatctagggttggaagcttgtacatggccacctcggtggttgtggcacgcctcgcgggcgaggcctcgcagcccaaggtcctaccttctgcgaatggagtctcatccgagagctattggcgggtagctgctacgcgccgttggcagggccgcggtgtccggtgctgcgcggccggtttccgcggtgggggcgccgacgccgacgccgtgatcgccagcgaggactttgtggggttctttcgggaggcgtggccgtacatccggggccaccgtgggagcaccttcgtggtggtcatctccagcgaggtcgtgtgcgggccgcacttctaccgcgttctgcaggacatatcacttctccatggtctggggattaaatttgttcttgttccaggaacacatattcaaattgataagctgttgtcagaaagaggcatggtgttattggacgctggcatggtcttgtggatagcattgcaagtggcaatttccttggtgctaagagaagaggggtggttaatggtattgactacggattcaccggggaagttacgaaaatagacgtttcacggataagagaaaggcttgatagtgatagcatagttgttatcagcaacatgggcttcagttcatcgggagatgtgttaaattgcaacacctacgaggttgctactgcatgtgctttagccttggaggcagataaacttatctgcgttgtagatggtcaggtatttgatgatcatggacgggccattcaatacatgtctattgaggaggctgatttgttgattagaaagcgtgctaggcaaagtgatattgctgcaagttatgtcaaggttgtggatgaggaaggcatcaattctttgcataaaggggacgacagaccatcattgagtcccaaggcttacataaatgggtatgctgcttcttttcgaaacggattgggttttaacaatggaaatggtatttattctggcgagcaagggtttgctattggtggtgaagagcggttaagcagatcaaatgctgatccttttaaaaacgggttgggttttaacaatggaaatggtatttactctggtgagcaagggttcgctattggtggtgaagagaggttaagcagatcaaatggctatctttctgagttggtcgcggcagcatatgtgtgccatggtggtgttcaaagagttcatattatagatggatgtgttgatggatcacttctattagaattgtttacgagagatggagcaggaacaatgattgctagggatgtttatgaaggaacaaggatggctacagcggaagatcttcctggcattagaaaaattattcggccgctggaggattctggtgttttggtgcggagaacagatgcacagcttcttgaagcgctagagtcattctatgttgttgaaagagatggttcaatcattgcttgtgctgctctatttccattccctgaggaacaatctggtgaagttgctgcaattgctgtatctgaagaatgccgaggaagaggtcagggggacaagttacttgattacgtggaaaagatggcattatccctgggtctcaagaaattattcttgcttactacacgaactgcagattggtttgtgcgacgtggcttttcagagtgctcaattggatctatccctgagcagaggagaaaacgtatcaacttgtcccgtggatccaagtattacataaagcagctgtagccaaagcctgctgggattatcgccaacaattttgtcatcaggtgactcagcagcatgcacagagtttggttccacacttccacttaattaagatggtaccagccaagattacaccaatttcgcggttgcccaaaggcatataattgcacaaagaaacaaaacaccattttactgtcactgtgtttgaaagatggttgtctttgtttaagtatgtgacagaagtttgttttgccaatagaatcaaggcagagaagaaatagctgattgaattatatgtagaccctatttaacaagcaataccaaagatgaagtgctcgtacagtatcatctctggttggtgcctcattgtgtgcatcatagatgattgaacttgccttttccactcatagctgattggccttatcttttctacttttgttgagagaaaaaaaagagctagtgaaacaattggttctcttgtatcagatgtcaaagtatccttgaatgaaaacaaaaaatatgaagtgctcgtctgttatcatctctggttggtcgctcactgcgtgcatcaggaaagaataaaagataagttgcccttttctcttcgcgtgtgtgggtctgcaaaaaagaggcggattttgt

SEQ ID NO: 22299 - DNA, 1481 bp, Zea Mays
acccttccttttccggttcgactttcgacctttcgacgcgttccccaatccagctgaaatcaatccctgatccccaatccccgtccaccctcccaacaaaccctaactctacccctcaaccgagcgcaaccggcggcgatccaagatgccggcgacggcggggcgcgtccgcatgcccgcaaacaaccgcgtgcacagcagcgcggcgttgcagactcacggcatctggcagagcgccatcggatacgacccctacgcgcccgagaacgacaagcaacagccggggcggccttcgtcctccgtctccgccaacgccgccgccgcagctgccaacgacgccaacgcagccgccagcgccgccgcagcttccggatccggctcgggcgatggcaacgcctacaccagcttccagggccttctcgcgctcgcccgcatcacaggctccaactccgatgagacacgcggcgcctgcaagaagtgcggccgcgttggccacctcactttccagtgccgcaacttcctctccgtcaaggacctggacctggacgacgccgacgcccaggccgctgcacaggcggccgcgcaagccaagttcgacgagataaaaaagaaagctgctgccggtggggatgcagatgatgcttctgatgatgtggaagaggacgaggacagcgattcctctgattcagacatcgaccctgagctggagaagataattgctcagcgcgagcgctccaggaatggagcaaggtggcccaggaaggaaaagaagtcgtccagccaccaccataggaacagcagcagcaagagaaaatcaaagcacacaaggagtaggagtgatgatagtgaggaggatgaaggcagaagaggccgggacaggaagaagatgtccggcagatcgaagaagcatgaaagatctgatgaggctagcagcgatgacactgattcagatagacagaggcacaggaagagcaggaaggacaggaagaggaggagccaccgcaggagtgacgacacgttggatgagaaggatgtatctggaggtgaagaaaggaggcatcaacgtcaccagcggagccatcactggagggatgcatctgactgtgacaatggtgacagtgattctgcacatgacaagaagcaatccagcaggcggaggaggcattgccagtcagaaaacagtgggctagatgaggatgagcgacatgaccaccggggagcaaagcgatcacggaagaatagggaccacaagaggagctaaagaggagcattgaattggtgataccaagtactgggaaattaatcatctcaaacaactagatatttttctccatctcaagctcaggctggcaattataatgctatggatcgctaaatcctgatgaatgattgagtgccgattcatcatccagattgtgttgtatgatatacatttgaaacgagttattttgcatatatatattggtgtatcttgactgcca

SEQ ID NO: 22300 - DNA, 2873 bp, Zea Mays
attcgttgagtgcgcgcgcggcgcggcgcggcggcttgccattacccgtcctctctcttaccccgtcgtcctcttcacctgcaattgagcatttgcttgctccccctccccgacaaaaaccccctgtcccgtcgagcctcgcatccctagttccctacaagcaaggaaggaaacccgggcaacacgacaccggcggtgccagtgccacggaaaattagccggctccctccccgacgtccggcggcggccgagcaacggtgctggctcccaacatggagacatataccacagacgacgcgcttaccattatggggtttggaaaattccaagcgcttgttcttttctacgctggaatgggctgggttgcagaagctatggagctcatgctcttgtcgtttctcgggccattcatacgagaggagtggaacgtctccccagagaacgagagcctcctttcgagtgttgtctttgctggcatgctgctaggtgcctgtgcttggggctttgtttccgacaaatatggacggaggtaaaagatttcctggtacaaacgctctcatggtttggctgccaactgcaaaccttcctgaccttgagtttatcataacctcaaattaaacacatcaattcttaaggctcaatctacatgtttctgaattctgatatcctgctatccaactatgacatatgtgctgataggatattcttctttgtaggattttgaagcataaagaaatgtgtgcttgatatgatgtgattataaccgcaactgcttaccaaattacaacatcaatgctgaataatgtaattcagtaacaagttaccagcacatttaaacctaatggcaaatttgacaaaaaaaatgaaggaatatgcaatgttttctctagcataaattctactttcatgcaagtacgtttggacctttttactacaaaagcatctatttatcatctcaaatttgagaaccaatgcaattttcatctttacagcggtattggtagtggtttgctcatggcatccggctggactagatttgcttcgtcagcaaactaactagccatgtcagcaatctacctcatacaatgattcacaaggattacagggtaaaagcatagataattttccttcatttcctgtttgtgttctctctgctttttctatatctgaacgccaaggacggattcagaacaacattacaatatcactttgagaactatcttgaagatttagttgtataatgctttggcttggaaattgggtactacaaaactaatttttgcagaggatctaatcagaactttcatgaaactagaaagggataagttggatattttcttttcttccaatgccattccttactctatttcaacctcctcctctgtttcaagcataagtgagataaaacttacatttcccctatttcaggactggtttaatattttcaactctatttactagtggaatgggttttctaagcgctttatctcctaactacttatgcttggtggctcttcggtttctggttggagtaggagtgggtggcagccatgtgtttatatcttggtttttggagtttgttcctgcacaaaatcgtggcacttggatggttattttctcccttttctggactctcggcacgatcttggaagcttcacttgcatgggtcgtattgccagcattgaattggaggtggctgctagtcttcaccgcccttccatgcttcctcttgcttcctttctttggactaacacctgagtctccgcgctacctttgtgcacaaaatagaatgtctgatgccacatctgttctagagagaatggccaacgcaaaccaatcagctcttcccccgggagttctcacgtacaatagacaaacaaaatgtgaccacgacgttctcgctcccgagagtgaatgtcttcttcctgtcagagagaaggaatgcacagttgacaatgccaagagctccgaatctggcagtcttgctgcactgcgcatgctattatcgcgcgaactgctcagatcaactctgcttctttggtttgttttctatgcaaattcctttgcttattacgggttagtattgctgacatcgcagttgagtgatgcaaataaaagttgtgcatctggtgtgtcttttggtctgcgccaaaaggaaatcaatctttacaaagacactttcatcactagtttagcagaaatcccaggtttatttttgtctgctgttcttgttgattggtttggtcgaaaagcttcgatgtggtctatgatgttcgcatgctgtgctttccttggaccacttgtacttcaacagactgagttgttgacaactattcttctatttggtgcccgtgcatgtgccatggggagctttacagtcttgtgcctttatgctccagaggtgtatccaacatttgtccggtcaaccggtgcaggaattgcgaccgccattggtaggattggtggggttgtttgccctctcgttgctgtcgccatgctgcggagctgccatcagatggaagcactcattgtgtttgaggtgatattatgccttgctgcagttgcctgcatgttcttccctgtagagaccaagggccgtggaatggactgatgcaatatcaggcttcagcatctagatgagcttgtagttcatcactgtttgttttatgccatcattatgtacagagaatatacatgtaacatggtgtggatagttcctcaaaatatgtgcaggactttccaaatttgtaagacagattttgtactgaaagacagctggttctgtactgccaaaacactgaaagacagagttgtattactcctcaaaaaaaaaagaaaaaagaaaaaaagctaacaaaaaaaaaaaaaaacgg

SEQ ID NO: 22301 - DNA, 218 bp, Zea Mays
cgccgcgacccacgttagggcgttcgcgccccaagggcccgtgccattggctcagcccgcccagccgacgcgccgcggcgggccgcctcgaagctcccttcccaacgggcggcgtgctgaatcctttgcagacgacttaaaacgcgacggggcattgtaagtggcagagtggccttgctgcaacgatccactgagatccagccccgcgtcgcacggat

SEQ ID NO: 22302 - DNA, 652 bp, Zea Mays
ccgcgcgctcggagggcggcagcggcgggccgtgtggccaccgctacactccgagtccagagaaatacagcgcattggcgcatggcctcccggcggagttcgcccgcggcggcctctgtggccgcgcgctctcggcatgtgagcccatgaggcgcgtgagcaggagctcgtggctggcaccaaggtgcggcactgcggccgctgccacttaaatcgcctggctcgcgcgcggaagacgggagggagaggcctcctctcatatccaccgcaactagtccaccgtaaaagcatgagctcccgcgcggctcggccatggcgagccagcgcaacccgtgaacgcggcggccggcgcaagcacaggatggactgcgcgccctttgcggccatctgtgagcggcggcgcaagatccgcgtctggcgcagagaagaaaggcgcggcggcgctcgggaccctggctcgcgtgcgcagggccgcgatgtcatggcagcgcctcccatccgctgcggcctggcgaccccgacgtccatgacaatatcacgcgcgggagcggaggtcccagaagataagcggcggcgtgaggagcagagcacgtctgttgatgattaatatgaggtcttgttggagccttaagtcttgccgaagatacaaagg

SEQ ID NO: 22303 - DNA, 1479 bp, Zea Mays
atgttattggttgggaaagcctggttactgtaatttctagtgacatgcggtgttgggacgcccctgaaaaggcagatgttttggtcagtgaattgcttgggtcctttggtgacaatgaactatctcctgagtgtcttgatggtgctcagagattcttgaagcctgatgggatttccattccttcatcatacaccagcttcatccaaccaataacagcatcaaaattgcacaacgatatcaaagcacacaaagacattgcacattttgaaaccgcatatgttgtcaaactacaccgcatagcgacacttgcacctccacaacaggtttttactttcacccatccaaatttctcaccaaatgctagcaaccaaaggtacaccaagttgcaatttgaaatgctgccagatatgggttcatgccttgtgcatggatttgctggttattttgactctgtactttataaagatgttcatcttggaatcgagccaaacacagctacaccaaacatgtttagctggttccccatcttcttcccattgagaaaacccatctatgtgccggaagggtctcctatagaagtgcacttctggcggtgctgtgcccccacaaaggtgtggtacgagtgggctgtgactacaccgaccctgtcgccgatccacaacagcaatggccggtcctattgggttggtctatagtaactagtaaggcaatcaagatggtcgctttgtgttgtaacagagaagaaaaaaaaacagagagatgatagggtccaccggtccagttctatttgagccgggtgctactggtttctgcctggaggagcagatcaaaggatctgtaacgcgttgctatctgaaaggcatttcaggtcattgtccgcaacaagaagagagtaggatataactatgaactaagcttgagatttagcggtgaatggttaatcaaagaagaaaacaagaagatcaaagggcatctagacattcccgagttttcattcggcgagatcgatgacttggaggtacaagtaaggctcggcgatgacaagggcctcgcctctgatgatagaacacggatctgcaaggatctcaagtcctttttggcgccgatccaggagaaaatgcgcatgtttgaagaagagctcaaaggtagatagcgagtattagcaagagttcgcagtgctaggcaagtgacttggcagttggcaccgccgtgctagctgtgatgtgtgtgtcgcaacgctctcaaagctgagactgtatgtgtactggtgtaatacacttgtcaagatgagcacgtacgaactgttctcttggtatccctcattttcagcatgtgatagtaaaaggaattcaagatgtttttgcatgaatggtatggatataggctctgtttggcacagcttattttcagcttcttcataaatttaagcaaaagttctgtcagcttctgcagcagcttatcagttcagctgcttctcag

SEQ ID NO: 22304 - DNA, 4690 bp, Zea Mays
atccaagctgttgtcgatgtcatcgtctggcagactggcccttggcaaaggtcccacctgccagtggcacggacaacccgagaaaaatccaccaacattggcaattctcgtgccggcgcacttcgcttctcactcgatctgctttgctctgctctcggtctcggctgcttgcctgcttcgagtcgtcgccggcgggagcagagaacccacccgcacggtgcgatgtcgttgaccgcggcccccgtggccttcatcggcctggacgagctcagcgttgagctagctgcctccttcctccgctccggcgcttgcgtccgctccttcacccccgaggcggaacggtcgccttctgcggcgctcgcggagttgaatggcctcctccagtgcgcgagcccagtggaagccgcgcgagatgctgcgctggtcgtcgtgctaagcgatgctggtggggttgacgagttgttcttcggggttgaggggatcgcgaaagggttatgcgcgggttctattgtattgattcattcgacattgctgcctagtcagttggagaagctggagcaggagcttacagatcagaagaaggatgtcttccttctggatggatacattttcactggtttatctgatgaattaaagcaacagattattattgttgcatctgggagacaggacatagcagaaaaagctagcaaatttttccatggtctatacaaaaccatttattttgctgaaggtgaattctgcactagcagaaaaattaggatggtgaatgatttgctggagggcattcattttgttgcgtctattgaagcaatgtatcttggtgttcgagctgggattcatccaacaattatttatgacataatatcgaatgctgctgggagctcgaggatatttgtggagttagttccaaaacttctgagtgaagatcctttgctgattgattttctaaaatcaacaaggaaaaaagcaagccatgtgatggatatgtcaaaatcagtaacatttccactgccacttctgggtgttgcctatcaacaattggtacatggttcatcagcagtaactggagatggatctgcctcaccgctgaaggtttgggaagcatcgtttggagtaaatattgtagatgctgctggcgaacaaatttatgatgcaagcaaattagctgatcagcttgttgcggaatctaaagcagcgaagcggattggcttcattggtcttggagctatgggctttggaatggcatctcatttgctgaaatcagggttctgtgttgttgcttatgatgtctacaagccaacaatggccaggtttgctgatttgggtggatcaacaaaaggttctcctgaggaaatagcaaaagatgtggaaatacttattatcatggttgcaaatgagtctcaagctgatagtgttctttttggaaacgctggtgctgtaccagttttatctgctggaacatctgtcatcctttcttctacagtttctcctggatttgtgatccacctcaacagaagattagaagctgaatgccgacagataaagttggttgatgctccagtatctggtggtgtcaaaagggcggcggatgggacactaactataatgacttcagggacagatgaagccctccattgcactggttctgttctatcagcgctgagtgaaaagttgtatgtaatcaaaggaggatgtggagctgcaagttctgttaagatggtcaaccaacttcttgctggggttcatatagcttcagcagctgaagccatgtcatttgctgctcgactaaatttgagaacgagaagagtcttcgaaattatgcaacatgcaaggggttattcatggatgtttggaaatcgtgtgccacacatgctcgataatgattatacaccctattctgcagtggatatatttgtcaaggatcttggtatagtatcttgtgaaagttccaattcgaggatcccagttcacgtctctagtatagcccaccagctgtttatttcaggatctgcttctgggtggggtagatatgacgatgctgccgttgtgaaggtctatgagacattaactggtgtaaaagttgaagggaaggctccgatgctcagtaaagaagatgttcttcagtctcttccatctgaatggccagaagatccaattgataatcttgtacctattgcatctcatagtagcaaaaagtttcttgtagttttagatgatgatccaactgggactcaaacagttcatgatatagaagttttaactgaatggcctgttgaagcccttgttgaacagttcctcaagctaccaacttgcttttttattttgacaaactctcgttccatgactgctgataaggccatgctgctagtacaaactatctgtaaaaatcttaaagctgcggcagagaaggtccctggtgttagttatacaatagtcttgagaggtgattcaactctacgtggtcatttcccagaggaagctgacgctgctgtctccgtattaggtgagatggatgcttggataatctgtccattttttcttcaaggtgggagatacactattaacgacatccactacgtcgcagactctgatagattaattcctgctggtgaaaccgaatttgccaaggatgcagtttttggctataaatcttccaatctcagacagtgggttgaagagaagaccaaaggacgggttttggagaaccaagtttcaacaatttccataactctcttgcgtaaacaaggaccaactgctgtttgtgagcatctctgtagcttggagaagggctctgtgtgcatcgtcaatgctgctagtgacagggacatggctgtctttgcttctggaatgatccaggctgaattgaaaggaaagcgatttctctgccgcacagctgcaagttttgtgagcgcaaggattgggatcaagccaaagccacctatctgtccaaatgaccttggcttaaaaagagctttaactggaggcctcataattgttggttcatatgtgccaaaaactacaaagcaggttgatgagttgcgatcacagttcgggcaatctcttcgagtcatagaggtgtctgtcgagatggtttcaatgaaatcaatggaggacagagaccaagaaatcagacgaattgttgaactagggaatgcttatatacaatccagaaaagacactctaattctcaccagccgccaactcattactggaaaaactcctgaagaaagcttagaaattaattataaagtgagttcagcactagtggagattgtgagaaggattgatagtaaacctcattatatcattgcaaagggaggaatcacttcatctgatattgctacaaaggcgctggaagctaaacgtgccaaagtcatgggacaagcattagctggtgtacccttgtggcagcttggtcctgagagtagatttcctggggtcccttacattgtttttcctggtaatgttggtgataacagtgctcttgctaaagtggtgaaaagttgggcttccccatctagaagttctacaaaagaaattcttcttaatgcggagaagggcggttatgctgttggtgctttcaatgtgtataaccttgagggaattgaagctgttgttgcagcagcagaggctgaaaagagtcctgctattcttcagattcatccgagtgctctaaagcaaggtggagtcccactggtagcatgttgcattgctgctgcagaacaatccagtgtgcctatcagtgtccactatgaccacggcatttccaagtcagacttgcttcaagctcttgaagcgggatttgattcagtcatggtggatggttctcatctaactttaggggataacatcttatacacaaagagcatatcttccttggctcatgcaaaaggtttacttgtggaagctgagttgggtaggctctcaggctctgaagatggcatgaccgttgaagaatatgaagcaagatttactgatgttgcccaggctgaggaatttattgatgagacaagcattgatgctctagcagtttgcattggaaatgttcatggaaaatatccacctagtggaccaaaccttaaattcgacttgctaaaggaccttcgtgcattaacattaaagaaaggagttagcttggtcctccatggagcatctggtctatctcatgagctcgtaaaggagtgcatagacttgggcgtgagaaaattcaatgtgaacaccgaggttcggaacagctacctggcgtccctcagaaagccagaaaaggacttgattcaggtgatggcgtctgctaaagaggcaatgaaagctgttgtagcagagaagctgcgcctgtttggatcgtgtgggaaagcctgagcgaagtacttgcgttgcgccggcaacatgcagtacaagaccgactgcatcatcgggttcgtgatgctgctgctactgtgcagttgcttacagttacagctcattgcgttgaacagctgaagtggttattgtactttgcagtgtagcgcaactaaggctaattcataaatcgtaataatgtatgtatgctgccccgctgtaaaaatgctccgtcgttaataaatgccatcgcgcttgctgtgcctttgtttacatttttattcgcctctcgagtgttctaacatgcaatctcagttgtcctatttagccctagtttgaaaactcaaat

SEQ ID NO: 22305 - DNA, 2418 bp, Zea Mays
cgaacgcgcagtccagctcactgcggagggcgggccaagtggcgccggcggggcacacctcacgcgccacgacaccggcgaccatcactctcgtcgccaccgcgccacgtgccgcccatgcacggccacagcgccagcgtcacccacgtcgcacgcacgcagcgtccccgagggcgcaagcctagctgcttatcaagcggcccaaagcgcgatccaccactccgcagatcgcagcccgtgcggggacggggggagaactcagagcagagattctagctgccttagttagcttgggtcatggcggtggcgacgactgctcggtggctcctgctcctggctgtcgtctcggcggccgcggcgtccgggaagcacgagaggtggagggtgggcggccaggtggtggagaaggagcgacggcgggtggtggcggagagcgaggccggctcggtctcggccgtggacgtcgccgacgcggcgggcacggcgtaccggctgcacttcatcaccatggaccccggggcgctgttcctgcccgtgcagctgcatgccgacatggtgttctacgttcacagcgggcggggcaaggtgacttccatagaagaagagagcagcgaacagagctccctggaggtggagcgaggagacgtatacaactttgagcaggggagcatcctgtacatccagagctaccccaacgccagtagacagcgtcttcggatctacgccatcttcaccagcgaaggcatcaacgccgatgacccctcgaagcccaaggtggaagcttactccagcgtcagcaatctggtcaaagggttcgagacagacgttcttcgcctgggatttggggtcaaacccgaggtggtagaagcgatcaagtctgccaagacaccgccaccgatcatagcctacaacccagaggaggagaagggggacaagaaacccggctggaccgagaacatcatcgacgctctgctgggcgtgcgcgatccggaggagttccttaacaagaagaagaagaagaaggacaagcacaaggacaagaagtccaagagcaaggcgttcaacttctactccggaaagccagacgtccagaactgctacgggtggagccggatgatgactagcaaggacctcgacgcgctgcacggatccagcattggcatgttcatggtgaacctgactacgggttcgatgatggggcctcactggaaccccaaggccacggagatcgccatcgtgacagagggttcaggaatcgtgcagacggtgtgcccgagcagcagcagcagcagcagcagcccgtcgggcgggagcagtggagaccaccaccacggtcacaagcggcgcggcgggccgggaggccgcggcgatgagggcgaaggcgaaggcggccgcgcgcggtggcagtgcaggaactcggtgttccgtgtgaaggaaggcgacgtcttcgtggtgccgcggttccacccgatggcgcagatgtcgttcaacgacgactcgttcgtgttcgtcgggttcagcacccacatggggcaaaaccacccgcagttcctggccgggaagggctccgtgctgcaggccattgggaagaaggtgctggcgctggcgctggggcagcgggacccgaccgccgtggacaagctgctgtccgcgcagcgcgagtcgacgatactgccgtgcgtatcgtgcgctgaggagctggcggagaaggccgaggaggagaggaaggaacgggaggagaaggaaaaggaggaagagcgggagagggaacgggaggaaaaggagaggaaggaaagggaacgggaggaaaaggagaggaaggaaagggaacgggaggaagaagagaggagggaagaggaagaagagcgggccaggaaggagcaagagaagcagcggaggagagagaaagaggaggaggagcgtgcacggagacgcgaggaggaagaaagagagagggaggaggaagaagaacggcggagggaggaggaagaaggtggaggcggacgtggtgacgagccagagagggaggaagaaggcggtgacaagccgccataccggttgtccaagaaactgaagaaacgctaccatgcacgtgccggtgtgttcagcaggagtggctgagtgagcagccgagcagagctggcctctgctccgtacaaataaacaggtggcctcgtacagatggccaattgccacatcaccaccactcgtacagagtaccacctgccagtcggctatgtatgtgtgttcgttgtgtcgtttgttaagctttgctgcatgctgagtttagattccgcttgtataaaacgtaccctaaataagcagacaagttttcaggctcatgcatgtgtcctgccccttgctcaaccaatgcatgatgctcgtgcatcctccacccaatgccgattcactgaatca

SEQ ID NO: 22306 - DNA, 1202 bp, Zea Mays
ttggaaggtggtggtgccggtgcatccgctgatcagccactgggtctcagtactccgcgatcgctccaccccttcccacgccttcaggagtgcaatgggggagctagggagattgctaatctatgaggcaacacgagattggttggtatgttcataaattttcttacctaaaactagataggaatactgcatttggtggtgccggtgcaagtattcgatgttaaaataaatatctggtacatgtggaaaataatgatcaacgcaatgcgaaaaggaagcatgtaaagtattttttccctggcggacagtaatgatggattttattttgttgagtatgttatcattgagatagttctccgctttcttatggtagccgacagtaacacggcagatccagtcacctgtgggcactgaggttgttgaatctgtcagtgagatggagccaataatgattgtacctattcttagagcagggcttgcacttgcagatctcgcaacatcaattttgccttcaactagaactttccatttaggtatggcccgggatgagacaacactgatggcctctgtttacttaaataagctacctgatagattcccgaaaggatgtaaaatcctcattgtggatcctatgctagcaactggtggaacagtcactgcagcagttgatctggttatggaacgtggagctgaaatcagtcagataaaaattatatcagctgttgctgcccctcctgccctcaagaagctcaatcaaagattcccaaggatttgtgtgtatacaggagccatggatcaaattgtaaacgagaaaggtttcataatcccaggccttggggatgctggagatcgcagctatggaacatgactccggcccttcggtgatggccatcgttaggaatttcagcaaaacccagatttagttgatgcctgcttattttcgtagatgagatttgtggttccactgaacacaaatctgtagttttgagggtctggacataatattttgacaatgtgatgtcaaatttcgcccttctattgtggcgatgtcctgataatggttatgagcttcatggagtgtttattttgagaagtgggatagcctgcaatcaccgtagctctaaacataacctatttgccttagctctgaacataacctatttgcttggtttcaagaatgatgggagtgctttgtttgaaaa

SEQ ID NO: 22307 - DNA, 2188 bp, Zea Mays
aattaataaaataatgttgagtatctccttcgcccctccccacctggctcctgctctacacaagcagtcaagggccataaagcgcagcaggatctccctctgcccaaaaccaaacctgcctccgcacctaccatttcctcccccaaaccaccatggacttctccgccggagggagtgggagcggcggaggaggcggaggcgccggcgacggccgggcgcaggcggagcgctggctggagatcgccgagaagctcctcgcggcgagcgacctcgtcggctgcaagcgcttcgcggagcgggcgttggaggcggacccgctcctccctggcgccgacgagatcctcgccgtcgccgacgtcctcctcgcctcccagtccatgggcccctcgggccaccaggacccgctcgccatcctccagctgccgcctggggtcaaccccgaccaggcctccgtctcccgcgcattccgccgcctcgcgctactcctcgggccccgcaacccgcaccatggcgccgagatggcgctccgcctcgtcaacgacgcctacgccttcctctccgatccgtctcgccgcccccctccgcccgccaatcccgccactggtaccccttcctcctcccactatgcggccgctcccgcccccgatccccgggagttctggacggcgtgccccttctgctgctacgtgcaccagtacccgcgtgacctggtcgggcgcgccctcaagtgccccaacgagggctgccgccgcggattcgtggcttctgagatcccgaccccacccaccgttgtgccaggcactgatatgtaccactgcgcctgggggttcttccccctcggatttcccaacgcggccgacctgggcgccaactggaagccattctacaaggcgttcccttggaacacggctcccagtggtcaaggtgctgatggtaggagccatggcaaccgtggtggcaggcaggcacagaatgacagtgctcgtggtggctcctctagaggtaggatcaagaagactaccgcccgcaagaaggtcggggcagggttgaggaggcgttctcttggtggtggtgtggagagtggcattgattcttcgatgctcgggcaggaaggctgggctggggatgaggacggtggagatggaaggaccgaggaggtgaggggaattaacataaatgaggcggcgcaagctacagacggcactggtagggttaatgttagcggtgctggtggagttgaagatatgggcaacttccatatcgatgttgatgcaaccgaggatatattggggaatttgcacaacctgcccttcctgagggtggacaatcttgggcggatgatttaactgttcttatggtttgctgtggctagaaaagtattgtatgattagccaggccgaaacagatgtctcagggactggcccttgctgttcaactgttcgttttattttaactgttccatctcctgttatgccatgttgtagttgtagacttgttgtctaccttgtacctgtagttacttagcatcagacatgggaaatttgtatctccattagatggagatcatgccctttgccttagcaaacaaacttgcggagttttatggtgatggaaataatgcttcaaagaggtgtggctggtgcttaccatgccacttttggtttcttcctggcatggtgacacaaatgttgctgagatcaaatgactgttttggccacccgcagtgggttgtccataccatgtcctgaaggaagcaaagtgcggttggcccagcttagtggggatatcagcagccctcccctgaagggcgaattccttttgctgttttaacccatgtttgttaggccttttattccagaaacctatgcaaaactctgctataagtttgccaagaaatgctaactgcagttgttatgttttcagcaatttcagggtaagaagatgttaacaagcaaagcaacctctctgcatttgcagggaattgcaggggaagccttctctcagtttatccctttcttagggcctctttgcatttgcagggagggcttatctcggtttatttcttcttcatactctacctgagtgggaacttttgatgctgagtttgtcttatgcctatttattttaagtcgaatgaaatatgaaggccaaatcttgactgattactagtgactatttagctcgctta

SEQ ID NO: 22308 - DNA, 2194 bp, Zea Mays
acgtgtttctgtttgagttcgaactagagggttgaaatctatttgaccactcagttataaccatttctggtctgaagatgcttcgtcaatgacatctggaaactgtaatagtatgcgctgatcttctatgcttcaccacctgactatcaatgggctctttcctgtggaaacagcccagctacctcttcattttgataattctccaccttgttgctcatgaggcaagaacgctgagttcagatggtgaagcacttcttgccttcaagaaggcagttacaaattcagatggagtctttctaaattggcgtgagcaagatgcagacccctgcaattggaagggtgttagatgtgatagtcatagcaagagagtgattgatctgattcttgcataccacagattagttgggcccataccacccgaaattggaaagttaaatcagttgcaaaccttgtcactgcaggggaacagtttgtatggttcactccctcctgaactggggaattgtaccaagctgcaacaattgtatctacaaggaaactatttaagtggatacatcccttcagaatttggcgatctggtggaactcgaggcattggacttgtccagtaatacattgagtggatctgttccacattctcttgataagttgtccaaacttacattattcaatgtttccatgaacttcctgacaggagccataccatcttctggttcacttgtcaatttcaatgagacatcctttgttggcaaccttggtttatgtgggaagcagataaacttggtgtgcaaagatgcacttcaatcatcatcaaatggtctgcagtcaccttcaccagatgacatgattaataaaaggaatgggaagaattcgaccagacttgttataagtgcagtggcaacagtgggagctctcctattggtggctttaatgtgtttctggggttgctttctttacaaaaattttggaaaaaaagatatgcgtggtttcagagtggagctctgtggaggctcttctgtcgtgatgttccatggggacctcccttactcctcaaaagacatcctcaagaagctagagactatagatgaagaaaatatcattggagcaggaggcttcggaactgtttataaacttgcaatggatgatggcaatgtctttgctttgaaaaggatagtgaaaacaaatgaagggctagatcggttctttgatagagaacttgagatattgggaagtgttaaacatcgctatttggtcaatctccgtggttattgcaactccccttcatcaaaacttttgatatatgattatcttcaaggtggaagcctggatgaagtgcttcatgaaaaatctgaacagttggattgggatgcacgtattaacattatacttggagctgcaaaagtttcgaggcccgtgtatcagactttggacttgcaaagcttttagaggatgaagaatcacatattactacaatagttgcaggaacatttggctaccttgcaccagagtatatgcaatttggcagagccaccgagaagactgatgtctacagttttggggttttggtactcgaaatactcagtggaaagcggcctactgatgcatccttcattgagaagggactaaacattgttggatggttaaattttcttgctagtgagaaccgggagagggaaattgtcgacctgaactgtgaaggagtgcagactgagaccttagatgccctgctctctcttgccaagcaatgtgttagctcctcgccagaggagaggccgacaatgcacagggtggtacatatgctggagtcggatgtaattacaccgtgccctagcgacttctatgattcagagtagtctcctggacaagccacgctgctgctagtttcccgtgggggcgcattcctttattctttgcgtatattgtgtaaatgcattgccgcggtgtttggtctccaatcggctggctcaacgggtgacttttttttgcgtctgtatacctatgtatgtatctgtcatggtacaagttggctatatgctgatttaataataagagagaacttactagtagactattgtatgtttaactatagtctttagatactcgtagatgttgtgggatctacaaaagaaatggggaaataatgaatatcgcttggaacaaacaagaatagataaaactcttttggcttggaggat

SEQ ID NO: 22309 - DNA, 1466 bp, Zea Mays
gtatacccgttgtcctcttgtcgtcgcaagctccccccccggcctccgccccgccggccaaaccaattctgaaatctgaaaacaaagcttttccgctgccgaccgagcactccgttccatggcgtcgccttcctcgtgggactagcaagcctcgcctcgctggagaccatcaagaagcaagtggcaatcatgtatttgtggccgaaggcgctagaagtacctataatggacccctcaaaagcatcaaaaaagcctgttggaattctacttgtgaaggtcgtaagagcccaaaatttgcgaaagaaggatctgctgggtaaatcagacccatatgtgaaacttaaaatgtcagatgataaacttccatccaagaagactactgtaaagcgcagcaatctcaatccagagtgggatgaagaatttaagtttgttgtgactgatccagaaagccagtctcttgaagttaatgtcttcgactgggaacaggttgggaaacatgaaaagatgggaatgaacatggtcccactgaaagacctcccgccagaggagactaaatttactacccttaacttgctcaagaccatggatccaaatgatgtacaaaatgagaagtctcgtggccagcttactctagaggtcacatacaagcctttcaaggaagcagatgtggagacagaagatacagagggtaccaatgtgatagaaaaagctccagatggtactccagccggtggtggattgctttatgttattgttcatgaagccaaagatcttgaggggaagcaccatacaaacccctatgcaaaaataattttcaaaggcgaagagaagaaaacgagggtcatcaagaagaatagggatccacgatgggaggatggattcgagtttgtgtgtgaggagcctcctgtaaatgataaactacatgttgaagtcctaagtaaagccccgaagaaagggctgatatatggcaaggaaactttgggctacattgatgtcaaccttgcagacgtgatcagtaacaagagaattaatgagaagtaccatctcatagactcaaaaaatggtcagatccaaattgagttgcagtggagaacttcctagacagaaagaacacgaatacctgaatgtggtatacatatgaatattcttgtgctgagtttgcggatacctgtaattgagctcatgtagatattccctttgtttcaagacatctgctgagtttttcagcttttaattgctcagatttactagaaacactatgggctagttttggagtccaaaaaccgaagaggattagagggactaaaattcccttattcaaaagtgaataatgagaggattttagttccttcaatcccctccgattttgtggttcccaaaactggactgagccctatgttacccctgaaaactggactgagctcattttgtggctaatgagggacaatacaaacacagaattttgg

SEQ ID NO: 22310 - DNA, 2081 bp, Zea Mays
ggctgaggttcaccgagccgccgcttcggttctcctctaaaaccctagaaactaactcccacctcccggttcccgccgtcctcgctcgccccccattctccggccctccccaccgccaccattttccccggcgacatgggccgcaatcttccagccgagcaagtggaagcacccaggagcagcaagatggacaagaagagaaagaaggacaagaagcggaagctggcagccgaggccgaggaggaggcggcggtgacggcgacagtggagaccgtgaagagcagcaagaagaagcgggtggagaatgaacccggcgcaggagcagtggaggcggagaacggcgctgagaagaccgtggcggtgaccgggaagggttcggaggaccctaagtacgcgccgctacggtcgttctccgctgccgagctgccgtctcaggtgctcgaatgctgcagcgcgttcgcgcggccgtcacctatccaggcacacgcctggccgttcctcctcgacggccgggacttcatcggcatcgccgccaccggatccggaaagacaatcgcctttggcgtgccggcgctgatgcacatcaggaagaaggtaggggggaaagcagggaagaaggctgtgccacggtgcctcgtgctatcaccaacgagggagctcgctcagcagattgcagatgtacttagtgaggctggtgcaccatgtgggataaaatcagtctgtctttatggtggaactaaaaaggaaccccaaatatctgcccttaaatctggagtggatatagtcataggaactcctggtcgtatgaaagaccttattgaaatgggtgtttgctgtcttaatgaggtttcgtttgtggttctagatgaagcagataggatgctggatttgggttttgaacctgaagtcagggcaattttgagccaaacatcatctgtacgccagatggttatgttcagtgcaacatggcctcttgctgtccacaaattagcccaggagtttatggatccaaatccgataaaggttgttattggatcagaagaccttgctgctaaccatgacgtgatgcaaattgttgaagtattggatgatagaacaagggattcaagattacttgccttgcttgacaaataccatcaagcacaaagcaacagggttttggtttttgtgctgtacaagaaagaagctgcacgagtggaaacaatgcttcagagaaggggatggaaggctgtttcagtccatggcgacaaggctcagcatgatagaacaaaagctttatctttatttaaagaagggaaatgcccattaatgattgctacagatgtcgcttcacgtggacttgatattcctgatgttgaagtagtgattaactatagttatcctttgaccactgaggactacgtccacaggataggaaggactggtcgtgctggcaagaaaggtgttgcacatacctttttcactcaagcgaacaaggccttactgatttttcatccctgctgacggaagcttgatttctccgttggtgatgctatggatgtgatcagatcagccatttgcaagctgattgcagccacggatgagtattgtggcagtgggcaatcccaaaatatagctctcttgttataggttagtttattatgagtagcattcggcttatgtttttctggaccgtccccattatgcattagcttgggctgcttggctgtatgtaataataagcaacattctgcttattatgatttgcattctcttggaggcttagtttggaaacttaaatcgtctccggtatttccagggattgagtgggaaaataagctattttcccactcaatcttcagggaaaccggaggggatttaagttttcaaactagcccagagtgtagttaaattcagtgcgtccttagtacaagcagcccggttatggtaatgataggatagtgaaaggtgtacttctatcctggttagagtaaaaaaagaatatggttttccgtgttatagtaaaaaaaagaggatggttttgcagttggattttgattgggttccatgtgtttgaatcaactttgtgtttccacaacttg

SEQ ID NO: 22311 - DNA, 2640 bp, Zea Mays
agtaaaagtaagtaaacaaacaagctagtagtaaatattctactcaatctacaataaaggatgccatggcaggtccttgccaaaaaatataataggataaacaaagatgtcaggttaactaactaactatggatcttcaggtcccccagggcaacaactgtgcaccgctcgctgccttctctaccgtgaccgagagggtgagagctcccagcccttcctcctgtagccaagatatatacctaaaggttgaacaagcagcagcagaggcaaagccgttagccaatctgctgttgcgtgttgcaccgatcaacgtcggttcccagcgcttgctcgtcaagcgtgtcctgctgctgttctctgctcctgcttgccgcgagagctcctctcgctcatctacccaaggtccgacagcaacgacttcgtcgagctgctatgggagaacggccaggcggtggtgcacgggaggaggaagcagcatccccaggccgccttcccgcccttcacctgcggcgcggccagcagcagtagagctcaagaaaaccagccgggtactaccgacccggtctcgctgttcaagacgggaggcctcttcgccgacttctcgtccggcctagacgccgcccgtggcaacggtgaccttgacgacaccgtgccctggatccactgccccatcgtcgaggaagacagcgccgcacccgcacctgccctcgcggagggctacagcccagatttcttctcggagctccatgcagcggcgttagcagcggcggcggcagagacgaacctcagccctctgccaccaccggtccagcacaacagaagcaccccggttgccaccaccagcagaggaccagaaccctcgaaggaagccccgcgcataccagtaccaggtccaggcagcaggcccgagccacaatctgagttcgcggccaccaggaaacctcggccggagagcggtggagagggattgatgaacttctccctcttctctaggcctgcagccttggtccgggcaagcctacagaggccaccgccaccgcagacaggcactgacaaggtgtccaatgtcaccacgagcacccgcgtggagtcgacggttctacagtcggctagtgggccaagaatcgcccctgtgttcacggaccagaggacggcgtggtcacaatccaaggaggtgcggttttcatgcgcaccagcgctggcggctggtaacctgcaccaggatatgcctctgggaagacctggcaacaacatgactccccaggggaaaatggagaccaaaaaggcttgtgaggttgcagtcgctactccatcgctctgctccggcaatggcgagtcctggcgcgaacaaaagaggaagagtcaggccgaatgttctgcaagtcaagacgatgatcttgatgatgagtccggtgggatgcgaggatcaggcggcagaggtacgaagcgcagccgcaccgcggaggtgcacaatttgtccgaaaggaggagaagggacaggatcaatgagaaaatgcgcgccctgcaagagctcatccccaactgcaacaagttgcactaacgacgggcgaatgctacgagattgacaaagcctccatgctggatgaagcgatcgagtacctcaaaaccctccagcttcaagttcagatgatggccatgggaagtggactgtgcattcctcccatgctgctgccgcgagccatgcagctgcaaattccttcaattgctcatttccatcatctcggcatgggattgggttatgggatgggtgtcctcgatatgaacagcacagcggcagttccatttcagcccatccctggtgctcactatacttgtccgatgatcccaggcacgccaccacaaggtcttggaattggaatgcctggcacaaacacgatgccagtgtttggactccctgggcaagcaatccatccctcagcgtctagcgtacagccattcccatcgttggcgggtcttcctgttaggccaaacctggcacctcaagtcccagccgtcatggctaacatggtgcaggagcaacagcaaggcgtagcgactcagcagcagcagagtctgaataatgaagctcaacagaaagcaaataccggagatccacaaatactacaaaaatagatgaagagatcttcgccagtaatcagtttctggatggtggtggcaacaggactaatactatagggagaaatgaggctgaaacataaaaacggtcagcaagtgccagtgtgtaacctgactcgagctaaacttgacacaaatcatggaacttggcagagcgttattatcctaatagataacatggctgatgattttcaggtctcgactaacaagctgcaggtgtgaatatcagcaccaactcatcatggaagagcttaacgagtttcatgattcacgaagcagatctatcacttgaaaaaggtccaatcaatcaagatggatttggtggcgggatgtctagcttagcgagctaagatgctccaaagttttgtgtaaaatgtagatggaaccttgttacaagtaacatttcttggcagcgatgccgttttcaggtgttttttttttttgttgcttcactgaagttttcttgagtcaatatatcttattttcccagaccttaagtgatca

SEQ ID NO: 22312 - DNA, 7302 bp, Zea Mays
gcggcgagctgcttttgcaagctctgatgcttctgccgcagagttgacaagtatgtctctggtgcaagtgtgctgaagatgaaggagaggagctctttatgtgaaagtgcagccgatggaaactggggtttgaaatataaaaggaaaagaagcaagttaaccgttagcccatctaatgagaatgaggctacctcaccaacatctgactctccaatgagccatggttccaccaaaaagaagttgaagcatgacactaacatttctccatcagccaagaagataagaggacacgatgggtatttttttgagtgtgtagaatgtgatcttggtggcaatttgctatgttgtgatagctgtcctcgtgtttaccacttggaatgcctcaatcctcctcttaagcgtctaccccctgggaagtggcaatgtccaagatgccgtccgaaaaaaggtagcttgaagatgttaggtaatgcagaggttggcacttctaaacatgaaaaaagtacaaggacatatgcaggtacgacatcaggtagtccaccttcgcatacaaaagtctcctttaagaccaggaactccacacaagacaaaactggatcaaaagaacaaggaaaacagtcatctggtggcacaatgatgggtggtgacccgaataatgaagttgagaaaaagaacacattgatattacatttgaagaagcactcaatgaaggaattatcagagaatgctaaacctttgaagtcaaaatttgttggagagccttcagaagagaaaattgttaaacatggaagtgtcttgaaactcaagaaacattcagaccgtatggacttgtctccaaataaatctaaaagcagggggcaaaatagtcagagagagagtaaaaggcctggcacaaaaaagcttaaatattcaatgtctgatgatgacagtgtttcctcatcagaaccatcgacatctcttgataacaatgaaccaccaccaaaaagaaaaccctcagatggaaaagcaccttcatccagtaccaagaaagggaaaaagaaagtgaagttcattgagaaaaggcactctgagtgtgtggtaggagacaaaacaacgacttcccaggaggatcagcaggtcgatcgcattctaggctgtcggcttcaaacaaacaaaatcaacccactgtcccatgcttcattcaagcagtttgaatcagctaatctccaggtggaagatatggctcttccgcttgcttccgctggcattcctaataaatctcatgatggaactgagtcttctagaaatggtacagtcgaggatatatgtgctgatgaatcagccaatcatagtggtcacagtttggaaatgcagaaggataggaacagtaaatcccatgaaaacgagtcatgtaaacgagaacaaggcaataatatattgtcaatatgttttgttgatgagaccagtataatgaaagatgatcaagtaggcagagagaatgttgcagcttccaaaaagggtgaagatgcgacatatgatttacctgcagaaaaggatgataccaaactaccagtcactagagctgatgcaatgaccaggaccaatcaagagcatacagatgagagcaaacagcatgggaaaataaagcaaataacagataaagactacaatgatgctggatatgagttcttgatcaagtgggttggaaaatcaaatatccacaacacctgggtttctgaatccgaggtaaaaatattagcaaaaaggaaactagaaaactacaaaacgaagtatggaacgagtttgataaacatttgcaaggaacagtggtgccagccacaacgagttattgctcttcgagcatctgtagatgaagtggaagaggctttaatcaaatggtgtggtctttcttatgatgaatgcacttgggaaagattagatgaacctacactgatgaaatatagccacttggtcactcagttcaagaattttgagtgccaggctttggataaagatgtggtaaaagattatgcaaacacaaggaaccgacatgagcttaatgtgttagctgatcagccaaaagaacttaagggcggcatgctcttccctcatcaactagaagcattgaactggctacgtaaatgctggcacaagtccaaaaatgttatccttgctgatgagatgggtcttggaaagacagtgtcagcttgtgcttttctatcatccttatgttgtgaatttaaaattaatttgccatgtcttgtcttggttcctctttctacaatgcccaattggatggctgaatttgcatcttgggctcctcatttaaatgttgtggaatatcatggttctgcaaggtcaagatctatcattcgccagtatgagtggcatgcgggcgattcaagccagattggcaaaacaaagagatcgtacaagttaaatgttttgcttaccacttacgaaatggtgcttgttgatgctgcatatcttcgttctgtctcatgggaagttcttgtagttgatgagggacatcgccttaagaattctagcagcaaactctttagtttacttaattcgttatcatttcagcacagagttttgttgactggaactcctttacagaacaacattggtgaaatgtacaacttattgaacttcttacagcctacttctttcccttctctgtcatcatttgaggagaaatttaatgaccttacaacagcagaaaaagtagaggagctgaagaaacttgtagctcctcacatgcttcggaggttgaaaaaagatgcaatgcaaaacatccctccaaagacagagcgaatggtacctgttgaactgacatcaatccaggctgaatactaccgtgctatgcttacaaagaactatcaagtactgcgcaacattggaaaaggtggcgctcaccagtctttattgaacatagtaatgcagcttcggaaagtctgcaaccatccttatcttattcatggaactgaacctgaatctggttcacctgaatttttgcatgagatgcgcataaaggcctcagcgaagctaactttgttgcactctatgctaaaaatattacacaaggaaggccaccgtgtccttatattctctcagatgacaaaacttcttgacatccttgaagattatctgactttagaatttggccctaaaacatttgaaagagttgatggctcagtatctgtggcagagcgccaggcggcgattgctcgctttaatcaggataagacacgttttgttttcttgctgtctacacgatcatgtggacttggtattaatttggcaactgcagatactgttatcatatatgattcagatttcaacccacatgctgatatacaggcgatgaacagggcacacagaattggacaatcgaatagactcctggtttacaggcttgtggtacgtgctagtgttgaagagcgtatcttgcaattagccaagaagaaactgatgcttgatcaacttttcgttaacaaatcagaatcacagaaagaagtggaagatatcattcgctggggtacagaagaactctttgggagtagtgacagtgtggatggtaaagatagcaatgaagcctcaggttctgttgctgatgttgaatttaagcatagaagaaaaaccggtggcctaggtgatgtttatgaggacaaatgtattggtggttctaccaaacttgtttgggatgaaaatgctattttgaagctgcttgatagatcaaaccttccatcatcagtggccgaaagcactgatggggatctggacaatgatatgcttggtactgtgaagtcaatagactggaatgatgagctgaatgaccaccctggtaccaatgaggatattgcacctattgataatgatgggagtgagttggcatctgaatcaaagcaaggtgctactaatcgtttagaagaaaatgaatgggataaacttttacgtgtcagatgggagcaatatcaaatagaggaggaggcatctcttggtcgaggtaaacgtttaaggaaggctgtttcttacagagagacatttgcaacacttcctaatgaagcattaagtgagggctctgatgagggagatgaaccaaagagagaatatacagcagctggactggtcttgaaggaaaaatatggaaagcttcgagctagacaaaaggaaaggattgcgcagcgacacattatcaagaactatgctgttgataatcttgaggagttcatgactccatatatctctattgctaatgaacctgctgaaaatcctttgataatcgtagaagacccaagttcttcacagctatgtggtgctaaatgtttcagtgaatcaactggagaaatgaggcaatcctccaagaaatcaaggagatattctgaaatccctcaagatctttatgccagaattcctgataacgctgcttcatccaaggacaactcaaaggccaccgatgtcttcaatccagggaccccaaatcacctgctacctgtacttggcctttgtgctccaaatgctgatcaggtgaactcatacaaaaactcaatttgtgcaccaagcataaaggagcataaaagggccagtggtgacgtagtcaacaaacaactgtcaactcccgctgaccattctaatgagcttagaaacgaagttcaatcagcttctgataaggtcatctttcctggtgcatctgaggaagctttgcgaaggataagtaacatgatcccagataattattttcccttcagtcatattcctcctatatcagggaaggcggttgatcctgttgaatatattggagcttcgaatgcatcatttcaagggaaactgggtcttccaaacttcagtctggaagacaacactccacttaagcatattaagcctatacctgatatatttccttacctgtcactgggtgctcataaggattatattcgtagttctgtcccagagttgccagatagttcattattaccaaacttcatggcagatattgctggtacttcaaagcaaaaatcattcatgtctggtccacttcctgggctgggtcttagcccaggacaaccaatccatttgactatgcctgataatcacaagaaagtcttggacaacataatgatgcgtgctcagtatgcctcaaacaaattcttgaagaagagatcaaaactagattattggtcagaggatgaacttgatgctctgtggataggagttcgtaggcatggaaggggaaattgggatgctatgcttagagatccaaagttaaagtttttgaacaaccgaactagtgaagagctggcctcgagatggattttggaggagcaaaagattatagatgaacctatgtctgcagccacaagacgttctaactcaacagcatttcctggaatatctgatgcaatgatgtctcgggcgctcaatgaaagtaatttatctaagatgaggatggagcagcctaaattgcagtcccacgtaactgatattcagttaggttcgagtgatatcctatccagatttcctcatgttgaggctcctaattacattaactcaggggagggtggcccacctcagataccatggcaggatttcaagcatagatcaagttatggtggtgattttcctggcggtgcatttgacaagttggagaaacctgatgttggactgatcccgccatttatgcctaatcctttcatgactgatagcattgattcacttcccataaacagaaaaaacaatagttccattccgcgtagtgaaatcagatcaagttctcgtgagaacattcttttttctggtgtttcggatggacaaatcaacttgcttcatgagatgcagcgtcatgtgaggtcaggcaaacaacccattgagataaagctcaaccacatagaccactcaaatcctcagcttggtaatgctagtgacctcggaggtttaaaatcaaacaagttacctcattggcttcaggaggctgtacgtgctcctgcttcatctaagccacctgaacgtgggctaccagcaactgtctcagcaattgctcagtccatgtgccttcttcttggagaacaagaaccatcaatacctccattcttgatcctgggaacccctctttctcccccaaaagatccaaggattaattcaaagaagaggaaactccgcaaagctcatcaatctacctctcatgtaggtgattgcatcgctacccaagcacccccatccgttaaagcttcagctgctcctcttgctgtcgattgcaatgatggtgcgccttcactcaacttgaactctgcattgctgtcatcttcagctgtaagcaagaagctagatgagttacctcccacatttaaagaatcaaaccaaaccatggatggttcagaagctgttgcaggcaagttggaggctcctgaaattggttgtcaggtaactggttcctctccagtagatgacaaagctagagaatcttcaggatcaccagtgaaggatactcctgatgctggagtcagattgcaaggatcagataactcagctatggcattttctgcactcccacttgaagcacctgtgacaagcagcagagcagagcctgtggcatgtgatggcagtgacatgaaagaggatattccactagacgctgaaagcaacgggaacctggaggagcgatgaactggctcctcttgtgaacatggatgcatcacatcaagtatctgctaaaacgtcaacggagattggatgaaatgttctcagatgagcattagacttgagccagttagctcgacattcctttctcttccgttgagcagaatactgggattttccctctcccaatgtttccagtgttgatgatctcatgttgtgtaatgctttagtgcagagtgcagataggataaaattcaacgacaagtggtgcttcttagcagtagttgggcactagtccgtcgggagcaactcttggaaacctgtatacaagaaatgtatatttttgctaacatggtgttggttgggtgtgtagactgtagaccgctattcatttatttatgcgtatatggttcagtaatttgccgtctgtctagcggtcgctgtaagagtagacatggtgatgataatacctcgccttgagtggtggcctgatagaacatgaaactcactttccccagctgttattgtttgataattgtagcggatgcctttatggttggactaaagagaaagctgagatgttgtgtttacttcgcaaaggagagtttttactgtttttgtgggaaaccctatccctcacaaggggttgtgtaatgtatatatagactgagttagatgagtcag

SEQ ID NO: 22313 - DNA, 1639 bp, Zea Mays
ccctccgtttctcctggctaaactacctctcgctccctccggctccgatccagggtgcgagctgagcttgggctagtttagtctccccaagctcgtggcgcagcagcagactcgttggtggaggtggattagtagccaaggctttgcagctaggtagggttttgtagctagttcctcgcaggctcagctctctcatactagctagcgtcggtcagtcgggcgagcaggccaatggtcatggcgaacccggacatgctgccgccggggttccgtttccacccgacggacgaggagctgatcctccactacctccgcaaccgcgccgccaacgcgccgtgcccggtcgccatcatcgccgacgtcgacatctacaagttcgatccatgggacctgccatccagggctgcgtacggggacaaggagtggtacttcttcagcccccgcgaccgcaagtacccgaacgggatccggccgaaccgcgcggcggggtccggctactggaaggccaccgggaccgacaagcccatccacagcagcaccaccgccggcgagagcgtcggcgtcaagaaggcgctcgtcttctacgagggccggccgcccaagggcaccaagaccaactggatcatgcacgagtaccgcctcgccgccgacgcgcaggcagcgcacgcctaccgccccatgaagttccgcaacgcctccatgaggctggacgactgggtgctgtgccggatctacaagaaggccagctgccaggtgccggcgatggcggcggtgccgcagctctccgaccacgaccaggacgagcactgcggcttcgacgataacccgtacgccgccatgctcctgcagggcgcgtcgtactcgtacccggcgccgccgcatgccgcggccggcgcgcagaggatgcccaggatcccgtccctcacggagctgttcaacgacccctcgctggcgcacttcttcgaggagggcggcggcatgcaggacatggcgcggctcagcaacccgcagcagcagcagcagcacgctcctctcctcggccgcgccgtcacgagccaacagctgctgctcaacaacggccacagcatgcccggcggggggcaggcgcagatggatcctcatccgcctgctgctgccgcctcgacgtcgtcggccgccgctggcaacaacaagcgcaagagatcgagcactactactgatgccggtgcgctgtcgtcgagccaggcgtctgaggccaagaaaccgaacgggtcctgtttcggcgcaacgttccaaataggcaacggactgcaggggtcctccctgggccaccaccacatgccgcttcactctaacatgggcacgatgaactgacagattattgctgttgttctccgctgaaagctatacttgagagcattcaattgtgatttgaaacatcgggatctattgcaccaaacacacacacacacatatatataggactgaagtatgctccatataaagcaagggttaatatatataatactagtacagtagataaactattcaaggggattgacggatttgtacttgttgtggagtccagtaggagtgtgtcaactagctagttgctagggacgccatagttattgattggggtttgcggtgtgaaaaaaaa

SEQ ID NO: 22314 - DNA, 1791 bp, Zea Mays
taaagttggtgattttccctgcatgcccagctatcagggtgatgactttttctaaggctcgttgatgcaagggaggtcaagccgtctgtgattctcttcctgaagttctatcccgatgccgtccatcacgcactacgtgctggatcgcctcctagagacacggtcgcctgttcatgtccagaaggtggttcccaagcctccgcccccgcctcctgacaaggccacaccggtgccagtgtctactgccaggacacggtcgtcgctggcatcactctatgccacgcctgagaacaccaccctgccggacttgccttcctcgttcccgggaacctggtcgccatacctcatcaaccataagaggcggggagcctcccttgccaggaccttctctcagggtgatgctgggagggaggtcagccagccaaacctccctgtgatgctgcctgctttgccgagagggtgtgaacccactcaagtccaggagcccgagtttgtgtttcagcaagcaggcaatggtcaagctgaaggtgaaagtgctgtagaagaggctttgaatggcaaaagtgtaatgctacagaaaggcaaggggtctgttatagctgaaatagagcaggagcagcctgagtttgagttttgtcaaagtcttgaagcattagtgaagcctgttaatgttagaaggcctttgaatggtgaggcacccaaaatttgtgagagtgacacctttgaatggcggaagcctagttcacctcttggaacctctgttggtacaccaggtgcagaattctacgatgcatttgaagaaatatccagtgacggtggaactcggtcatcgcgaggcatggatgatgacctccgtgaaatgaggttaagtctgttgatggaaattgagaggaggacacaaacagaagaagcacttgagatctggcaacaggaatggaagaacctgagtcaccacctatctcttgttgccttatcactaccatctccaagtatagctgaggattctgattgtttaaaggtggatcctggagctgagttgtgccagcaaataactgtttcacaacttgtggctgctgctattgctcggggttttgctcgtgctgaagttgaatcagagatggaaactatgattgcgacaaagaactttgagattggaaggctgtcggatagggtccagtactatgaagctgcaaacagggaaatgtctcaaagaaaccaagaagctatcgagatgtcaaggcaacaacgcaaggggcgtaagaagcgacagaagtggttctgggcttcagttgggcttgcagtcacccttggcgccacagccattgcctggtcttacgtaactccgtcgcagccccaggccagtgcagatccaagtagtgctgccagccagtaagctactaagtaagctaggatgaagacatactcctcgttccagaagcctaacaaagatctagctatactcctatagagggaaaaaaatgctgtataagttttctctttggtgatcggccgtgatcgccgccgcaatcttgatctgtcgcttcgtttgtagaagcgttgtatggcccatctcgtagatggttgagcaaataacacaatggatgtgggcgtgtggctatggttagtgaaccatgcccgtagcccactcaagcggagtttattttgtcaagttcactttattatttatttatttatttttgctcttccgaaatatgatggatcatggaagtcgtctgccgagcggaccggaccgactggttctggggcctgtggctgtggtctgtggagagg

SEQ ID NO: 22315 - DNA, 806 bp, Zea Mays
gtagcgcctgtctcaggaaaaaagcacatccttggttccgaggagttgcatgggataaactttatgaaatggaagcagcatttaagcctcaagtaaatgatgaactggacacacagaatttcatgaaattcgaggaattggaaaatcctccagccaaaacaggctctggaccttcaaggaagaagtacaaagcagtagagcactagagcgcactagtattactgctgtaagtgctgtttgtcctcggcaaatttctgaactaaatcagcatgcaaacgcctggatgatgtggctccagctggataacctgctcatttttagccaggtttctgctttctcaatcgtgggcaagcggtttgtagaaatccaccagagtttctagttgtaaaatagtattccacggactttaacaaaggtcccatgtactaagggctcatcatcagacaccgggacagtttttttctggagaaattgcaccttgcggctggctgcccaggttggtagagcaaattgcggccttctcttgtggcagttcccggtccgctaacatttgatcagggaagggaaataagatggtgttgttgcggcaggaattctcatgggggggagttagtgttgttgtttgatatgtatcaggaattttcacatttgtagtagggtttctgttagcatattttagaaacatcctttttgcagagttgctatttctcattgatgtatggaaaacaacataatttggagatcgaagctcgatctaacttttatgctgcatatctgatctagattacatcaaacatgattcatcc

SEQ ID NO: 22316 - DNA, 1324 bp, Zea Mays
gattttaagaatttattctgtgtggccctgtggaatgtgtggatgagtcggtgtacctttactgtaataattctcggtagaacggtggaaaggattgttcacatcttatggtgctccgctggtgggtaggcaactaggcatatataaggcctgtttagtttagcttttttctgactattttttctaagaatctggatgtggagaaaatctgactgtgggaagaatctgaatatcgtggggattacacgcggaggaagatgaagtggtccaaagggtcaatgatctagaaagcgatgtatttctaatatcgtgacgactcgaccgattatgcgttcatgttgattttggacggtttttaccaaaacaattcttatagaagcggactgaaaagctggggcgtttggcagtccgcaacagattttggtggccggaagttgaaaaaagcccaaacaaacagggccacagtatggaaatcagtagctctgtggactgtggtcaggaaaaagaacagccaacaaataaacgtccaaggtcagaaagtactacagaatcaagcacaaaagcatccagggagaaaattagaagggacaagctgaacgagagattcttggaattgggtgccattttggagccagggaaaactcctaaaatggacaaaacagctatattgagtgatgctattcgtgtagtaggtgaattgcgtagtgaagcaaaaaagctcaaggattcaaatgagaatctccaagagaagattaaagagctgaaggccgagaagaatgagctgcgagacgagaagcaaaggctgaaggccgagaaggagagcctggagcagcagatcaagttcctgaatgcccggccaagcctcgtaccacaccacccagtgatcccagcctctgcgttccctgctccccaggggccagcagccgccgccaggcacaagctgatgatgcctgtgattggctaccctggattcccgatgtggcagttcatgccgccttcagatgttgacacctctgatgaccctaggtcttgtcctcctgtggcgtagaagccgtgcgaaatcctgttggaaagaggcgatgctgccttccattgattcaaatcttgatcggtccgcagtgttgttggtgtagttgattccagaactgaaggggatgttacatgtgtcggacggtgacatggggtgatctgatgacccctttgtatattatatatggtatggtataaataaattccgcgaccagaagctaatgtggatcggtggattagcttatgtctattcttgcctgtttggttatgttcctcctcgcatgtgaaaactgac

SEQ ID NO: 22317 - DNA, 698 bp, Zea Mays
tttttttttgtttttttgaatgcaccagtggcaagtgctgttgcctcaggagatgtggtctataaccactttgtcttccgatttgattttaaagactggaagctcatgaaaggggttgttccagagggagaagagcttatgccgcacaggtcctctcagaccatagccaacacaggaggaaacaatcctacccagtctgaggcacctttggccacaccaagcacaacgatcaggaagctttgcaggaaccgtggcctcatcttgcaagatgagttgatcgcgacaggtgcatatggagtcatggaacaggagatgttagccatgggcacgaacgacgccatggaagatgagatggtagctgccatgggtgtgacggaagctatgggagagaagaggaagtacaagcgcaagcgtctgttccaggacgtctgatgcgttgatccagctgaccgttgctgatggtgtacatgtctaggtagtaggtagagatgccaacccggctcacttcagcttagcttaccttagatgcatttgggtcaaagcaccccatttggtatgggttatggtggctcttggaatggctgagcgtcacgttattttggaggtgttcttaatgttagtttctggcgtacttaagactgaagtaaccatagtgaaggtgttggatgcttgggttgaattgcagcgctgatgttgtc

SEQ ID NO: 22318 - DNA, 2668 bp, Zea Mays
ccacactgcagagccccctcttgttcgcgtccgaaccagattccccgtcccctctagggttacgcccactctcccccgccgctccggcgatgtcgtcggagcctctacccgcggagtcacccgaggcgcccgcttccgcctctggctccccttcgaaggacgccgtcggcactgaggctagagctgttagaaatctgtgggttggtggcattagcccatcgatttcaaaggaggagcttgagggggagtttctgaagttcggaaaagttgaaggtgttgcattctcccaagatcagacttcagcatacatagattttgagaagcttgaagacgcaatttctgctcacagatccttgaatggaaaaatgctaggtggcaaggaattgtgtgttgatttccagaggtccaagggaagagcggaatggtcagaagctagcagcttcaatggtagagtaccagggccagtgggtgataagagaggcagtggccctctgaagagttctgctggagtgcggatgcgagaggcacagcctaccaatgttctctgggttggttttccaggttcttatagagtcattgatgaggaggcacttaagcatgccatgtcagtattcggtgtcgttacgaagataaaagttttccagacaaggcagtatgcttttgttgagtttgcaaatgttgcggaagcttgtaatgctaagatgaatctagatggtcatcttttcaatgatcccaggattcagattcttttctcaaacagtgggcttgcaccaaacaaattggacaacccaacatcggttgctggatttcctagttcagaaatctattccagtgatggtcgtctaggccctggtattggcagtggaactttgcaagggtatgatccaccaagaggaggaagaacaagatattacgattatgcgggtatgcctactccaggtggtatcctttcacaacctgaaccatttgatccaagagaagcaaaaagaatgaggcttgctgctggtgctgacccttacgatgtaagggcaggcagcacaggtctttattctgctggataccgtcatcagggcagttctgtgcacgctgagggaagctcaagtcctgttattcgagtccggggcacagtgcatcgtacatcatacattgagcactgttggcgtggcagtattgccaaaggtggatcccctgtttgtcgtgctcgttgtttgcctataacaaagggcagtgacatacctttaccggatgttatgaattgctcagctcggactggattggatatgctggcgaagcactacgcagatgccactggatttgacattgtctttttcttgccagatagtgaagatgactttgtttcttatactgagttcttgcgttacctgggctcaaaaagtcgggcaggggttgtaaaagttgatgcagggactacattatttttggttccaccatcagatttcctaacaaatgtgttacaagttgatggtccagagcgcctttatggtgtggtattacacattccacaaatctctgctgctgctgcactgaggccacagttaactgggaccgaacaacaaccttactatgatgaaaggggaactctgcctacttcacaaagaaagtatagtatcatttctcctaatgacagtggccaccttgatgctgattatcggacatctttgcatgaggattcaatgcatcggttggggcatattcctggaaggcctcgggtggatgaaggacaagcagttcaaccagctcttgcaggttttcctgctaatcaagcagctgggctgcaagtacaatcttcactcaagcctgacattatggctacattagcaaaacttctgcctagtgtgcaatcgtcaccgctggtaagtggtcagatgaatgccatagacagaacatcgcagatacaggatccatccatgctttcaaaagtatggaatcctgaaaaccaagttactgcttcaaattcatcctttgggcaaatggctaatgttcagcatccaggacagcagtttagtggccaagcttcagctgctcatttgacaaactatgggaacatggtgagtgctcaggagcgctcaatacaacatactgcttacaaccctgaagttactttgaacttgccaccaccacctccacttccaacaataccacacagttctgctacattacagtctcaaggtggccacagtttgccctcacagacaaaccagcaactgtatcagccagagcagtattatgtgccccaaaacaactatggtccattagttccagttagccattctaaccttcaaatcagcaacactaacaaccccacccttaccatcccacaagtgaaccctggacctccaacaaataatcagattgggaatttggcccagccacagcattctatgccactgcatgttgatagagcaagtcaggatttctcttctcaggggcaacaacaaaatcgtggtcctggtgctgcacaagctcccgaggaggataaaagcaagaagtaccaggcgacactccagttagctcaaaacctactgcttcagttacagcagcgtggatctggaaatcaatcctgagacctaattattgcttcagtggcccttttcggaccaaagtgaagctgggctgaatattggggcgcttgacacatacggtcagg

SEQ ID NO: 22319 - DNA, 1466 bp, Zea Mays
acttggtgatgttatatctgctcttgcaacgaagacctcgcacataccctttagtacaggaattcgaagctaacgcacttgctccaagactcactaagtggagattccaaaaccttgatgttcgttcaaatcagtcctaatgagaacgacgtgggtgaaactctttgttcgttgaacttcgcgagcagagtgcgaggcatagagcttggacaagctaaaaagcaagtcgatattggagaattgtcaagatacaagctcatggttgggagggccaaacaggacagcaagaacaaagatgctcagattaaaagcatggaagaaaggatacagatacttgaagcgaagaataagaccaaagacttgctcacaatgaatctccaagagaagatcaaagagctggaatcacagctcctagttgaaagaaagatagcacggcagcatgtcgacaacaagattgcccaagaccatctgcagaagcagcacggcatgaaagaagagaactcgtactcgagaagcccgatggccgagaggaacctcaactccacagcagagaaagcagcagcgcctaaagacttggggggcatctcgaagcagatgttctccgacagcaacactgacacttacagcttcaagcagctgatgtcactaggggacgagaaggagaacgaccctgaagctgctgtgcagctgccgccgacaacgaaggccaggcgagtgtcactctgcaacggtggagctcaccagcggccgttgaacccagcttcacgcaggacgtccctcataccgctgccacggcgcaactcgctgctgccaatgcccgtagcaaagcctgcagcagcagcagcagcggtgttgccgcttgacaagatcactgagaacctgtcctcgcccccgctgtgctctcctccggctgtatccaacgacaagggcagccggagtaggaggatcaacagcatactgcggcgaagcctgcagaagaaggtagtcatccggccgtcgctggcagcgcaggcagggaagaaagccgccggtgctgctgctgcccggggtactgacagcgcacgcagggcggcgcggcgggtgcctgtgagcgacggcgctggcgggcaaaggtacagcagaacagggacaaggagcgggggtggagcaacttctgaccagaacatcgcggcacctctattgttaaagaagcctgtggagatttaggtgtttattttgtacaaaatttaggtgttattatttggttgggtttgtgagttctcgcgtattgtgagagaactcgaccgtttgctgctgaccccgatcaggtcaggtttttacaatgcttccagggactttgtgggaggctgggagtgttcatgtaacgatctcttatgctgattactgacacagtggacagtgctttcccgatgcgagaagaaaatttgcagggattttttttcgggtaaaaaaaaagtaagagaaca

SEQ ID NO: 22320 - DNA, 1903 bp, Zea Mays
  misc_feature (1902)..(1903): n is a, c, g, or t
gagtattgttgtaagccgtcggactagcagcttactcgtaacggtaaagccaccgacccaactggtctcgtagccgaactgcaagagggaagagaagcatcgcatctctgagtctgaaaccctagccgcctgtctccctgtccggtctccactcgtccgggcgacgagacgacgacggagggtttctgcgggggatttgtttgtcgctgactcgccggcgaccaagatgaggccggttttcgtggggaacctagactatgatacccgccactcggagctcgaccacctcttctaccgctatggcagggtcgagcgcatcgacatgaagtcaggttgcccgcccttgcttttgcccacccctcgttttgtcgtcgtgttcggtcgatttaggttcgatctgatcttattgtgtacctagtcagctgttatatcttgatgtttgaatttcattgaattgaaggaaaaaaagtgagggaattcccccattctgtataaaaaaataaaaaatgagggaatgagcacgtttgtacagtaattgttttgataagattcatcatccaatagtgctgtattagttgttccagttattcttggttgattagctaatgatattgttgaaatgattcgtcatctaagttttgaacacgttataccactaggaaatcttttgccgtacagaacttggatagatgtgtttttaaactgggattgaagttgaaatgagtaagatactctgatactttgcagctgtgctgtactcgtgttacatctacttcataaagagcacagacttgcatgtgtgtgctgctccatgctaactggagttgcagtttgtgtaatagtaggcacagaagttttaatttttactctggcgcaggaactaccagggcaaaacatagctccccagggctcctcaactcctgaaatttcttccattcactgacctggccacctttttttcatttgaaaccatctgttcatgtgccctgatgcccactgttatgtctgctcgagcatgtttagcgggattgtgattcatgctatgtcatcagcaccatcatgccttaccatgtcacgatagaagtatcaccaacatgacaacatgctatgttactacattgataagcaagagagttctatttatggtgaagcatgttcaatgtctccggtcataatttcttactttggatataagttgttgaacaccattcttagccctcatcatgaatggagtctaccacactagtgctcttcatgccatcagaattatgcaggctttgcttttgtctactttgaggatgaacgtgatggcagtgatgccatacgtgctcttgatggttatccatttggccctggcagacgcaggctttcagtagagtggtcacggggtgatcgagctgctagacgtgatggcaacaaaccagaagtaaatactaagccaactaaaacattgtttgtcattaactttgatccaatggacacaagagtcagtgatatcgaaagacactttgcaccatttgggaacatatcaagtgttaggataaggaagaactttgcttttgtccggtttgaaacactagaagaagcccgtaaggctcttgaagctactcatgctaccatgcttttggatagggtgatttctgttgagtatgcctttagggatgatgatgaacggagtgataggtacgacagcccaagaagaggtggtggatatggtaggcggggggatagcccagcgtacagatcacgtcctagtccagactatggtcgcccagcaagtcctgtatatggttcgtatggcaggagcagaagtcctgttcgtgaccgctatcggaggtaatgccctaggattattttcattggtttgcatgttgtcttgttgtccatgtcatatgatcatann

SEQ ID NO: 22321 - DNA, 2017 bp, Zea Mays
gttcaaggggaggcgggggagccacggcggcggagggaattgtttaatcccccgtcaccgtctcctatcgccatcaccccacccgtcccccttggtccaggcgcaggcgcgagcgcgacgtccggcgtccggcttcggcggcggagtggagcgatcccgatccccacaaggaattccatcgctgtcgtggcgtttggtggcgctcctcccggccggcaagcaggatcaggaaatcgcacggaggtgaggatacacgggtgcggaacgagagctaggcgaacctgtctggtacctcgcggcggagatggacgagaaggcgacgatggagagcaagctgtcctcggcggcggccttcgtggaggggggcgtgcaggacgcctgcgacgacgcctgcagcatctgcctcgacgccttctgcgacagcaacccctccacgatgaccaagtgcaagcatgactaccatcttcagtgcattcttgaatggtgccagagaagctcccagtgccccatgtgttggcagcatatcagcatgaaagatcctatgagccaagagctactagaggctgttgaacaagagaggaacatccgagctaatccttcacgtaatactgctgttttccaccatcaaatgctgggtgattttgagatccctgtaggtgcagatgatgcagaacttgaagaacgcattattcagcacttggctgccgcagctgcagtgcgtaggtcacaccgtcatcataatagaagagatgggcaccagagcagatcagaagcaagtagccacccacagtttctggtgctctcagcagacgagcgcacaatctcaggtcaagaaggggactacgaacaagcatctgctgtagcttctggccgccctttacgtacacttgttgaacaagaacgcactcgagggttagcggatgcttccagtccatctctccgttgttctactcctgctgatagtactggtagatcaaacaataggatttctgggatcgaatctacacctgtggatcaagacggaactggaccatccgctttacaatcaatggcagtacagggatttcataatcaaagtgcaagtggatggagggagaggtggttttctcggagcaactctttactggatcttggttctgaggtgaggagggaggtcaacgcggggattgctgcggtgtctcgcatgatggaatggcacgatgcaagggacgggacgggagcggggccttctcctacctctgcatcaagatctggttctcagtgaaacactctgcacttgaaaggaccgatgcaaatgtaaagattaaggcaagctgctggaagcgacgtgccaagtggctgggctcttcggtcagcggtcgcgattcgcaagctgccagtagacggagaaggggctgtgataccgaaagacgaacgaactgaactggtgggctggggctgccctggagaggcagagggagccgtccacattattacttggtttctttcttttttttgtttattattgagaataatgatgaatcaggtcaggtgggtgggggatgtggctgtaaactcggtgggctgtcggtgtgtccagggggaaaaaaagagagaaaaggcagcgaaagaaattgtccatacatgaagaagcccagggtcgtcgtctgtgtataggaagggattaaaaaagatgttttgttttcttctgtctttctttgctttgcttgtgttcccgttttgacaatgagaaatatcgggtaaacacacaaccttccctattatacatttcccttcattttattatacatatatactctctctctctctctctctctttctttgtcaagaatgcaacagtccgggcagtggggattgaggaatcttcaggaggatctagtttttttttatatcataaatacaatcaggtgaattcctactttagatttattggaggagaatgataaactctacatataaaccagagatgctccaactcagaagctgctggtgctagtatagtattgatgaagcagga

SEQ ID NO: 22322 - DNA, 684 bp, Zea Mays
agaaaaatggtggactagatacttccagatcgaacggcccataaagccacaacccggaaacgcgcaaagcgaagagggaaggggggatatcggggaaaaaaacgcaaggtaccaccgtaccagcagcgcaaaggcggccgccatggcggatcagttcgcggattcggcgaacaacgtgatcatcgaggaggtgaacaagggactgaacccaggaatggtggttctgctcgtggttgccagcttcctgctgctcttctttgccgggaactacgcgctgtatgtgtacgcgcagaagacgctcccgccgaagaagaagaagccggtctccaagaagaagctgaagagggaaaagctgaagcagggtgtctccgcgccaggggagtgaacagacagggatgccgccgatcggcccgtcctgagcccgccccctatttacatgattgtcgaagaaaaaagatacacctgctggagccgcggtgttcgtagtaattttgttctgtagatgctttttgttgtcttcgatggtagtgcatttgtattggacaccttgtttcagcaactgatgaatctttagcctaaaccgagttactcttttgttcctgtaaactacaagtacttcaaatgacgctggtgatggtgaacctgagtaaaattggcgagtcccagctcccgcctactcttctg

SEQ ID NO: 22323 - DNA, 843 bp, Zea Mays
gttctccaaagcttccatgtcatgaatacatatacaagaattgaacccttcacattccaccaacatattggtgaggctgttttcattccagctgggtgtcctttccaattgaaaaacctccagtccacggttcaattggctctcaattttttgtcacctgagagtttgccagagtcagtccggctgtcccaagagatccgttgcctgccaaatggccatcttgcaaaactgaagatgcttgaggtaaaaaagatctccttatacgcagcaagttctgctgttagagaaattcagagaataacccttgatcccaagttcaatcttgatcctagttttgaggatcaaaatttgactagggcggtttcagagaacttggcaagagtaaacaaacggaaggtatcttgcagttgagattgtgggggcctggtgaaattatgacatgccattcagaggattgaagtagatatagtgcttgtacatgtattatattgtgtcatatgaaaggaacacattctaattcttattgggttacacattgactttacctgtatattgtgggttaggaagagtaacagttaagcttctgaggaacaagataaaaaggcgctggaaagctcatgtagaattgttagcacaataatctctgttggtagcatctgaagaataattaattagaccgaaattgttacattgtgaacacagggttcaagatttaaatactatattttcaccacggttttgcatttgtgtcaacctgcacgtagtaacgtctaaattactatagtgtttcaaaccaagtgccttttttatatatagcatgatttatctagaaaaatcaaaata

SEQ ID NO: 22324 - DNA, 1227 bp, Zea Mays
gagcgagcagtgaccactgcgccacattcagaccacaccacccaccgcaatcaggagcggagccaaggaaggagggggcagcgggcggcgacgaagcagcggcaatccgacggcgcggcggggagggggtgaggcggcgccctgagccgtaaaggagccggctttcgtagctcttcctgggagtgaccttctccgacgaaacgaaatggcccatcaaggaccaggagtgcctaagtttggaagttgggaggatgagggcgatcacccctacacacagtacttcgaaaacgctcgtaagggcaaatctccaggcagatctgctactcagaacgagcacagaactggagatccggaagcgctcttcaaagaagacacgacgccatctgctaaagcttctcccctgcggactgggtcggaggatcctgtggcgccaaagcccaaggacgcggcctttgctcgaggcaagccgtatgctgagccagcaacccataaacacggtgctaataccagctatgaaagaaaaaccggcatggagagatcgcctctgcatcctcaccaccaagcaaggctcgtaaacagaggaggtgtttcgtctccttcatgggaacgcaggggttcgtccgaaggaaaccgtggagctgcgcccaccacacctgggaggtcgtccaagatgaggccaggcggccgtggagacgagacgcctgagagaggatctgccgtgcccaagtttggagaatgggacgagaaagatccctccacaggtgaaggcttcaccgacatatttaacaaggtgagggaggagaagcagtccggcgatgctcctgtcatcaccagcggcaacgcaggtggtggttatagccgctccaaccaaggccgcaaatacgaatcttcagcttgctcatgcttcagttggttcaggaactgatgcttccttgcatggttgctgatgcttctgctggttcagcagctgataggtgccgttgaagatttggatgaaccagtgccgatcgtatcattttcacatgagctgtagtcccatcgtgttctccctgttgtgatgctgtgtggtagcaggacgtgccagaacttgactttgagaagctgaggttcagtagtttgagctgtttttgcaacatgcggtttgtttctccatagaatagaatccttaaatcaacatcctccctcacaagaatcctgaaatcgctgggatttttattttattttatt

SEQ ID NO: 22325 - DNA, 185 bp, Zea Mays
caaattttaccggcacggccctgccggtgcctcggagctttggattggctgggcgcgcgaccagtctctgccatcaggccgcgaggcagcaacaacctccttcgctggccgatgaccgtcttcgccgcggatccagcttcccacgtggtcggcttgcttcccgtcgtcaccattggtgagttccc

SEQ ID NO: 22326 - DNA, 1371 bp, Zea Mays
  misc_feature (1)..(2): n is a, c, g, or t
nngaattctccgatgcaaattggaattcttttgcagtgcatcaaaagatggcttataatggacagtatgggtttggatcttatggcatgggcttagaagataaactggggttgtatccatcttcatctggtacactgagtcaggacatccagatgagtgaagagcatagcggagttgtgaagaagaggaaaggagtggaggactgtgtcacattgttgcacgatgcaggtgatcaacaaacaaaaggttcgcctcagccagaaaggaattcagtggaggaggggaaccgaaagatttcgcccaaaatgcaaagcaaggaagattcttctgatggtgatggtactaaagaggactatgttcatatccgggcaaagcgaggccaagccactaacagccacagccttgcagaaagactgaggagaaagaagataagtgagaggatgaagcttcttcaagatcttgttcctggatgcaatcactggcaaggcagtcatgctcgatgagattatcaactatgtgcagtcattgcaacgacaagtcgagttcttgtcaatgaaactcgcaactgttaaccccgagcttggctttgacattgagcagatcatatccaaacaaatgctgctttcacaagacagacatcttgctttctatggagtcgaaccaggatcaagcggccttactggcccatttaaccaaggaatcatgcagccagaattgatgtgcaccattgccaatcccgttgatgttttgcacggagctattcacgacgcgtcaacaatgaaccatataccttctatgtgggaaggacttcagaatatgcctcagatgaacttcaaccctggcgtggcagccgatagcggcaccaacaactctggctccatgaagatcgagcagtgagcttctgtatagctccggaattgttctgtgaatcatgaatcgtcgaaaagcgctcacggggtggagtcttttttgtatagctggaggcctaaccattcatgccggtttccttctgttgcttccatactgtgcgacacattgtttatggtacggcaaatgaggatcatgtacagctggagctggaaaactgatgccactgtaaatttctgctgtgttttggcctgtggaaattgggatggaaacctattaccatccatgaaatccaatggcagaagcttgttggaactagggaccaggtgctgaatgctgatgggccaacatactagaatggaatagtaggtacaaaaatgcagagtttgaagcctctttgtcggaaattccatggaacatgcaatgtaaggtttcatcatgcaatggaaggaaactcattattgttaatacttgttatttcaaacgtgtgatcataattttagt

SEQ ID NO: 22327 - DNA, 1658 bp, Zea Mays
ccactatctcccatttccctttttttataaccaaaacatgttctccattcgacctgagagaatcggaaggcatccatccaagtaaaccctgctgccgaacgaaggagcagcaaagccaccttccttctccaccacatcacctcacctctctcagtctcacgccgcagtcaccaactcgccacgcacgccttcgccgcctataaccggtaccggccaccaccactagctcccccgaggaccacaccccccaaggccccaagcccacgacgcgccacgccacgccgccagctgtcgctctccctcgcccctccccgctcctctcgccgcctcgcaatcaatggcggtggcgcggctgtgcgcggcggccgccgccgcccggctgcagccggcgctcgccgcgggcgcccgcggcctcgggacggcggcggaggtggccgcgggcgccaggtgggagcccatgggggcgcgggagtactacgactaccgccgggccatgtacggcgacatcacgcacaaggccatcctcgtcgacgccgccggcacgctgctcgccccaaccgagcccatggcgcaggtgtacagaacgataggccagaagtatggggttgattactccgaggatgagattctgatgcggtatcgctgggcgtatgcgcagccttggggtagatcacgtctgaggtatgtcaatgatggaaggcccttctggcaatacatagtgagttcatctactggctgctcaaatctagagtactttgaggagctgtatcaatattacacaactgaaaaggcttggcatctctgcgatccagatgctggacgtgtttttgaggcattgaggaaggctggtgtcaaaacagctgtcgtgtccaattttgacactcgtcttcggccacttttacaggcactgaaatgtgaccgctggtttgatgcagttgctgtatctgctgaggtcgcagcagaaaagccaaaccctacaatattcttgaaggcctgcgagctgttaggagtgaaaccagaagaagtcgtgcatattggtgacgaccgtaggaatgatctatggggagctagggatgcaggctgtgatgcctggctttggggcagtgatgtttactccttcaaggaggttgcggagaggatcggggttgaggtataggaagaagtcgctctcctgagccgcaagaagactcgtccttgtacatagtgttagggcgtcctgtacatagagacaaaatcctgtgtgcgactgtgccaaggccttctgtagcaaatactgatgtacatctttgcgtttgaatgttcgttgcggctgtgacctgcagaatagacctttggagacccctgcagcatctttcacgtttcatatcctgaagcatcatcagcgtcaccaattcatttttcatgccttcatgtattctggcgctgagtttaggccgagatcgcctgcaaaaactgctccgactgctctttttttttcatagaggctgcatcatctcgtgaactgagaggtgctcccactgccctcttttccgtgaatgtgcttctcggttttgtccgtcgcacgtgaatcaagcaaaagaatctgcgcaagtgcattcacctgctgtgattcagcatatagaaaattttcttgctcacgcatgcagatcgacgagttg

SEQ ID NO: 22328 - DNA, 2504 bp, Zea Mays
ttttctttgtactctagtggtgaaatactttttgaaataattatgtgatactgtaatatgggctttgcagtctactggagcaactggaatctattgagcaatctttgaatgagtctggcttagaagctctctcatcctttctgaaaaccaaaaagaatttagaccaactggaagatgcaaaagatttggatgaaaatggcggcgttcacgttttgctgaagaccttgctgtcattatcttatctaagatcaattctaatgaagggtctggaaagtggccttagaaatgatgctccagatagtgctattgcaatgcgacaaaagtggcgtctttgtgaaattgggcttgaggattattcgtttgtattgttaagtagatacatcaatgctcttgaagctttaggtggatcagcttcacttgcagagggtcttcctacaaatacaagtctatgggatgatgcccttgatgcccttatcattggcataaatcaagtttgcttttcaggttggaaaccaaatgagtgttctgcaatagtgaatgagcttctttcttggaagcagaaaggtctatctgaatttgaaggcaatgaggatggaaagtatatttgggcactgagactcaaagccactcttgatagaacaggaagactaacagaagaatactctgaagcacttctttcaatattccctgaaaaagtcaaggttcttgggaaagcccttggaatacccgagaacagtgtcagaacatacactgaggctgaaattcgtgctaggtctcgaaactttgcactgtacttttaaaagcaactcgagcagttcttgggtcgtctgtgtgggatgttcttgttcctggagtggcccatggagccttgatacaggttgaaagaatagctcctggatcattgccgtcatccatgaaagaacctgtcgtgctagttgtaaacaaggcagatggagatgaagaggtcaaagctgctggggataacatagtgggcgttgttcttctacaagaattacctcacctatcacatcttggtgttagagctcgtcaagttgggtgcatcatccaataatgttgatctttcagttgtatcaaacaaagatgactgtgctgccatgtcttcagagccatccgctggaggagatctatttgcacagcaattctcactattgactacagacaagaagttagaattgtctgagggaccttcacttcagcaaaagagctatacttccgtagcaaatggtatgtctggtgtgctcgagctttcagaggcatcgattgaatcatctggtgcaaaagctgctgcatgtggaactctttcggttctttcctcaatgtcaaataaagtttacaatgaccaaggaactccagcagcattcagagttcctgcaggtgctgtgattccttttggatccatggaggacgccttgaagaaaagtggatcactcaaatcctacactaatcttctagagaggatcgaaacagctcaaattgaaaatggtgaacttgatagcctatcctcgaagcttcaagcaactgtttcacttctttctccatcggaagaaatcattgaatctttgaagaaaacatttgatcagaatgttcgactaattgtgagatctactgctaatgtggaggatttggctggaatgtctgctgctggactctatgaatcaattcctaatgtcagtctctctgaccctagatcctttggagctgcggttggacaggtttgggcatcattatacacaaggagagcaatccttagccgtcgagcagccggtgtacctcagagagacgcaaagatggcggttctcgtgcaggaaatgctgcagccagatctctcttttgtgcttcatacaattagcccagttgaccatgatcccaaattagtagaggctgaggttgcccctggtcttggagaaaccctcgcttctggtacccgtggcactccatggagactctcatgtcacaagcttgatggcaaagtcacaactctagcttttgcgaatttcagtgaagagcttatggtgctcaactctggccctaccgatggtgaaatgagtcgtaggaccgtagactacagcaagaagccgttatctgttgatgcaacctttagggagcagtttggtcagcgccttgccgccattggacagtatctggaacagaagtttggaagtgcccaagatgtggaaggttgcctggttggccccgatatatttatagttcagagcaggccacaaccacaataaacaaaaagttttgtgtggttacctggctagctgaataaaaatggatactggctgaagaaatatatggacttcgtagcacgcgtagcagtgatcgagtcttttttaatatgctatctcaggtaaaataataatttattggcacaggtttagccattcactaacttgtatcaattttgtgaactaaagaacttactattacatgtgggagccacatgctattctatttcgatggtacctattttttcgact

SEQ ID NO: 22329 - DNA, 198 bp, Zea Mays
ggattgtttgtgttccttaggatgaaaagagcatcacagggaactttgcagtaaggtcccaccatgcttccaatgaaaatatattcttgcagttagaagccatccttcctcaggataacccctgagctgggcagtattgcaaaagacaacctctaaccacaagatctaagcagggctaagcatttttgtaaatcatat

SEQ ID NO: 22330 - DNA, 1134 bp, Zea Mays
atgggtcccctgtgcctgtggcctgcgccacacacacattcctctccaccgtccccactcgctgccgacactccagtgtccagtcgcccacgtacccggcaccccgctgccgtgcccgtgctccatcccgctccgtgtcccaccaccacgcggccttcgctccctactggccacggtgtctcccgccgcagcggatcccaagggaagttccctggcctttccgtgcgtcactgctcgctctccgcctccacctcttttagtgcggccgcctgccagtgcggtgtccactgtccagccagccatccaggcccaggagcgcgagttctgtgcctgtgcctctgctccacctcccctgcccctgcgccccaagtccacgtccaccacttagcactcacgctgctcgctcgctcgctcgtacacgcgcccgcttcgcgcaggaaccgtgggagggaagcggacggacatgatgcacgccaagtcggagtcggacgtgacgagcctggcggcgtcgtcgccgcctcggtcgccgaagcggggcggcggcgccgccggcaacggcggctactacgtgcagagcccgtcgcgggagtcgcacgacggcggctacaagtcctcgtcgatgcagcccacgccggtctacaacagccccaacgagtcgccgtcgcacccctcctacggccgccactcccgctcctcctccgtcagccgcttctccggcaacctccgcaagggcgccgccggggaccgcaaggtgctcaacgacaaggggtggcccgagtgcaacgtcatcgaggaggagggcccgtacgaggacctcgccggcgatagcggcctctcccgccgctgccagatcatactcggcttcctcaccttcgtcctcctcttcaccgtcttctgcctcatcatctggggcgccgcccggccgtacgagcccgaggtcatcgtcaagcggtaggcgagatgggttacatcaccatccaattgattggtggctcagttggacagtgatatgttggacactaatgaggaacaagacagcaatgcagattgggattttacaattgcaagctgggtgtgggtgtgattttggttttgttgctcagatattgcggttgcgagtaagtggtgaacccg

SEQ ID NO: 22331 - DNA, 3534 bp, Zea Mays
cgcaggtcaactagtcttacaccacaggagagcaaccgtttagagacttcgggtaagacacgagcccaataccacggccctgccagcgatggccacattggcgccaccggcggtggaggtggagccggaggccgatgccatggccctggcgtcggaagccgcggcgcctgagctcccatcgtcgcattcgcagctcgattttttcaagaccagagttcaattattgtgtgaaagtaacacgagagattttgatgcttgggtatcattaataaatgctgcagagggaacatcagcagatgacatagaagttatgagcttggtataccataacttcttgttggaatttcctttgtgctacggttactggatcaaatatgcagctcataaggcacgactatgcacaaccagatatgtaatggatgtttatgaacaagctgtccatgctgtacctcattctgttgatatttgggtcaactactgtgagtttggtatatgtgcatttgaagaacctgctcatgtcagaagtttatttgagagggctttatctcttgttggaaaggactatttgtgttatcacctgtgggacaagtatatagaatttgaaagctctcagaagcagctgattcatcttgccaccatttttatcaacacactaaaatttcccacaaagaagttgcacatgtattatgaaagttttagaaagtttgtaacattattggaacaagaggtgacaagttgtgttgctgaaatattatcagaaaaagtgcatgcttctgaaatggtaggcactgaaggttctgaattagatatatcaactattattgctgacttatttgaccaaaaaggtgggcatcttagtcctgaagcattgaagcattacttatctgctggggagaagctctacaaaatgtccagcaagatttacaaagaaatctgttatttcgaggcatccataaaaaggcctttttttaatgtcaagacacttgatgatgatcagcttgaaaactggcaccagtatcttgactttgttgagaagaatggggattttgactgggctgtaaaactttatgagaggtgtttgatcccttgcgctaattattcggaattttggatccgctattcagagtatgttgacgctaaaggtggccgagaaattgcaaaccatgctctgggtcgagcatcatcatgttttgcgaaggaggttccagctttctgcatgtattatgcgttgtttaaagagcaaattggtgatgcactggttgcacgctctgtttttactaaaacaagaagttacttcacttcagggttttatgcaaatattaataggctggccaacatggaaaaacgaatgggaaatactaaagcagcttctgagatatacgagacagcaattgaggatgcaatgcagaagaacaacatagagttgcttcctgacctgtacagcaattttgctcagttcatatatgtggcaagtcatagcattattcaggctaaacaagtctttgtcgacggaataaatcgtgcaccttgtaaaccattgattaagggattcatacagttcatgagtacacatggagggcctaaagacatacctcttcttgattctgttatttctaatgccgtgactccaggatctgacgtatccacagctttaagcagagaggaccgcgaagatatctcactgttgtttttggagtttgttgatctctatgggggtattaaagaactcagaaaggcatgggctcggcatagtatactgtttcctcacagcactgggaacatttcacgacattattctactatggggaatagccttcaagagactaagaagaggagaaacacagaacctttgatgattgctcgtgatcattctttagaagatacaatgaaactgaaacagacactcaaaaccgatgatttttctcttatagttgataaagagagtgagccacaagtagacaaggacattgtggattcaggaaaaagacatggggatgcgggagcgcagaaagctttagatttggtcaattcacacaaagagaccatcacgacagctcaggaatgcactgacatggtttacagtgaacatatcctggacaaaaacagaatagagaagcaaatgaattcacatgccaaagaagatattaatcaagacctaatcttgcatgaacaaaatgatgagaaaacaaattctcatgaggcggagactcctgtagctgagtcaggtgactgtgattctccttccaaagcaattgctagctctgagaacatcaattttcagggcaaggtcattgaggtatctgcaagcagccatctagaaacagtatgctcaaaatatgactcgccgtctggaccaaacatgcacaaagaaggaagttcttctggtccagctcgaatatctccagagctggaggaaaggcaccatgtggaggttcaggtaaaagtcgacacagagcatcatttttctgtcagtaatgcaaacctagagatatcttttgatggtccaaatccaactgaatgtgacaaggaaatctctgccattggtcatgggagtcaagactatattcaatcttcgcagtcacatcaactctcagcctgtgcaaaaccttggagcttggactcagcgaaaacaaaatcggatactgtcagtattcaagctcaacttcgaaaccagttggagaatgctcaaacatatcaatctaataacctttcacaaaacatgcaacaacaagagcttacaatgcctcacaatgttcaaacatctgcacaaattcaagatcaattgcttgcacagcctaatcacagaaaccaacagtatctccaaatgatgcaagggtatgcaacacaaatgggggaatattaccaacaacaactgtattacctgcaggctcagcacaatcaacagatgcagagtctgcaacagcaacagctcccgactgagcatcttcagcaaacttttatgcagcaagtacagcagctgaaccagcaattggtactttggcagcaacaagtgcaacagcagccacaagtagtactgcaacaggcactgccagttcagcaacttcctgacgaaaaacagggtcagtgtccttccggggatagcaaacacggccaaaataaacagcagcaacaagcacctcaaatggatcaacaaagccagcagttgcagcaacaacagcttctttatcttcagcagcaacaacaaatgtatcttatacagcagcagcagatgtatcaacaacagcaagctcagcagcaacagctcttacagcagcagttaatgcaacaacaacagtatgtactgcagatgccacagcaccagcaagactcagttcggcagcaacaacagcaactgtttgagcaacagcagcagcagatgatgcttcttcagcgacagcaacaacatattatgcaacaacagatccaaccgtacgtgcaacagcaacaaaaccaacaagggcccaaggatcagacttacaagtcaaatcatcaggaaggagatcttgtcttcattgctttggggaccatagacat

SEQ ID NO: 22332 - DNA, 2913 bp, Zea Mays
agttctacttctcatcatcaccctggcccaacttggcccatacctcttcgatctctcagtctcaagtatggtagcttcggcagcgctccgccgggtccgctcctcgccgcacctacggcacgccgtcgcgtacgtatcttacggcagcgctgctgccacgtccgccgccgtggggctcgagcgcgcacaggatccaaaccgcctcatcgttgacctggctgcggcggggcgcgtgtgggacgcgcgcaagctgttcgacggaacgcccgagcgggacgtggtgtcctggacagcgctggtgtccgcgtacgcgcggcgggggatgctgcgcgacgcgcggtcgctgttcgaccgctccgacgcgcgccggaacgtggtgacctggacggcgctcctctcgggctacgcacgcgccggcctcgtcgacgaggccgaggtgctgttccagcggatgccccagaggaacgtcgtctcctggaacacgatgctggaggcttacgctgtggcgggaagggcgggtgatgcctgcgccctgttcgaccgcatgccagtcagggatgccggctcctggaacattctgctggccatgctagtgcggtcggggagcgtggataaggcgcgcgagctgtttggaagaatgccggagagggatgtaatggcttggacgacgatggttgacggcgttgcgcggagcggtaatgttgacgaggctcgattgttgtttgatagcatgccagagaggaatgtagtttcttggaatgccatgatatctgggtatacaagaaaccacaggcttgacgaggcactggatttgttcacgaagatgccccatagggatattgcttcttgcaacattatgatcactggttttatacaaaacaaagatttgaagagggcacggaagctctttgatgaaatgccagaaaggaatgttgtcacttggacgaccatgatgaatggttacttgaaaggcaagcagagcgagctgtcattggggttatttaggggtatgttaatgtcaggtatcagaccaaaccaagtgacatttttgggtgcacttgatgcatgcagcgatctggcgacactatgtgaagggaagcaggtgcatcaaatgatatgcaaaacagcatttcaggttgatacttttgtcggctctgccctgatgaatgtctatgcgaagtgtggtgaagttgggttggcaagaaagttgtttgatctttcaagggagaaggacttgatctcttggaatggaattattgcggcatatgcacaccatggtgttggcatagaagcaatccacttgtatgaaaagatgcaaggaaatggatataggcctaatgatgtcacctatgtggtgttgctctcagcatgtagccactctggtttggttgacgaagggcttaagatcttcgaatcaatggtaaatgatagatcaattgcagtgcgtgacgaacattatacttgtttgattgatctttgtagccgagcaggacgacttgatgatgccaaaagattaattcactatcttaagattaagcctgcatcaggttctgtctggagtgcccttctaggcgggtgtaatgcacatggaaatgagagcattggcaatttggcagctagaaatctcatacaagcagaacctgataacgctggaacctatactctcctatccaatatctatgcttcagctggtaagtggaaagaagcagcagaaattaggtcagagatgaataatcgaggactaaagaaacaacctggttgtagttggatagaggtggcaaataaggttcatgtgtttgtagcacgtgataagtctcacagtgaatctgatttaatctatggtttgctgcaaaatatccattacatgatgaggattgttggaactgtccccagtgaccttgtgcatgttgatgaggaattgatgatgtagtgtatattcagttacaagctgaagtatttcatttcaactgtatggattcagtcaaacaaagtaacatccagcattcaatctaagggcaaccctacgaaaacatcaggtagcaattccacttacatcactttgaggatacaagtacagtgtattcgcaaaaaaggttgagtatgatccccggttgattcactacaggcaacttttggatgtgttctgggcaagtcatgacccacgtgaggtgtttgggcaagggccagatgttggcaaccagtatagatctgtcatcttcactaatggaaccatcgaggccagattggctggtcttagcaaagaaaaagaacaagctaaagaccgtagcagcgttgttaccacacagatccaaccattgggggtctttcatcatgctgaaccagaacatcagaaatttgaactgaagcgtaaaccgttcctcttgcaattgattgggaatttgccggaggaggagctcctgacatcaacactagctgcaaaactgaatgcatatgccgctgagctctgccctgtgaatacccaaaagagaattaactccaagattgatgaggtcacaaagaaaggatggcccattttaagggacatttaactctttctagcttttggactgaaaccgatcgatgcaatgtagacacagaagaggtgcatgattttgcaaagaagatttttaggaatatttcagctgttcgccactgccatgatgacctcaatcatccattcttcattttgctcacaaagattatatagttggtcataacatgtcgttgtgttactatatttgtaacgcatattcatggttcgaagcttactcaacagacaactttttttcgtattgtttgtttttcatttatgaaaatatagatgttttgtttttatttaataggtattgtgcatgttgtgactgatgttgtactagtaaattgctcgcgcaaagtactgttaaattgaagatc

SEQ ID NO: 22333 - DNA, 906 bp, Zea Mays
tattcatcatgaaccttccactgttataagtacttgatctcatcctccatggacaaaactgttaagctctgggacatcactaccagtacctgtttgaaaacattctctcatacggactatgtgacttgcatccagttcaaccctgtagatgataacttcttcattagtggatcactggatgagaaagttcgcatttggaatgtccgagatcgtaagattgaggattggaatgatcttcatgagatggttactgctgcttgctattcccctgatggacaggttgcgatggtgggctctcacaagggaagctgtcatatatttgatacatctgagaagaagcttcagtacaaaagtcagatagatttaagaattaggaaaaagaagtcaggccagaagaagataactggcttccagtttgctcctggaagctcctcggaagttctgattacttctgcagattcgagaatacgagttgttaacggcgatgaatttgttcacaagtttaaagggtttcggaacacgagtagccaaatctcatcttctgtagctcataacgggaaatacgtgatctgtgccagcgaggattctcacgtctatgtgtggagacatgacaacagttcccaccctagcaagagcaggagcacagttgacgtaaccaactcatacgaacatttccactgccatggtgtgaccgtggctgtcacatggcctggtgctgaagcccgatgttcgtttggacctgaaagcaacaagcacagtgattcatatgtggcaatgaactctggcccggacctcccagttgagaacactcggcacagctctgatgcatctgatatcatatgcaacgagagcccagcttgccaaggcgtgaccagcagaaccccagcagacactaggcgacggagc

SEQ ID NO: 22334 - DNA, 2017 bp, Zea Mays
ttttcccaaccgcggatttcttcgagattgctttagcttcgtttgtttcccgccgtttattttttttctcgctttcattctcgggaaatcttgggtcttacttgcgactattcagtgccgttctgtatgcgtccttgattcgaattcgccgcaagttttcggttttctgcacatgcggtggttcctggacgagatctgtggccggagccgcaacaatcccgcctgaatttttaatctttcactgagtttgggtcaccacgccaacgccatgatggcgaacgggaggttccagaagcaggcgttgcttccgccgcggagcccgttcccggtggcggcgccgcacgccgagctcggcccaatcgcgcggccgcgggagacgccccaccggcacggccaccagcgcacgtcgtccgagagcttcctcgctgacgagcagccgtcgtggctggacgacctgctcgacgagcccgagactccggcgcgggcgcacggccggcctggccaccgcaggtcgtccagcgactcgttcgcgctcttcgaaggcggcagcgctgcggggggcatgtacgagtttgacaatgtgcttgatggcatgaggggaggagggcaggtggcttctttggccggtgcgcccgaattcttccctgagccagcctcatttgggcggccttgggagtccaggcagatgtaccggcagggtggtggcatgccaatgccaggcagggagaagaatggagggcgccatggtccgtccagctcatttggtgagcatgagcttggtcatgtgcccaatggggtgaataggaaggcccatggcgatgcggcttatgaccagaggattgtaatagagagaaaggagggcctgaggcactctcagtcggagactgacaccaaacgagccaaacaacaatatgctcagagatctcgtgtccggaagctccagtatattgcagagcttgagagaagagttcagtccttacagacagagggaatagaagtaactgctgaaatggattttctcggtcagcaaaatatcatgttagacttggaaaataaagccttgaagcaacggcttgagagtctatctcaggagcatctcattaaacgttatcagcaggagatgtttgagagggaaattggccgccttagaacattgttccagcagcagcaacagcaacaacatgtgccgcagcagcaggctcctacccatagccgcagtaacagtagagacctggattcgcaatttgcaaacctgtctctgaaacacagtgatcccagttcagggcgcgacgctatctctggcctccgcatttaagatccctttgttccagcttttggatccctgagctttgcagaacctgctgcccctttatgccactctttgtggttgttagtagcatcatgagaggagcagcaccggtgaaccgggaatctcatcccacggtgaataaagctggaaaggttaataactgtggatctggtccttagttctttcagaatgtgcacctggcggtcatcgttagcttctgtccattattgatgcttgaccagtcggaggtgtttaggatctgtttgcagattgatgacttccatggatccttgtatcagtttgaatctagaacactaaggttctaatccattcctttttagtcgattctctgtcgagtttaggcgccatggcccttgtattagtgtggcacacgaatggaatgtgagctggtcctctttaggttatgccacatcctggaaaaccgttgcgtgaggagttgtcgggccatgtccattgtcctaataagatggtgaggttgaagggctggtgcagttcagtttcattttatttgtgatgtgcacagcaagatattggatactttgggttcttacatttatttgagcactgtatttttatcgcattgtgatgacagtatattccaagttcattttagctgccaagatcctgcttgtgttcgtttcaacatgtcgttgtaggttatatgagatttaactgggtttatgttta

SEQ ID NO: 22335 - DNA, 1590 bp, Zea Mays
gaacatcagccaccagggcaagattacatcatatgggtggctgatgggcgaggttttcgggcagtgggggagaattgcgctgcaggcctccgtcatcataaacaatgttggcgtgctaattgtttacatgattatcattggtgatgtattatctggaacaacatcaggcgatgttcatcatcgtggtatattggagggctggtttggagctcatttgtggaattctcgtgccattgttcttcttgccacagctcttttggtgttcgctccgttggtgagctttaagcgcttggattcattaagatacacatctgcgctatcagttgccctggcagtagtttttgtcgtaattactgctgggattgccatcatcaaactcttcaatggaactgtagcgatgcccaaactttttccagaattagatggtcttaattctatctggaatctttttacagctgtccctgttcttgttacggcctatatctgccactataacgttcacagcattgacaatgaacttgaagacagaacacagatcaagccgattgtgcgaacatcgctgttcctgtgctccagtgtttacattgccacaagtttctttgcttatctcctcttcggtgaaggcacactggacgacgtgctcgccaactttgacgcaaatcttggcattccattcagttcagtcttcgatgacatagtgcgagtgagctatgcagcacatgtcatgcttgtctttcccattgtcttctttgccctccggctcaacttggatgggttgctcttccccacgtcaaggcacatctctcgtgacaacaagagattcgccatcatcaccgtctctctcctcgcagtaatttatcttgctgccattctcataccaagcatctgggacgcgttccagtttactggtgccacagctgctgtcctgattggttttatatttcctgccatggtcatacttaggtaactcaatgtttagttcttggtgtatgttgcctactactagccaagccattttgtatagcatgtaatatcgtggcttgaatttctgcagggattcttacggaatcgcgagcaagcgcgacaagattctggctgtaaccatgatcgtgcttgctgtcctgtcaaattctgtcgccctatacagtgacgcgatgaacatcttccgtaagaaggaagtggcctgatctcagatttcaaaagtagtcagtgctggatgaagaatggtctcgcaatgcaagactcgatggtacgaaggaaaacgatgcgcttggattccgtgaaggaacgatttctttgtcagcacctcagaatttggccacttgaaagaatctgatgcttgaagtttcctggttctgtgtacacaagtcggctcaatgtcagaattgagccgcttgaaatatatttagttatattctatgcggagagtaggtcttggaaacagccttttccacaataatgtacagttattatgccaatttctgagttcagttaaattttgtgaaatatggacatgggcgtcttgtctcgattaaaattgagaatggtatgattgcacattacgtcgctaccatgtttgtttttgccttc

SEQ ID NO: 22336 - DNA, 75 bp, Zea Mays
tgccacactcgatggagtggccttccacgggattcacaggggacaggtagccgaggctgggttcgagcgaggcgg

SEQ ID NO: 22337 - DNA, 3914 bp, Zea Mays
gtctgaaccttggcttgtggcttttctttgggtttcaactcttgtctacctcaacttgcttgggactaaaaggctttgttgttgttggaaccgagttttattgaggtacctccctcctgagattggttccctcaagaagctccaagaacttgacctctctttcaacaaattgaaaaactttcctaactgtataattgagttgagtgcattgaagtttctcaaagtgaccaataataagttggtggatgtaccctcgggaatctcctctttgagatgtcttgaaagccttgacttatcaaacaacagattgacttctcttggttcagttaaacttatttctatgcttacgctgcagtatttaaaccttcagtttaataggctctcccattcctatgtaattccttcatggatatgctgtgacatgaggggaaatgttgaaaatactatgaagggttgcaagttaaagtacacaggtgtagcaaccatgaacagtttagcagaacctagtacatcgagtcatgcttgtgacagcgcccttttatgcgtgcaatcagaatcttcgccaaatttgaaacaccatgctccacataaaattaagaagggctggaggagacgggattgcttgcaacaacgagctcgtcaggaacgtctggagtcgagcaggagcaagctgaatgaaaaatacatagatgaaatggctgtgaacatggctgaagatgaatgcccttctagtttgcatgatatggaaaataagctaggcatcagaacaattgatgaagaaacttcagtacaggattcgttgaaagaaacaagttctatatctgaagatctattttcaatagttgacgatgacttggatgggcttacgaaggattgtggcacgatggtacaggatcactatgatgaggagaaacctggattcaatatgagaggttacaatgatgacaattcttgtatcagtggggagcctgcttgtttcagcagaagcagggtttgcagtgttgaaaaggaactagatgatactgcttcatccgtccatgatgttggtgagattgctcgagacaattcttcagtgacacccaagtttgctttaaaatctaaaaggcaccctgatatggacagcaatcctaaaccaagcaaatgccctcgaccaattgatgaacgctcaaaactttcatataaatacagtgtggaatcattttgcagcatagatgaccatctaccagatggtttttatgatgcaggccgagatatgccattcatgtcattagaggagtatgaaaggagtcttgggctgtatgcacgggaggttattctcttggacagagaacaagatgaagaattggatacaattgcttcttcagcacaattactgctatctagtttgacaaggccaagctcttgtgaaatggaggaagatgcaggccatgatttactgagggcatcagtgctcgctttgtttgtttctgactgctttggtggttgtgaccgaagcgcttctcttgggagaacacgtagagctattgttagcttgaggaaggagcagccttttgtttgtacttgttctgctgggaacttgggcgacaacaatgaagctaagcagaccaatattctttctgggcactttgattttgctggtttgtgtaatagatcaatacatctcatcaaggaaagaagaaattcgggtattgtacctataggttcactgcaattaggtgtttgtaggcaccgagctgtcctaatgaagtatttgtgtgaccgggcggatcctccaattccttgtgagcttgtgaggggccatcttgactatacacctcatgcttggaacattgttcctgttaaaaagaggaatggctgggtaaggatgattgttgatgcttgttaccccaccaacataaaggaagagacagatccagagtacttttgcaggtatataccactcagtcgacttcaaattgtgctcgatgatgagggctatactcctcggtgctctttcccatctgtgtcatcatgcaaagaaattgaagttacaccttctagttctgtctatcactgtaaaattggtgctgttgatgctgctgcaaagatacgatatctggatactcgtagggtctcaaatgatgaagttaaactttttgaatacaagcttctgggggaagtaaggatgctgggtgcgctaaggaagcacagatccatagtggacatatatggacaccaactttcatctaaatgggttcaagtcgatggtgataaagaatataggatattgcagtctataattttaatggaatatgtaaatggaggttctcttaagggatatttgacaaagctactgaaggagggcaagaagtgtgtccccattgatctgtcagtttacattgctcgggaagttgcttgtgcattgttggagatgcacaagaagctagttattcacagggacataaaaagtgagaatgttttgattgatttggaccccaagaggaatgctggtgcacccattgtcaaactatctgattttgacagatccgttcctttgtattctttgtcccatacatgctgtatatctcagcttggtacacacccacctgatgtttgtgttggaacaccttgttggatggctccagaggttgttaaggccatgcatgaaaaacaccactatggactggaaatagatatctggtcatttggatgttttttattggagatgcttacgcttcagatgccttaccagggactttctgacactgaaatatatgatctgatactgaggaagaaacagaggccaaggctaactcaggaactagaagcattctggacaatggatgagccagctacgagactcaagttagggatcacatctgatgctcatgcagataaattgagacacctgatagatctcttctaccagtgtaccagaggacatgcatccaggcggcccaaagctgtgcaaatttacaactcactgtgctccttgcccacatgttacgacatgaggtgaacgttctgatactgtatgaacgcgaaacttgatgcagaagtgcaggggaaggtcaaggcaggacatctagccagcctcagagggtttggtgctctaacccgaacatttcaccgtgagttggccttcaggtgctgccaggcagaacatgagaagtgggaccaaggctagcggctgtggtcgccagagctcctcctgagttggtcagttttgtagcggcacggcatctgcgtccacttgtagtcatcatcagttggtcagttttgtagtggcacggcatctgcgtccacctgtagtcatcatcatgtatgtgttatcacatccattgtttccccttttcatggttgctgccatcacaatggggtttaagttatcaaattaggtcattggtgccccaggggcatttgtctgctagaccgctgcatttacttctctatgtgtattgtattgtttatatctgtttagaaaaaaatgactgttgtccatgtaacaattgatgacatctgctatgtgttattgcgaggttatttgtttatgctgattttaccagccattttcgggcatgagctcttgggaaacctgtatcgtgtacagtctcgacagacaagaatatactgatgaatcttgatttatgtgtcagtcttttcaccatttattatatatatgctcgcctacatttaaaacttagtttgttactttcttttttattaaggtcgacacaaattgattaaattcgttaagatgcgcttgaatacatataacttccggcatacgaatagtataagacgttatttgagacagagcttattagtaagactcttggtcatatataacttcttttttttccacaattttaccgcagactttatattcattacttcacgcaaaacatcaaaagataaacggatctgtaatgtgg

SEQ ID NO: 22338 - DNA, 2520 bp, Zea Mays
ggggatgctgccgaaattttatatatagatgtcagaagtgttgtttagtagaattccggggtgtttgtggaccccggggtgttacacagcaggagctcgagggcaaggccagtgaggccgccctcgccgaggagaacctcaaggcgaagggagagtccttagataggcgagagatggacctcgctaggtgggagacggatctcggcttcagggaggaaatgctcacgcagcgaggcgagctgctagccgagcacgagctcgaggcagagaagaaagaaaaggagttggaggagcaggtccgctagttcaacgcggcacaggcggcgtagggttcccaagaggtggaggccaccaggaaggcccttgaagatctccagacggagcaccgcagcggggtccagcgcatcgccgcgtcggccggcgaggcgagcacggcactggtgccgctagggataagccccatcccggtgtcggagctgcctgcgtcgatctctgaggcgctcctggtgctggactccgccgctaatcgcctccaacacctggaccagatcctcggcgcccgcctagaggtagagggcagcaagctctgctgggcggtgattgagtatatcttgacatgcttccgaagtcacgacccgaccatatctttggagctggtgatcgctggtccggtggccaccactgaagacgccgcccgagagagcgtacaagacgccatggagctggtgggcgagcgcttccagcgcgaccctactgatgacgagtagccgaatctgcatagacaagacaagggtccctctagggagcggtttgtaataacctttggtggtgtaacatacttttgagaaccattaatcaagcagtattagcacttatcttgtatgttatttgtcctcgctgtgtgtagcgttaccaacctcccctggtacttggcccccctgggatgtaggctcgatgtgtcgaggctggataccagtatacctaagagaaaattggttgcccggtccctatggggtagtctctacggtttgagactacctgcgtctggattgggacctggacctgcacacagcttcggttttgaagtgttaggggcacacccataggacccatcgtctggtatctgccatcctttgattcatgcaacaggacctgcaggatttaacttgggaagccaagccgtatgcccggacccacaggatcacaactccaaatactagagtacccgttgcagagtggtggaggtgcaggcttagggtacggaaccaggctaagcggctacacagctccggaccactccaggaaaacgagcgcccattctctagaaaccggacccacaagttgctggaccccctgtagcagtaaaggggtcctgaactgcaagcttggcttactcaattcaaatgtcatcataccagcaagggtgggaactgtatgggtgggttagataaaaaataatatctgaaactgtagcagaataaaaccatcacaaaagcacatctgaggggtaaatctcttccttataacttgatatacatgggtgtagaccaagaggccaggtttacgagggcggacctcaccggattgacatacacatatgcgcaacccagttacaaaggaagaaaaactcaatcccccagttttgcttctatgggtagaacttatggagatgctctatgttccagggattgggaagagacactccttcagttgtggcaaggcggacacacctgggtcggcatattcccgtcacattgaagggtccttcccaattgggggagagtttgtggagcccttctcggttcagtactcgccttaggactaggtccccgaccctgagctccctactatgcacgaaccgttggtggtagcgcctgagtgcttggttgtactgtgcatttcggatcgtcgctcgccatctgtgttcgtcgatgaagtccacgtcctcacgccgtagctgttcctgcatagactcatcgaaagattggacccgtggggagcccataataatttccgggggaagacaggcttcggccccgtagaccaggaagaacgggatctccccggttgctcggctgggtgtggtccgtgtggcagaacctcccaaggtatcgggcccacatgcacctgtcctcgtctcaaagacctcagacggcatgcatgtgcaccagataacttaacaggatccgtccgattgccccaaggacatcggataaaccacttacaaccagaaccgcaggattaagtaacaaaaaaaatcacacacacaatattttagcagccgaaatcttattaccaaattttacaggttacaaaaattttacaatattttatcggagtgattacaagagtataagtttgaaatatatgctagctcaaatgaccatcctcagtaagaagataaagactgggtatacttatataagaaggccgagcccaccggcacttaacaccatcacagcagcacaaagttatatcctgaaaaacaacagggaataaaaccctgagtatggaattact

SEQ ID NO: 22339 - DNA, 284 bp, Zea Mays
tagggtttgtggcggcgggcggcggctgtagctggagccggcgacgcatcctcctcgtccggccagccgcacattgtgatctaatacaatggctagcgatggtgatgcttcacctccacggaagcgtatgttgttggagttgccttgtgatgaagaaggtgcaaatgtgagtcaaaatgttggtgtgtccgcatcatcagccacacctgccgctgctagagattctcaagaacaaggtgaaatttatgatgaacttgttatattgtgtacttgtgttctttgtg

SEQ ID NO: 22340 - DNA, 1242 bp, Zea Mays
tttgtcgtctttgctccccagctctttttcccacgcccatttctcaaaaagcgagggcatgaccgccccggcgtcgccgcactgtttcctagagtaacctgccccgtgtccgcgctcgcactcgcacagacatgcttcttgccgcgtcttgaaaggggagaaagtgaagatgggtgcttgcgcttcagttcacaaggacccggggtaccccaaggagcagtttcttgactcgcccaccaaggcggaagctgcaaacgagaagggcggctgcggcggcggtgacgatgactttgctgatttcaagtccaaggtcgacgctgagcagcagcgggcagagttgaaccccaagagcccggattctggtagcaaggatgaagtgttcttcgaatctcgagcttggttagattccgactgcgaggatgacttctacagcgtgaatggagatttcactccatctcgtggcagcacacccatccatcagcccagagcgcagacggtgatgagcaacatctttcaaccagacacgcacggttccaaatcaccggagccttctccaactggacggaggaagctagctgagctcctgcaggaggcaatgcaaaacggccccgaagaaagcaccgaccaggagctgcagttgcggtctgttgccgcagatgggaagccggtgtctgaatccacatccagctccgcttgcagcactgtgacgactccgatcgcagtcgctaacgccaagagccggaaggagaaggcgtggtacaccggacgctgttgcctgccgagctttgttcatagcctgaccttagatgagagtgagagggcgcagaagatgagctctaggccatgtgctgtttgacagtggggctccagtgccctcacggctcatgccctgagctatactgtaaaggagaagtattaagagtactgtatgtatagagagagggtaatcaagtggataatagctactagttaaatgctctgcacaccatgtttatcaattgcccttacctgtgtatatatatctaatcgaatctcaaatgtcaacagccagctgagctgtcctcttggcacttgcatttgcatgattgacgccagacaaatgtgttgttcattgctccattctattccaagtggaccttttaattttctctaaaaaacaaaagggtctctagctgagttggttaggtggtatgagtagcactacttaggtcctgagtttgaatttcagtggtagtgaatttc

SEQ ID NO: 22341 - DNA, 2301 bp, Zea Mays
agagcgcacggcccagttgggcccaatactcgacacgactcattgaccggcccattacggctgaagggagtcgctcgccgccgcgttcgaggcgttccctcgtcgcgctcgcgccgtcgaccttcaccgctcgctgtcaggtctgacaatgatccagcgagatactacgatggatatagcagattaagaacatgggcatacagttctcttgatcaatataagcacgaattacttcgcgtcctttatccagttttcatccatagcttcatggatctagtggcagaaggacatatgcaggaagctcggtcatttttccatacatttcgggaagatcatgaggtgatgcattcaagggatcttcagaagctggaaggcgtcctgtctccttcacacttggaggaaatggaattggcccggtcttttaggaaaaataaatttaaaattaaattatgtgagtattcgtatgaattgcttctccagtatctccagaaaacacaagcccttgtggtgcttggagtaatcaatgagcacataacttttgaagtatctcctggtcagccctcattaatctctgatgacgctgatgttgttgctctgattgggacaagtaaggacttggcaaaacagataaatcagaaggaagtacattgggggttgcttgaagattctgttgaagagcgaatggagaaggcactagcagaatctgataaaatagaagctgaaagcaaggatgctgatgcagaagataacaagaaaagaaatgcagaaggtggaaagcaaggtgcttctcttaagaaagccaaaaaggacaagcttgttggtgcgactggaaaaagcgtcagaactgaaacaagcatggtttctgtggcacctcgagtgaaaccggagctaactcttccagcaacgcctgttgaagttgaacaatcaattcttgaggacctacgaaaccgtgcacaactgaatagtgtggcattgccatctgttagcttctacacattccttaatacacataatggattaaactgttcctcaatatcacatgatggatcactggttgttggtgggttttctgattcgtcagtgaaggtctgggatatgtcaaagatgggccagccagcaaaaatatcaagatcacagggtgagaatgggccttcccagggtgagcgcatatcaacattagatgaggggaaacgaacctatacactatttcaaggccattctggaccagtttattctgcggcctttagcccgtttggggatttcctcttgtcatcatcttcagactcgacaattagactatggagcaccaagctgaatgctaatcttgtctgttacaaaggacacaactacccggtttgggatgtccaatccagttggccattactttgctagtgcttcgcacgacaggactgctagaatttggtcaatggataaaatccagcctttgcgaataatggctgggcatctttctgatgttgattgtgtccagtggcatgtaaactgtaactacattgccactggctctagcgacaaaactgtaaggctatgggatgttcagacgggtgaatgcatacggatgtttattggtcataggagtatggttttatcactggcaatgtcacctgatggacgatacatggcctccggagatgaagatggaacaatcatgatatgggatctctcgactggccgttgtgtttcaccactactaggacacagctcttgtgtgtggacacttgctttcagctgtgaaggagcattgcttgcatcgggatcggctgactgtactgtaaagctctgggatgtcgcttctagcacaaaaaccctgaagacagaggataccaaaggcagctcagctaaccgactgagactgcttaaagctctccctacaaaatcaactcctgtttatagcctgcggttttctcggaggaaccttctatttgcctctggtgctctctcgctaagctcgtcgtaagctgtgttttttttttgcagaaaactagaactggtcctgttttgacattgagtagtgaagctggcatttcagagactgcctattgtacagctaatattttcattagcaattccaacgaactcagcatgtactgccgaattgagcaccgcagattcgttgtagcgggttgtgatattgtaacaatattattaggtaattacgttctgtaaaattgttttttaggttgtgaccttatgaacgcaactaaatgtacaagtgctgacaggcgatagcgtgaatgcaatggtctatcaggtctggagtttggtttagtgaccaggtaattc

SEQ ID NO: 22342 - DNA, 4137 bp, Zea Mays
gctgcagcagccggaggctcagattttgtaatccatcacttcctcaccagaccccaatcgccctcctccccagctgtacgccggtgtatcccaagacaattgacctccgttttatagcttctcatcacaaccttctctcactacatcccctctctctctctaccctcctaaaccccaaatcagagagatagagaaagagattgaggagaaagaggaaaaacagagctgtagagatagaaagttcggttgagttgagctctccgtcctgcttctggcttcctctctctctctctcactagatctactactgctactagtgtccagtgtccactgcctcggccttgttgctgcctgcgtgcgtgcctttgcccaaagcctgcctgctcggtgcttgcttcgcttgcagctgcagtggcctcacgctctatgcttgctctgccaccatgtggtgctggtcttcgcgctccaactaacctccaccagcacctcacgtaaccgcatcgcaccgcgatgccgaccctggtggcgtcacgcggcgcggtggcttcttccgcgcgcggcattgcaatgccgccaccggtggacgctcccgtgaaggagtagctagctggcccggcggcagtggcagcgggcgaggcgaagggagcggagaggtcgttgtctgttccgggagcgagcgcggcgccgccgacacgacatgttcaagtcgcggtggcgcggcggcggcagggccaaggccacgttcaagctgcagttccacgccacgcaggtgcccgtgcagggatgggaggcaatgatggtggtggtgacgccgcaggacgcaggccggccgacggcgcggtcggagcccgcggaggtcaccgatggcgcgtgccgctgggcggcccctatcatggatgccaccaggctccccgccggcaaggacaagatctaccagttcctcgtctatgagaccgggtcgagcaaggcggcgttgctgggggaggccacggtgaacctggcggactacgccgacgcgttgaagccgtcggcggtgacgctcccgctcaagggcagccccggcacgctgctgcactgagagcggcgacgcctcgccggtggcaaagacgccacagagaagaacgacactgcagaaccagctgagccggtttgaggacgaggacggcgagaaggctagagcggccacggatgcgatgagtcctgtgcaagatggattgttgataacaaaacctccaggcatgaggtttccatcaagaagaaatgtgcctatgtctgttgacccagtgggccatctccacaatggcagcagtttcgatgctgtctcggtgtcaggttcagatgcaagttctgggagatatacccccaaaattagtgcgaccatgcacaactcatatcttcaggatagtagcaatgctctctcaccatttgccaacaatggcactgtgaggaacccattgaccagttcgggtgactggtcaggaagctcagctcctgatgctagtacagatgggtcaacgagcaattctggtgaggcagggttaagaggggaggatgacgacgtggagaagctaagaagtgaaatagccactttaaccaggaaattggatgtctcagatatggagttgcagactctccgaaagcaaattgtgaaggagagtcggcgtgggcaagatctctccaaggagatgagtagcctcagggaggagagggatgcactcagaagagaatatgaaggactgagaggggcaaagaagatgatccatgattcaaatggctcagggaaacggctctcagatgggtatgacccatggtcacaggttgaagaactgaagcaagatctgaatcatgagaagaatctaaatgcagatcttcgtctacaactgcaaaagatgcaggaatctaactctgagctgcttctggctgtgaaagatcttgatgagatgttggagcaaaagaacagagacatttccattttgcaagaggatacacaagaggatccacaggaggcagaatatgagcatgcactgtcaaatgtgcataattctggacgcaaaattgccttatctgaaacgagttcataccaagagaaggaagatgagcttatgctggatgcactggcaaagaagcgtgatgacatctctacctctgagcttgaaaagaaaatccttgagctgagcaatgaaatcgagttgtacaagaaagatcgtgaggatattgagatgcaaatggagcaacttgcacttgattatgagattctaaagcaagagaaccatgacatatcttcgaggctggagcaaacacaactgagggagcagctaaggatgcaatatgagtgttcagctcatttggctattataagtgatcttgaggccaatgtggagagcttggataatgaactccagacacaggctaaaaagtttgaggccgacatagcagaaataatgagtgcaaaggtggaacaagagcaacgggccattaaggctgaggattctctgaggaagataagatggaataatgcaactaccgcagaacgacttcaggaggaattcaaggtgttgtcttcacaagtatcttctgctttcagtgcaaacgaacaacagcttgtgcaagcaagaaaagaggttgcggagctgcagctgcagaagagccagttagaagagttacttcagaaggcccaaggagatcttggatcagttcaggatcagcaccgggtgaaggtccagcagttaataaccctagtggatttcaagtcaaaggagatagacaggctactgatggagctcaaaagcaagagtgatgagttccataaccaaaaaagatgtgatgaggcaaagctgaatgctctgtcagaagaaatcgacctactcaattccaagatcgacaagctatccagtgagagaaatgagctattcgaaaagaatgagcagaaagaaaaggaattagctggaattagcgaaaaggacatgcaattgcaagacaaaactgctgagattacttcactaaataaagagcttgtattcctcaaggaccaagtgaagatgcatttggacgaactgcacagtttaaaacgtttgaagaacgagagggaggaaacaattggaaaactgcaaatagatattgggtcactgaaactccagtgcgacaacttgaaaacttcgctgtccaagaaagagtctgagaaagacagccttgcctctcaggttctgaagctgagaagatcccttgaaacccgggacagggcgaaggcaaatggtcaaatttcagatgtgaaggacaatcagcatgctaataacaagcgcaccaagcacaataccggctccactgggagcattgctgcactgccaggcaccaacagacagggcgaagacggtgactgcaatggtcctgacatgaggaacaccactgaccagtcagcgaaggagctggcctcaatgaaggagaggaacagggccatcgaggaggagctgaaggagctgcacgaacggtactcggagatcagcctgaggttcgcggaggtggaaggcgagcggcagcagctcgtgatgaccgttcggtcgctgaagaactccttgcggtgactgactcgtgctgcttcactcacactgtagctacaaagattttagacgataccggtgggcgttgtacaggtgggcgagcgactggatgggctttttctctccgaagagagaggctccagaccagaggctcggggagaccaggccaggcgagacgggcaccccgggtatgtaccaatggggtgcctgcggtgtggtctgtccgtatcctcaagagttacagtacacagcatgtagatctcgtcacaataacattctttcgttttctttgttccgcattggcgtgtgtgcagtaatatgagttgtaatagttctttcttaccctctctggagtgtgttgtgctgtataatttccatggtgtcattgtgttgtggagaaaggaaaatgagaaggaaagagtggcctgtcagctttatctcagaaatgcttcgttgtgttccaagttcctgatcctgactgtttcatcagtgtggatttgggccttggccctagggtgaaaacatgtctgttgggtaacggacacgaattgacgaattgtgtacaaacaggagcgaaggtagg

SEQ ID NO: 22343 - DNA, 564 bp, Zea Mays
ggcggggacatgcatgcaatcgcaaggcatgggccaggctgcaagtgggtgcggttactgaggaacagggtgtcagctcaacaggctagagagaggaagaaggcttatttaactgatctggaggtgaaggtgagagatctggagaagaagaactcggagatggaagagaggctctccaccctccagaacgagaaccagatgctccgacagatactgaagaacaccgctgtaaacagaagaggttcaggaagcactgctagtggagagggccacggccaatagcactgaatgacggaaaaatagtaatgaatcatgataaatatatgtttatatggagtggatttggtgagcttgctttgtggccaaaggagggaaccccaaaaactggggtcagacagccaagtgccgacggttcagggaaaaagaacttatggaattaatgcatttgattttaacatggtttacatatcatcatcttctactagttttctaaaaatgatgtttgtggatcaaggccagaccaggccgggccgagaaaatttaaggccttagccaaatctaagg

SEQ ID NO: 22344 - DNA, 362 bp, Zea Mays
aaaggctgaagatattgcactaaaaggccccagtgggctagaattgaatgccgttggagttgggctggcataaatgatgccgcttcgcacctctcgacccgtcctgtactcctgtgacctgcatgaccgaggccgctgaatcaacatgggctgcaaccgcaagcctggatagcccagctatcacagcgggctccaacgtctcttcatcaactgtaggtttttctgtacagtttgttttatgggctaagagcaactccaagagaagctataaacttctcaaaaacagatattaggaaagaaaacttatttcccttgctctaacagcctctttaaccttttttcgaaaaattacgcgtcacgca

SEQ ID NO: 22345 - DNA, 1494 bp, Zea Mays
taatagcaagattttgggtaatcttacagagctcaaggatcagctgaaacttggattgaacttaaggtcatacgagaaaatatattttcagttcaggaatgagattggttcttcagttgaagctccagcaactattgtggcatcagtattagatggaagcagcaatcttttaccagatagattgagacaactagctaagctaatcagagaacctgatgcgaggaatcttggacttaatcactctgtatttggtaaagtaaagggtgttcagctgtcatcgtacctgcaacacaaaatctctggtttatctcctagcccatctccggctccatcgccatcacaatcaccttctccaagcatgccgacatccttgtcaccttaccctgcatcaagtctccctggtccagctttagccccttcatggagcagacacccttgctttccatgttttaggtgtaatccctctcctgctggtagttcaacggtaaaacctccttgcattgttagagaccccaggctacctccattaatgcattcaccaaagccacccattatgccttccccgccaaaatacctccctccagcagatccaccggttccttcccatgtagttcctcctcgccccttacctaatcccaatcattttccaaaagcagtttctagacccaattctcaaatgatgccaataccttcgccctcaagaccagtgtctcaacattggaaggccccaaggaaaaaagagaatagcagaacttcgaatttctctccaattgcgccatctccatatgctctccttcacacttgaagttatgcttgattggatgcctgggttgcttcgaatgttgggcatgcgtcatcaggaaaatctagccagaagagagggttcactatggttgcagttctgcttcaagcatgaccatgagtcgcaatcgtgggctatgatgcaaacaccaggctttgtttattggctaatgtaactatatgatgaattctaaagctcttcagatcaggttaattgtagatataggtctatacaatgctaattaaccagggtattacgccacgaaggtggctgccctacgcccttatcaaattttaagttctcaccgaagggttgggagcttatacagaggagaatgtaagcactctattactcggagtacacgttctgcaatattactggtaacgtattggccataatacaacatacagcttctctgcaagatttcatctgttctattgtggttgagcgtttaaccaatacaacatacagcttctctgcaagacttcatctctttggacataaagcaaagagaagacaagaaagcactattgatttcatcgcggtggagtaacttagagatggcaacgggactcgatcccagatttccagcgacattagaaaatagggatgcagaagtttcttccccacaaggatgtaaacagggaaaactttttctccaacgtggacgggaaagcattcttcattccgtt

SEQ ID NO: 22346 - DNA, 2203 bp, Zea Mays
aggcggtggagtatgccaccaacttcaactggaaactcgtaagaggaaaaaaaaacacacccgccccgccgtccacctctccgcctcctccggtgccggcgctggagcggccgacccacgcaatctatgggcaacatgacccgctcaaactcgcccgtctcccgccgcatcgtcctctccttcctcgacttccttaactccgtcgaattagctcctggtgttgatcctgaagctctggaagttgctaaggattgtctggagtccatttttagtgttaactcaacagccactggtgacgcaatacaaccaggactgttgtttgagctatttgcttctctcgaagcaaatgaaagagaccaggcaagagctgctttgctgtcacaatctgtttcaaacaagccatctcaaactgcgggtacatcaaatgtcgaagaagactcaaacaaatgcacaacatcaaatagcgacagccaggtggaggatacatttgaactaggagatgaactatttgcaaaattttatgctgcacttgatgaaatcaatttctttaagacatcacctgctggagctgaagatcctggtctactttcaaaagcaacacaatactttgatgatgcattactgaagttgggaaagaaaagggcaagcttagtagacattgcagagtcctttaaatcaagagggaatgaattcatgagatcaaaccaacaccttaaagcggtagagctgtacacctgtgccattgcattgaaccaacaaaatgccatttactattgcaacagggctgctgcatatacccttcttaatatgaacaacaaagctattgaggactgcctgaagtcaattgaaattgaccctcactacagcaaagcatatagccgactcggatctgcttattttgctatggggaattatcacgatgctctgtacaagggatacttgaaagccgccgagcttgatcccagtaatgaaaatgtcaggcagaatattgaggtcacaaaaaagaaactggctgaacaacgagtcccaccagaagagcagaacacacatgcaggccaagctcaaggaccacatccaatatttacaagtggtggtgttcctttcaatctgtttccaccaggtagttctccagttcaagaattcttcgctggctggtcgtccgatgttggtgcaccaccaccaggacattcgataagtataaatttgaatgatatttttggccaagcaaatgtcaatgctagcggtcaaggatcaagtcaaacagggaattcaaataaccatactccatctgcttctttctcaactggtgctgctgttcctcctccctttgccttctcgggctcaggaaatgaaggaacgcaggcacgccaagcttctaatggacttgaaggggaacatggtgaaccaggcatacacagggatgatgacgtccatataaatttggctggacccgagcaggctgcggaggctttgagagctgtgatgcagatgcttgggccacagatgggtcaacatgagggtgcacctagaggaccaggttaagcgtgggaggtaggaaaatgtgttacgtggcgtattgtggtctgcaggagtcttatacgggacattattttgtcttctccatcctgacgaagaatggagattctcgtgcgccttattattatagcagcttatctgtgtgctacaacaattccaccgtaatggttaccggcgttcaacttatctgccctgttcatattggcgtaggtgtgtcattagctgtgctggggcctgggtcttgttttgttgagacttgtctcgtaatggctgtcggtccatcatgtgatcttaaattaaagcctttttgcccccctcccctgcttttccgctgcttgtcggttcccagttgatacttggaaaatatttgcaaggttggtgaaaaaaaactgtcactggaatgaagttcatcatcgttattggctggctggcttgctggataaatcataaatgttggaattggtaaatcatatcctcttggactggagggaagttattattacgttactaagctgggtatatctaagatgtttggttcacatgtttataatgtgatgtttataatgtgatgggtaactgataacggtaaatcatgtttgtttaaatccaacgtaatgagataccatgctaagaaatgatgttggtttattcaaatttgttaccgctg

SEQ ID NO: 22347 - DNA, 255 bp, Zea Mays
gcgacggctaacgcctgtgcccgtggagcggcggcgggtccgcaggaagccagtgtgcttcgcccgcccgtagtcctagttctctcagcggtggcggcggcggcggcggcgaggagaagaggcgtgggagggagagcaggaggaaaggtagctttggggattttttatatttttttagttctcctctcggaatggtttttgtgcgcgttttagtagtttattttttacgaagtattatttactcgagccgtcgag

SEQ ID NO: 22348 - DNA, 133 bp, Zea Mays
tttcatgagattctcaagtctagcatctcgaagcataccgtggcgcttacaagaaactccaacgatatttaataagagagttacttgatcaaaaaaaccacacacaatcattatttcccttggcaacaacaac

SEQ ID NO: 22349 - DNA, 1044 bp, Zea Mays
tgggaatcatccgacccgagatcgctttccattcccatcgcttctcttctccacacgaactcactcttgagagatagagcgaaacacaaagcaggcaaaaaaaaaaaggatagagagaaaaaatcattctcgtttctctcactccgctatacccccgcccgaatcgatggagattagggctccgccaacgagcctcagtctcgcgccgccgcccgcctccgccagcttccgccgaacaccgcttaggaccttcttccttaacggcagcgtttcacttaaagttgtgcaagtacgacaatcaaatgtcaacagatttaagtgcaatagcatacaaagtaacctctttgatagactaacgagggttgccaggtcctacgcaaatgcagttctaagttcatttgaggaccctgagaagattctcgagcaggcagttctcgagatgaacgatgacttgacaaagatgaggcaggccacagcacaggtcttggcgtctcaaaagcggcttgagaataaatacaaagctgcagaacaagcttctgctgattggtatcgaagggctcaacttgctcttcaaaagggtgacgaggatcttgctcgcgaagcccttaagcggcgtaaatcatatgctgacaatgcaagctccttaaggtcccagcttgatcagcagaagggtgtagttgaaaatctgatttcaaatacccgggttcttgagagcaagatagcagaggccaagcagaaaaaggatacgcttaaagctcgtgctcaatcagcaaagactgccacaaaagtgagcgaaatgttgggcaacgtgaatacaagtagcgccctttctgcatttgagaaaatggaggaaaaagttatggcgatggaatcccaagcggaggcactcggccaattagcaactgacgatctagaaggaaagtttgcactgctcgagaattcatctgtcgatgatgatctttcacagctgaaaaaagaactctcgggaagctctttgtatgttgacttgttcacaagatggaaaggcgtgacggtagcattttt

SEQ ID NO: 22350 - DNA, 4208 bp, Zea Mays
gttggctcgaaccgaggcctccggcagtccggcccactcggccactcccgtcgcggctcgcgaggagagagaagagtaaaagagcaccttcttctccgcgtccccatcccaccacacctccggatcagcagcgaagtagcctgcactacgccggtgcctagtagtagtagcaccgctccggctccactgttgaacgttgaacggaagccagaccggcccgcaccttgatgcccgctcctatggcggcttccaccttccccgtcgccccgctgcacgcgccgccgctggtgcgcccccgggtcgtccctccttcccccaccttcggctgctgctgccgctgctccgctccgcgcggggggctcaccttgcgcccgcaggcttgcgctccacgccgccgctgcaaccccgcgatccgcccggtgaggttctgtgcggaagttggttcggtgtggcccgtggtgctcactcgatcgatcagaagggggtttcaaaagggtataagtgtcgcaagggtggatgacaatgctgctggtcaagtcagtttaggtgatgacaacgaggatttagaccatatcaccaacgaaacccttcgtaccacaataaggaaaagcaaggaagtgctggcaaggcacaagatcataatgaatcagatatcagaaaagaagcagctcatctcaactatactagacagttccattcataatgagcaagagccactcagtggtcagagtgatggttccttatcaaacctgaatgcaattgcaaagggcacagagattggttatgaccatcagacataccataataggtctttacagcaatatgaatttgacaccacttatggagaatccatctacgatcagaacacatactatgaaagttcagaagacgacggcactgatttcagtgagaattatcagtataaaagttttcctagagctactcgtagtgtgtatgaactagaagaagataatggtatgaaacaaggctatgtggtacaactaagtcaagcaagtggacatgagcagtcagttaacgagggaacaaatgacaatgcgtctgaagttgatgttatgaatgtcatattggtagccgcagagtgtgctccttggtccaaaacaggtgggcttggggatgttgctggagctttgcctaaggctttggccaagagaggtcatcgtgtcatggtgtgccttttgtgagctattgtgtctgaaagagatttaactaagctcctactagttggaagtggtgcaagttaacatggaagataaacaggatggttgtaaagtccataaaatcactcattcatcctgtagatggttgcaaaaagatttttttgaaaatgcaggagacgtgtttttttatattaagaacaaaaaaagggataagaacccttacacacaccaacacaaaatcagttcagttcacatggttacagagatcaccaatcctaagccttctactgttccccatccggcacaagggaaaatcactttagttcaactaaagaggattgacaattaagtttgtataggtacctgacattgtggccactataaaaccatattgagtggacaaccataattaaccagctgtgcgagtcatgtgctctatggcctccttatacaaagtgggttttcacaaaagactaagatctattcatgatatgttcagcagaactcatatacgtttgggccaaaaatatttgagctatatagaagcatttttctgcagctcaagttgcctaaattctaagcagtgtacctggatattctgtttttcagttttagggctagattgcaatgttgtgctctgctaccttcactgtgcaatctagttaattgtgggagcctactattctattaaacttttgctttatggttccagtaaaaacataccttcatataattgttatgtccaacattaaaaagtacgctcttgaaaagccacaataccaataggcacagtagtttttctaaaaagtaggagctgtattgttaatcttggttagtgcctcatatgggaataactcatgcagtacattccaaagcaaaccagtgttcttatttgagagaacataggctatgtttctgtgatttttggttagaacaaaactaaattttcaatagctacagttggagaagcatttaaatactaaacacataatcattttttatattttttgttaggtagtagttccaaaatacggtgactatgaggaaccacaagagataggagagccaaggagctaccacgttgcagggcaggatatggaagtaaagtattatcatgcatacatagatggtgtggattttgttttcattgacaatcctgtcttccactatgttcaaagtgaaatttatggtggggaccaaactgacatctggaaacgaatggttttgttgtgcaaagcagctgtagaggttcaatggtatgttccatgtggtggcttctgctacggtgatggaaatcttgtgtttattgcaaatgattggcatactgcacttctacctgtttatttaaaggcatactatcgtgacaatggttttatgccatatgcccgttcagttcttgtgatacacaatatagcacatcagggccgtggcccgatagatgatttcaggtacctggatttgcctggtcattacatggatcagttcaaactttatgatccattcggaggtgatcatctaaacatttttgcagctggtattagagctgctgatcgtttgcttaccgttagtcatggttatgcatgggagctcaaaacacctgatggcggctggggccttcatagtatcattaatgaaaacgattggaaattccagggtattgtaaatggtattgatactgctgattggaatcctaggcatgatgtccatctacaatctgatgggtacaccaactattctctagaaaccgttcagactggtaaagcacagtgcaaggaagcactacagaaagagcttggactccctgttcgtggcgatgttccggtcattgcttttattggacggctggaccatcaaaaaggtgtagatctgatagcagaggcaatgccgtggattgctggtcaggatgtacaattaattatgttgggtactggaagacaagaccttgaagatacattgaggaggcttgagagccagcattatgacagggtccggggctgggttgggttctctgtccggttggctcatcggatgacagcaggggctgatatactattgatgccatcaaggtttgagccatgtgggctgaaccagctatatgccatgatgtacgggactgttcctgtagttcatgctgttggtggtctccgcgacacagtccaacattataatccctatgaggaggttggagttggatggacttttgagaaagcagaggcaaacagaatgatcgatgccctagggcactgcttgaacacatacagaaattactggagcagttgggaaggtatccaacgtagagggatgatgcaggacctaagctgggataacgctgctaaactctacgaggaagttcttcttgccgccaaatatcagtggtgactgttgttgaactgtccaaggaactgttgatatttgtcattcatagacctgaaggctttctgtcgcatagaagtcaccgactgtttcaattcttttggtgactgcttcacacagctgctgcatgctttgtcctgaattttgcaggacggtgtgcgtcgcaacagccaaattttttttgttgttgccagttcctaataatcgcatcagatgtgaatgtgaattctgagtctacctcctggacaaacacagtggatgaggcttttgctggaaacaggttaatgctggaggaaagattgaggggaagcgtcgtgcactttttgcaagtgtttacgaattcatttgttctacagggagagctcatttagacgctttggtacaggagggtggtagatagcagagaaactgatgctttgtatcttgagtagttttgttgtatctctaaattaggatacttgttacaatgttcagttcttcatatttttttccgtgcatatcctgtagatgatttagtgttccggtcttccgaatgatcgtaaaaaaggggtttgcaggttgttgagaataatatataattatgaaagggcatcggaatccctgaacaatactgaagttctctgaaagaaccgaggccatgaatgtatgtttcggaag

SEQ ID NO: 22351 - DNA, 1024 bp, Zea Mays
aaaaaatggtggcacaggagcaaaaccctttgtgagagtgctgtgagagtagtttttcttagctacttatgtttctcttattatgcattgaaaagctagatcatatggagaacttctgtgagtatagctaaacatctggagtctgctaacacaatgttctcatttgtgtggtggataattggattttattgggtatctgctggtggagaagttcttacccgtgatgcgcctcaactttactggctttgcatcgtatttttggcgtttgatgttttctttgtcgtcttctgtgtggctttggcctgcatcattggtattgctgtttgttgctgccttccttgtatcatagcaattttatatgcagtgtcggatcaggagggagcatctgaagatgacattcgtcaaattccaaaatacaaatttcggaagatggaagagcctgaaaagcagtctgttggtgtgcctggatcttctggtggaataatgatagaatgtggaaccaatcaacctattgaaaaagtacttgcagctgaagatgcggagtgctgcatttgcctctcagcttatgatgatggcgcagagctccgtgaactcccttgtggccaccattttcattgtgtttgcatcgataaatggctgcacatcaatgccacgtgccccctatgcaagtacaatgttcgaaaaaacagcagcagcagtggcagcgaagaagtataaatctctatacgagaatattgagaattcatacccaacagttctggcttctcgcagcaaattttttatcccataatcccatgagttcgcattcgtatctgtggcagtgtgatgaagaaaatgatccatgtaaattctcttgttcgtaatacggctatagcaataattctgtgtcaactttgctcgtgctgttctcggtgtgtttagatttttatagtatgtgtacttgttatagaatttctgtagagcagcttgtttgtgtagtctaatgttttataataatcatactagcagtacatgttcttgctca

SEQ ID NO: 22352 - DNA, 259 bp, Zea Mays
ataaaggaactaatagcaattacgatctgcatattaatacattatgatctgcatacaatatttgcatagacttatttacattactcaagtataaaaaacaattcagtagcacaagaaacacaaattgataagaactgttgtacatttgtaagtcaagaaccatatacgatgagtatgtcgtagatttgtaagtcaagaattgctgctaagttcactaataaggagattaatttataatggcaataacttgtggatgagt

SEQ ID NO: 22353 - DNA, 287 bp, Zea Mays
aaatagctggggatttactgagagatcctgtctaggtcaacattggaagcatcgacgaacttgttgcgaacaaatccatcacttaagtattctagtgaaattatgattgtttttttttcatactttgtgcttcacttttctttaggatgcggagtccttgaagtgccattgctgactcgtgtcagaatttctattgttaaatattttggaaaaagcattctttggcacctaatttctatgtgtcagcctttatctctaatattttatgtggtcatttctaggatgat

SEQ ID NO: 22354 - DNA, 1156 bp, Zea Mays
ggaaaccacaagaagctatactagcgatagaatacaaaaaagagccagaggaggaagaaaaaccgtcctcacctcctgcggctccagaaccagaaccggaacaagtgcctgagccagaacccgagccagtgaaagaggaagcaccagaagctgaaccagatttgctgggtctgaacgaacccaaccctgctgcaactgcgatagaagagcagaatgctttggcgctagccattgttccgatagatgatgctccgaaagctgctcccacttttggaaatggagtcactggctgggaactggcccttgtgacagcaccaagttcaaatgagaccgccgttgccccaagcaagaaactggccggtggtctggacttgctgacccttgacagcctgtacgacgaggcgaaccggagagcgagccagccagcaagctacaacccctgggaggcgacccccgccgcgcctgccccgatgatgaccatggcgccggtgatgcacgacccgttctacgcctcgaacgggtacgctgcgccgcacggcgtgcagatggcggcgatggcgcagcagcagcaggccttcatgctgcagcagcagcagatgatgacgatggccccggcgcagccggtggtccaccacccgatgcagatgcagcagaaccccgcgaacccgttcggcaaccccttcgcggccgccggcatgccgctccacgccgggcccggcaacgtgtacacggggctgatctgatccggtccggcggtccatttcttggtctgcattagcgctgctgttaccacatcattcattcttttttgcccgagttttcttgttgccattgtgagaaggaaatttgtagcacagacacagacacaggtagagtgtattatagcgtcggtcggagtgtatagcaagcagggggtcgtcatcagtggtatcccgtacgtagaaggtgattgcatgtatattatacacacagagtttggtcacctgttcatgtgcagttgagagtccattcttgcggcgaggagacgcggcacggcgccacgtcgagattgagattggattattcttaacattggatacggttgaataatgcagcagccattctttttagcacatgacactgttcgatggaatggaacaggacggttgagatcgac

SEQ ID NO: 22355 - DNA, 877 bp, Zea Mays
aggaaccattctggcttgatcaaattggcgaaccattccggatttctcgaaatcgaactgcagagtctgaacaagaaggacagaatcggagacgtgggaggtaggaacttctacctgcacaagaacgattcaagcaacgacgggctctacctccagggccaggaggagcccggtgcagatccaagtggtggtgacatcagccggcactcctcctcaggagtaggacaagcatctggtggcgctacaagtcagcaccaggtcctcaccatcgtcatcagcaagctggataagattgggcggcggacgaggcggatctggaggttcatcacctgcaacaactgcgcatgacgcagcacaatgcacaaagcatctgctgcacaacagtgcaggcaagaggtagttagctaattaaccagtgaaaggcttggcatggattctggttaaccagtgtgtggtgtggtgtggtgtgtaatcctaattcctagcagcagttaaccagtgtacatgccattgtggttgtggttaaaccacaagaagagccagtggggaaggggatagccccactaagcagagtcatgggcacctatcgccgatttattaagatatgtgtccatgcgcatgtataaaattcaaaagttgtagctcgaaagaaaaattacagctctctctctctctctctctctctctataccgtggtcggtgctgcagtgtgtcgttgtctgtcgtctctgcccagctgggactggttttacatgaaaaccttgaaaacttgtaaggcttcgattttcaactgttcctgtgtaccaattgacctgggacgtctatgctccacctcctatggccatgatgaatgatgtgtagtagccctagatacaaa

SEQ ID NO: 22356 - DNA, 1673 bp, Zea Mays
cgtgtagtcgtgttcttgtgcggccggtgctcccggtgctccccatcacaccaccaaacggaccaggcgaggcgtcctccaggccctagctctgtggtgtgcgcctctgcgatactgcgactgcggggcgccggtgcccgtcccatcggccgccgaactgtgcgccccggttgcccactaggccactactgcagtctgcactctgcagataacacagaggaaggcggaagccgatggccgccgtggcaagccccgccctccggctccgcccgagagccgcctctacgtcggcgacctcctcctccgcccctcctcgctgtcgcttcggctccttctctcactcctgtttcaagtttgggaggtcatttccagttcagagagtcaatggaagcacgatgcagcatttcggtactctaaaagctcaagtttttagcagcactggcgaccatgatggacgatttcatattaagaggactatatgctttgctgctacggacaagcaggagccggtcgtttcacgttactcagacatgccggttttgcatgaggcagaaagtggtactaaagttacccctgcatctgaaaactcctacttcgctggcagaggtgctggaaaaccaggattcatctcttttcaagaaagcaccttccgaaagtcaactgtggagagcgtgccacatcctggcaaggaagcatctcgattagtttggtttattggccctactattctcgtgtctttcttggttcttccatctctttacttgcgcaaagtactctcagcagtgtttgaagattccttgttgacagattttcttatactattctttaccgaggctttattttatggaggagttgcaatttttgtcttcttgattgataaagtctggagacctttgcagcaagtagcaccaaagagttacatttggtcaaaatccagatttttccgtatttcctcagtaacaacaatggttctgagcttgataatacctcttttaacaatgggcatggtatggccctggactggaccagcagcatcagcgactcttgccccttatttggttggactggttgtacagtttgcatttgaacagtatgcacggcatcggaaatcaccttcttggccagtgattcctattatcttcaaggtatacaggctacaccaactgaacagggcagctcagctggtgacggcactcacattttctgtcagaggaacagagacaacaaatcaaaccctagccatcatgaactcattaggagcattactgactgtccttcaaattcttggcgttatctgtgtttggtccctctcaagctttctgatgaggtttcttccctcttcagacattcctgatccctgactcctagacgttttggtagaacttttggagcgtgggcatagcttcccattgtaaattggttacacggaaccagtttcacatgtttgcaatgtttagcatttctttagggcatcttgatgcaatcttcggctgagtaattggaagagaaactgacgctggaatcaaataaacagcaaattaaaaggtccgatgcattgagtgtttccatgctgcccttgtggatcaaattctgagcttgcaaagggatcggttttgtaagaaggtatgcgagatttagtcagatttatggggtgtttgcagcaaaaaaaaaaa

SEQ ID NO: 22357 - DNA, 1165 bp, Zea Mays
aagtagggagagaacggatatctgccattacgaagccaaccctggaaaaccagggccattaatactactcccacccgtcgtctatctcctcctcaaccaccgccccgagatctccccttctctctcctcgcgccgttttcctctctacctctttgatccggcaatggccgcgcccgcccctgccaccaccggcgacctcctacgcgtcgaccccctcgagctacgcttccccttcgagttgaagaagcagatctcgtgctccatgcagctgtcgaatcacaccgacgactacatcgccttcaaggtgaaaactacaagtccaaagaagtattcggtgcgacccaacactggggttgtcttgccacggtctacctgtgatgttgttgttacgatgcaagcacagcgggaagccccgcctgacatgcagtgcaaggataagttcctagtccaaagcgtcgttgcccctgctggtataactgtgaaggatgtcactggggatatgccaccctctccagttccagaggaatctgaagaaggttctccacctagggcttctgaatcagaaaacggagatggaccttctggaggattcaccagagcactaagagagcgcattgagcctcaagacaaatctacagaggctggagctttggtttccaagttgactgaagagaagaattccgcgattcaacagaatcatagacttagacaggaacttgacttggtgaggcaggagatcagcaagaggcgtggagggggcttctccttcatcgtcgtcataattgttgctctgatcggcgccatcctcggctacctgatgaagtcgtaattctttcaggctgtcctctgctggccataccagaggcagtcgtgcaagttgtgtttgggaagaactcgaaaaaaaaactgttgaaaccagatgtcctgagatcatccttcatattttgtcgatataggagtgggtacgtgaggaatgctgggccagtgtttaagcttttcttttccttgttgtttctccgttggatgggcattgcggacgctgtaacttgaaagttgcatcaattgcttctgtttcatagttttatcttgctgagcaaatttgttttttagcaagtaacctgctgtttcattatccggaaagaacaaggtgattcccaagaaacaa

SEQ ID NO: 22358 - DNA, 1393 bp, Zea Mays
ttcgcacgtccacgatgtttgcatcctgcataaatgaaaaaagcttctttctatgtttatattcattaatttggaattttttgtgtatgcagcaagctggatcaccctgggttggcaaaactgatcgccgcacatgcacaccctccggcttacttgatgttctttgacttcttcgagcctccaaatcttgcagaaaagatacatgtcgaggaatggatcccttctatccagcaagtggttacgatggccagtgatctagcaaaggctctccaatacctacaaatccttggggtagtacacagagatataaaacctgcgaatattttgctagacaaagatctccatccatatctagcagattttggcttagccatgtttcaaaaggatattaagcgtgtctcagttgagaactggaaatcatctggcaagcctactggtggtttccataaaaagaatatggttgggacactaatttacatggcaccagaaattttgagaaaggatatacatacagaaaagtctgatgtgtatagctttgcaatatctatcaatgagcttcttactggtgtggtgccctatacagatctgagagcagaagcacaggcacacactgttcttgaaatgacatatactgaacaacaacttacagcagcaattgtttctcaaggattgcgtccagcacttgcccttcctgaatctggtgccccaccaactcttttgtcacttatccagcgttgctgggatcctgatcctgaaaagagaccatcatttgaagatataattgatgagctaaatatagttcaaaagcatatagtttcaaatgcttctgttccatcatctcctgtcagcaagactcaaaatggtaccatagaagtgcaccattatcaagaagcattgaactggttcaaccagggggagctttttgttaaaggatcaagtagatcagaccttaagaatctttggtctgattgttttgatcaatcttcagagtaccatccaacattaagttggggctcttttgcaacgtgtggtcgaagggaaaccatggaagacacccattttgtacttccccatgtgagcgaagaaaatgatgtttttgcctttggcatttttgatggccatagaggttcagcagccgctgaattttctgtccgagcagttcctggatttctcaagcaatttggtcagggtgcaagcccaactgacgctctttcagaagcgtttgtaaggactgacatagcatttcgagagaactaattctcaccggaagtcaaaaaggatattcaaaagattggcatcctggttgccacggcataacgcctgatagtgagaaaacaagcttttgtagcaaatgctgtggattgcgagcatccttgaccgtaagggcaaccat

SEQ ID NO: 22359 - DNA, 1288 bp, Zea Mays
agtccgagaagaaaaaggaaactgaagaagagacctcgtcgtctcgtgcagccgcaagcacgaggctgtgagcgagacagccaaggtgctcatcgactccagccagccgcccaaagccagccgcccaaaaagccaggcgcaaatcacaacctcgcctcctgtcccctccccggctcctcgttcccctctcgccgctcgcctccccgccgagatcgaggaggcgccaatagcgagagggtttcctcttccctccacggctccaacgagcccccggcccctccgcctcaaatcccacgcgcccggttggccgccgcccccgccatggatgtggatctgtggatctccaaggtcaaggagggccagcacctcgccgagacgaactatattttcatgggtgattttgtggaccgtggcttcaacagtctggaggttttcaccatcctgttgctactaaaagcgaggtatcctgcacacataacccttctgcgtggaaatcatgaaagtaggcagttgacacaggtgtatggtttctatgatgagtgtcagaggaagtatggcaacgccaatgcatggcggtattgcactgatgtttttgattaccttacgctatcagcaatcattaatggtcaagtcctctgtgttcatggcggtctttctcctgatgtacgtactattgatcagatacgaacaattgatcgcaattgtgaaattccccatgaaggtcctttctgcgaccttatgtggagtgaccctgaggagatagagacatgggctgttagtccccgtggagcaggttggctgtttggatcgcgcgtcacagcagagttcaactttgttaacggtatcgagctagtttgccgggctcaccagctggtccaggaaggcttaaagtacatgttccaggagaagggccttgtcactgtgtggtctgcacctaattattgctacagatgtggcaatgtcgcttctatcttaagcttcgatgagaagatggaaagggatgtcaagttcttcacagagacagaggagaacaaccagatgcgaggcccaaggaccgcagtcccatatttcctatgacttcaattgtacaattttagaagtctattcgaatctgtaagggctaaagatcaatcagatgtgtttattgttttaggtccagattatagtgcaatctgatgcgtttgatttctgttttcctttaaccacatgtacaatagaccatcgggacagtcatatgttcctgtatctcttcggtgacactgccaaagttttgtttgagaaaaaaaaa

SEQ ID NO: 22360 - DNA, 928 bp, Zea Mays
ggccgcatcctctccccccgcggccgagctccacccccacccacccacacgcacacactttgccggcggcgagcaccaccaggacagcaggcaagacagcagttgaccacgacagaaagtattactatcataatagatgatgattccgaaacaaacctagaaacagcaggcgatgctcttgacgagcatgtgaacttactgctatctctgggcatagaacgctcgcatgagcctacaagtgcaaccaacaccttccctggaataagcatggtggacacaccaaaagtaaacaccttcaagtggatccaggtgcctcctgaacctgtgaaggaggttccgaaggaaccgaagctcagctgcccgatctgtatgaacgagataaccgaagcggcgtcgaccgtatgcggtcacattttctgccagccgtgcatcaaggctgccattaaggcccagaagaagtgccctacctgccggaggaagctcactccaagacagcaacaccgggtgtacctcccatcgccttagtagcccagtgcagagtcattttgctacaagttctgccgtgccgggggctgtatgttggaggcaactggggggggggggggggggagcatagaggtcctgtttggttcgttcatttagtgtcataatcagttaacagggtaatctattaccattgctttatgtttggttagactatactgtaaacgattgcagtgggatgcaataccagccaatacaaaattattgccgctgctttttgactgttagccaactccgatccgtctttttggatcccacgttgcaaccaaacatagactggtaaccgttcacagcaaaggatagcaggtgcaataagttccattctcattaccactacctgttgccgaaccaaatagcacgtcttagtgttacgggaaaaaattgc

SEQ ID NO: 22361 - DNA, 2401 bp, Zea Mays
attttgtcttgctcgttttcttcgtcgtcttcatcctgcctgtctcccttgaccttcttttgttggctgtgagctcaattcggagcacgtcggcctaattttagctcacccggagatcacccccggaacaaatttcttgaggggcagaatcggttgcttgctaggctgggttctcccgcccagtctgttcggttccacgccatggcggtatagccggccacttgcaggtagacagcgtcagatgcccaaacctggtgattgcagcagcagcggcgttggtgggccgagcgccggggacgccaaggacttgccccaacttttcctcagagtgggcgcggccgtcacgctctccgtagccggtctgctcttctcgcggcgccagcggccgccccggcagctcctgccgccgccgccgcgtcctccctcggagtcggatgatgcttgcagcatgaaggccagaacagggctcaaggagcttaggatcctaaaaaatgaggataccaaggcaaaaattatcagtgggaactctgtgcacacgaccactaccactacgacaattaccaccaccgcattagtaccattggcccctaaatgcagaagccttgctgatgatgaaggctatctccttccggagttcaatgacatggttctcagagaatttggccaagatatagatagcattccatccacacctgcagcgagagtaagggaagatgtatcgaatgaccatgaagtccacaaacttagagatttggtgagatcactgcaagaaagggagaagactctggagctacagcttctggagtgttacggtttgcaggagcaagatgctgcggtgagggagcttgagaatcagctgaagattaacaacgttgaatcaaagttgtacttgctgaagattgaatctttacagactgaaaaccagaggctgcaaacacagctctcagagaactcaaaaatattctctgagcttgaggcgacaagaacaaaatgcaagtttctgaagaagaagtttatatcggatgcagaacaggcaaaggagcaaatcatttctcttcagaaaatggtcgactcattgcagaacaaacagactgatgaggagaaaaaatttattgagtttgaaaataaactgaagagactagaggagctggaaaaagaggcaacagagctaagagcggcaaattcaaggctgcagcaggagaatgcacatcttattaggcgactggaggttacacgcctaccccctgtacccaagcccaaaactagtatggaggtaaaagcattggaggaggctgatcggttgaagcaagaaactgataggttggctaaagaggttgaacaacttcagagtggcaggtttgcagatgtcgaagaattggtatatctgaaatggataaatgcctgcctacggtatgagctgagaaacaaggatgccccatcagggaagactgttgcacgagatcttagcaagaccctgagccccaagtctgaattgaaggccaaacagctgataatggaatatgccaatgtgggtgcggaggacagtcacttggggcatgtcgaattcggttcagagtgctcttcctcacgggcttcgtcaggtgaaccggatgatgtgtcaattgatattgcttccatgacaaagcatactaataaaaaccccaaaaagaagaagttcttctctaagcttcggaaactggtgctgggaaaagggaaagagaaccgtgaaatttctactctggagaggagagtgtctatttcaagttgttccttcgatgacttcactggaagggattcacatgatagctattcttcgttcatggcagaaccaaacatgcctgatagtcgacggcatggtgatcatggctttggtacacattcttctttggacagcgcaaaatctagtcctcttggcacagaaattgtaggtgaaagaagtgaccattctgtggtgaagagtgtatcttctagagaggaaaaggtaaatgcattcggtcccagcattggccttgatagtagcaaggccatacctgaggatgttgagatccataaatttgctgatgcgctgatcacatcaaggtcaggttccatgtcatcaagaagatcggcatccttccgacactgatataggagtcatctgctactgacccctctgcctggatgtatatttctgccagttcttgatggggggagttataggagatgttactggaatataagttgtcaatactttatttttttgtaccattgcgtatagggtgtagtttacttacctttaataccaactcctactacctgggctcgtcatgtgtaccataaaatggcacatttcaatggcaaacacaagacaattgtaacaccctaaatccatcaattaaggtaacctagattatattattaa

SEQ ID NO: 22362 - DNA, 1098 bp, Zea Mays
gcggcggcttggacgcggggtcttaaccctgttttgtgaatactaattatgtaatgctgatgggaacccttctctatagtgtgaagtacacacttccagagtatttttgtacctttcttgttgctggcggtgtgtcctcctttgcgttgttgaagacaagctccaagacagttaagaagcttgtcaaccctaatgcacctcttggctatacattgtgcttcctcaacttagcttttgatgggtatactaactcgacccaagatataataaagtcaaggtacccaaacacgaatccatgggatataatgcttggcatgaacctctgggggaccatatataatgctgtagttatgtttgttgcgccattactattcagtaactggccatatgcagatggtttcgaggcattgagattttgccaggagaacccagaggtggcctgggacatttttctgttctgcctatgtggcgccgtgcgtcagaattatatcttcttaaccatcagcaggttcggcgctcttactaacacaacgatcactaccacccgtaaattcatgagcatcgtggtttcatctgtcatcagtggcaatccattatcttcaaagcaacggggtagtgttacgatggtcttcttaggcctctctgtccaaatatatctcaaatggaagagagagaagggcagacaccccagtgagtaagctcgattgttgactcttgtacctgttccgatttgtaacttcaattggacagatctgttgtgaggttgaccaggataatgttaatgtagtctgctgaaattatgagctatgcctagagcgatacgtaatgtgaggctgtgagagccttattcatgtagatatgtaaattggtctaggaatgtttatagtaaggatttaggttatgttcccaatcgtaatgaatatttgttgtcaggagatgttatgagagccttattcatgtagatatgcgaatacaatgggtgctcaatgctccattacgaaatgtaaatgacagactgatactggtaaattccatattttcgttgcacgtccattttctttggcaatttaggttaataatgtttgttcacaataaata

SEQ ID NO: 22363 - DNA, 310 bp, Zea Mays
aagtaaccagctcgccaaccacaagtgctcagctcctacttttgaaacttgatggccaagcaagacatgtcagagcttgggttcagaattgtggatgaagcgggtacatctcctgacaagaacagcaaaccggagagccctcctaatcagccaaaggattaaaaaaatagctgtttggctttgatgtagcttttgtatgtttcttcatcccaaagatctgtcaagatctcaaacaaataagggtataatgaaaggacgatgttagtttacatagtaaccaaatttgaaacttatctgttggctgttttga

SEQ ID NO: 22364 - DNA, 1886 bp, Zea Mays
tgagataagtagggtgatatatgaagttttccctgaaccaaatcgacaattgttgcagaggactcttaagatgatgcaaattgttgagtcacacaaagctgtgaataggatgtctcaatctgctttggcagcttgcatggcaccacttcttctccgacctcttcttcttggagaatgtgacatagacaatgaatttagtatgggaggggacagttcatttcagctacttcaagctgctgcggctgcgaatcatgcacaagctattgttattattatgatggaggaatttgatcagatatttgatgacttggaagaaggttcctgttcttcagatgcttataccgagtctgaggatgatgatgttgataaggaatattccacagataatgacattaatgatgatgatgacggttcttatgattctggtgaagatgacattgaagaagacttggactactctgatgacagtgaacatgacagtaagatcaacactaatgtcaaggatggcaaggttaaaaacaatatctcagaaactgcagaagttgcacaggcaaagggtgcttctcatatggagaccaatagtcaatccaaccagaaacaagaatcatgtggaccaaatggatccaaagatcgtatactaagatcaacttctcgttcatcatcctccagagaaaaatctatggagaaatcatgcagttcggcacacaggggaaaaagaaccttatggggccgtacttcagcaagaaaagacctgtcaacagaggagattgaatgctgcagtgatgatgagtcccttattgagaaacttgagagcaacaaggttgatctccaatcgaaaattgcaaaggaggccaaagaaaatgctattctacagtcaagtctagaaaagcggaaagaagaactacatgagcgccgtttagcacttgaaaaggaagttgaaaatttgagggagcagctgcagaaggagagaagtttgaggacatccttggagtccggggtgatgaatttgcgaagagggcaggtgtccttgccgtcaacaacagacagcaaggtcagtggccagcagctgtgctgtgaatcatgcaacaaaaggctcctaaacacagacaggcttggcggacctgaaagctcatcagtggcagcgtcaccgaccattgggagtgactctgcatctggcatggttaaaaaagaacagaaaacatttcagggtgatatcgagcaatcaaggaagcagacggcacaggattcgccttcttcgacagacaagccaggtcacgaggcggtcgggggcagcagccagagggctcctcaaagaaggcaatcgattgccagggagggccaagatgggtggtcgtcatcatcctctaattcgaagtggaatcttgctcagaaacaatattcaaatagcccattgataagagggcttcatggatccagcagactagaggatttcggtggaagcataccaccagcagcgtcatcggcattagtcaagctgacaaaccggctcaacttcctgaaagaacggagggcgctgctggcaagcgagatgcagagcttggatctgggtcggcccccagcagcagctgctgctccatcagccaagtccccaacaccaaaaggccatgaaaggaagaagagtcgagactgaggaagatgttgtgctcttctgaatgctagttagccttatgattaccagcagtgtagtttgtgtgcatcccattcccttccatagtgctgtctgtctgtacatgtttccacaaattctactgcggatacataatatagatacggctggacaggctgctttgttattgttcaaattgttgctgaattgattcgtcgctcaaagcactttgctgacacatttctgatgttaaaaaaaa

SEQ ID NO: 22365 - DNA, 2737 bp, Zea Mays
cgacgcggagcggaagccccagtggccagtgcccaccaccttcacgcctcctcgcgtcgtcgcaaccgcagatctggccaacggcccccgaccgatcgacccccctccccctcggcgcggcgaggcgcagcaattcaagtgtatcaccgttgttacttccataacgtgctaacagtcaaatttgtcaagctactgttgatgctccagatatagtagaaaaccatgggagaagttagtgatgataattccaacatgtcctttctaaaaagaatcgctacaagtgacgtgccactgttgaaagagtatggtgtgaatggagttgttgtcgccctgcttctggctgtagttactcctgtcctgctttccatgatgtttggcaagaagacaaagcaaagggcggtgcgagctgatgtgggtggagaggagggatttgcaatgcggaacaacaggttttcctccttagttgaagtcccatgggagggcgccacgacaatgtcagctctgttcgagatggccagcaaaaagtactctcgacagaggtgtcttggcacgaggaagctaattaagagggaatttatggaatcttctgatggtaggaagtttgagaaactgcaccttggtgaatatgaatgggatacctacactgaggcatttaatcgtgcatgtaatttttcttctggacttatcaagatgggccacgacctagatagtcatgctgctatcttctctgatacaagagctgagtggatcattgctgctcagggatgcttccgacaaaatttaacggttgtaacaatatatgcatctcttggtgaggatgcattggtgcattcactaaatgagacacaggtttcaactctgatatgtgattcgaagcaacttaagaagatacctgcaatcagctataaattgcagagtcttaggcgtattatctatattgaggatgaacctgtcgaggctgagacactgaaccaagtgaagcatttgacaacattgtctttcactgaagtagaggagcttggcaagacatctcatgttgatgcaaggttaccttcaggctctgatactgcagttatcatgtatacaagcggaagtactggtcttcccaagggtgtaatgatcacacatggcaacatggtggccacaactgcagcagtcatgacaatagtcccaaaccttggcatgaatgatgtttatctggcttatcttccattggctcatgtctttgaactagcaggggagactgtcatgttagcttctggcagtgccattggatatggttcagcattaactatgactgatacatcgaacaagattaaaaagggaacaaaaggagatgtttctgtactgaatcctactcttatgatttcagttcctgcaattttggatcgtatcaaagatgcagtatttaagaaagttggtgagaagggtggcctgacaaaaaagctgtcttgattttttcatataagcgaaatattgcagcaattgaagggagttggtttggatcttgggcaccagagaggatgttatgggatcacattatttataaaccaatacgggcaatgcttggaggacgtctaagatttgttctttgtggtggtgcacctctgtcaagtgacacacaaagatttatgaatatatgtctaggtgtcccagtgggtcaaggctatggattgactgaaacttgtgctggagcagctttcactgaatgggatgatacaagtgtgggtcgtgttggtccaccacttccttgttgctatgtgaagcttgtctcatgggaagaaggtggttacaagatttctgattctccaatgccgagaggagaggtcgcggttggtggacacagtataacaaaaggttatttcaacaatgaagcaaagacgaacgaagtatacaaggttgatgagaggggcatacgctggttctacactggtgatattggtcagttccatcctgatgggtgccttgagattattgacaggaaaaaagatatagtaaagcttcagcatggagaatatgtgtctcttggcaaggttgaatcggctctagcaacaagcaactatgtggagaacatcatggtttatgccgatccatttcataactactgtgttgccctggttgttccagcgcaccaggccttggagaagtgggctcagaattccgggatgaactatgaaggctttggagagctttgccaaaacgaccgagcaattaaggaggttcagcaatcgctatcaaagcgaggctcgagaaattcgaggtgccagcgaagatcgtgctgttgcctgaaccgtggacgccggagtccgggctggtgaccgcagcgcttaaactgaagagggagcaaataaaggccaaattcaaaggcgatctggacaagctctaccactgaagaagcgacagaggacggtttaatttgcacctactgcttccagacgcttgcggtgccaaaagctgcctggatggaacttttactgacctgcacgagtggtgtgtgtgtgtgtatcccagctgctgatacacaggagcttcgttcttctgtgactgtgactgagggaaaataaacccagtgttggaatgatcttgatttgtaatagcttcacgtcatgggattttaattttgtcatagcacagaggatgctcaatttcacgtccgttacgggtcagttatgacactaagcatattgtaaatgatgtttttttatatagacacaataaataggccctgggcacatca

SEQ ID NO: 22366 - DNA, 992 bp, Zea Mays
ccatcgaagaaaaggggaaaaggggaaaatgatttcttaaaaaagaggagtgacccggtctaccggagcgtacggtgccgatcccgtcgccgccgctacccctcaatcgcgagcaacttcttccggattcgcaccaagctctccacaattctatcgctatgctgcggaaggccgtcgtcgccttcatcgcctgcaccgccttcttcctcgccttctctgcctactcccgtcgccagggcgttgcagaggttcaattaccagcagttactcacagggtctacctagatgtagaaattgatggccaacacataggtagaattgttattggtctctatggggaggtcgttccaaaaacagttggggttgttgctatggcgaattctggacttgattctaatggatctcagttttacataactactatcaagacaagctggttggatggggagcatgttgtcttcggcagggtgatccaaggaatggataccgtgtacgccatagaagggggcgctgggacttacaatggcaagccaaggaagaaggcggtgatcaccgacgctggtgagatacccaaggagaaatggggtgatcaggaagcgtagggtgttttctacttcttgtcaccttcaaatcaggtagccatgtacttcttttttccttgacctccatggtgtgccacggttcagcaagacttccggaatgttgtatatcgtagctagcttatggccagtcgaattgactctgatcccttgagttgtgatgtggagacgcatacatctgaaaaatctttaggccatgttcggttagggtggagtgaaggggattaagtttccttccattcaaatttgaatttaaatttcaataggaggaggttgttcgcttcgaattaaagctaactgtttagactgttatagctgtaatctgtacagacaaaaacattgtataagcagaagctaatatggattaaagctaagcgaacaggctattaatct

SEQ ID NO: 22367 - DNA, 2090 bp, Zea Mays
ttacaatatcacaactctaccgtttgcatctttttcttgttggaaaagaccttatccacgctaccgatcaacttcaaaagatttcttctgcagtttctcaagtcgagaagctagtgggggacgacgccaccgagagggaacgcgacacgagatcgccatcgccatggggggaggagtcatgcgcaccgccgcgaaggtcagcatcgccgggggcgcggcggcggcgaaaagcggccggttccgcaacgccgctccggtcttcgccacggcccccgccgccgcgggttccgaagcggcgccgcttgtctccgtctcgagtggcgaggtgccccccgccgcggcgcagtgggcggcgtcctgggagctggacgactgggagtttgcggactggagggacgacgccgcggcggcggcggcggtagtggagagggaggcaacggcggccgccgccaagcccaggctggtcttcgcgccgccgtcgagggaggaggccgaggaggccacgaccgagctcagggacgccgtagagagggcttatttcaacgagtcgccagttgaggttgttaaggaacaagataaagagtttaataaactggcaactgatgccatgattccttctatgcctggacatgtggttcaagcttttacgttgctgaaatcaagcacggaggctcaggtttgtgcaatggcctatgtaaacatatcatttgagggaaattaattatttgtcaccctagtcactggcggagccacccccaggcaacgtagggcggctgccgaggcttgttggcaaagcgcaaagaaagtatttctttgtattgtagaggaatattatatctttttagataaatatttgtgcacaatgagaatcacttgggctcctaaaagtttctggctccgacattaaccctaatagatgcccactttaggggggagaatcattcatcagatacatcgacctttgtacaatgctacctagtttattgaattttgttagggtgataatgttttgccttgccaataattataatcccagaagaaactctttgattatgtttggttgatgctcctgtttgatttgcattaatgagttccgtgagcagtctttccttttcagttttcagtcacgcggttctacatatgtactccctttattcaaaattataagactgtctgacttttctagatacatagcttttgctatgtatttgtatcacatagtttatcttagttgatgatcatatagcgatacatcaatggatcacttagattaatttgttctgatatcatctgctatgtttctcactggaactgtttgttttggctcttgatctctagagtgttgtcgcctcccttgcatcagatagaaatgtctgggatgcagtattgaagaacgagaaggttatggagttttataagactcaccagacaactctagttcagacatcccctaacgaagccgtcacagtagagttgccggggaagctggaagatgctgcctctgaaaacacatccagcggcgaactccccgctggctcaggcctgagtttctccgatttcgtggacaatgcgaagaagacagtgatggacgtggtccataacataaccgacttcttcaaggacttgttcgacgactcagccaagacccagactggggcaggcccttcagcagctgagaagggcccttctatggcagatatggctgtcggcggatccttcatggctctggccatagcggtcatcctagttgttatgttcaagagggcatgatatagccatgagtatcttctgggatccacggtgctttaaatctgtcgaaaattactcgtctatcgtttggtcaagaactcctgactgtaatgtaatgtacagcttgtgtccttgtccttggaaacagcacactaaaaggctatctatgatatacaacggtgtgtatcttggtttctcaacctctgatgtgcagacatgacaagagcgtgcaacgcgttttgatgacgtctcctagtattcctgggtcatgaaacgtcaataaatgttcttgcatgtgcaaaaaaagcaaaccatccagctagcaaggggattccttctcg

SEQ ID NO: 22368 - DNA, 1483 bp, Zea Mays
aaagaaacctgccaagttgggcaccaggtccaggagactggctggatctatcactcaatcattctgtgccatcgtctcttctaatactctcaagagcttttactgtatctggtaaaatgaaacctgaggaggccgttgtagcaaccttatcttccctgccagatgaagttgtcgatacagttgggactgtactgccttctgaagattctgtttcagagaggaagagaaaattggaatttctggagatgcaggaagagcttatcaaggaagaggagaaaaggcaagagaaagatgacaaggcaaaactggaggagccaaaggctactgaagaagatttggctttgaaggaaatgactgagcctactgttagggagaaagaggaactaaagaaagcaaaaacccacgataagaaagagcagctttgtaatatcagtcaagcattggctgtgcttgcatctgtttcttctgttaccaaggagcgacaagagtttttaagccttgtcaacaaggagatagaactatataataacatgctcgcaaaggagggtacagatggtgaagaagaagccaggagagcgtacaaggctgctagggaggaatcagaccatgctgcagaggcagctgtgggagaaaaggtctcttcagctttgattgatagggttgatgctatgcttcaaaagttagaaaaggagattgatgatgttgatgctcgaattggcaatcgctggcagctgctggatagggactgcgatggcaaggtgactcctgaagaggtagctgcagctgcaaattatctcaaagacaccataggagcagaaggcgtccaggagcttatcagcaatctttctaaagacaacgaagggaatatccttgtggaagacattgtgaagctggcgtcacaaacagaggaaaacaacgaagctgaagaaactgcacgatgatttggaatagcagccacattcttggctcttaaaactcgacggtccattccttttttaaaaggaaccgcacataataaagctagttcctggcagtctcatgcaaaaatcaccaagcaggatggtcattctttttgttctgactggcggctgcagagaaaattgtatcctgctgttgaaagatattcatttatacagttaagtcccagcacaaccgatcgttaggttaggaattctgtccgaaatggcaacttgcatttcaaacgtctgccatgaaaatgagaataaattcggcgggctctacagatttttcatctattgtctgaacaaaagtataggcatcaaataagtatctgggtaagtttatactatttgaataagaatcagctggatttgtttaaattcttaacaagaccgttttagcagtttgactatatggtcaatcaaaacactattttgtattgtatattgtactatgtgcacttttgcagtgagatttaaatatgggtatagagatagataagctactagagatagcctaaatg

SEQ ID NO: 22369 - DNA, 841 bp, Zea Mays
aggagtgatcgtctattttctcatcacataaacgtactgcgtttctactttctagtggagaaggaaaagacaattttctcgtaaccttccgggctcctcttcctctcctcgcgttcccccaccaaaccctaatccgagcacccagcccctacccgcttccgctcgcgccggcctttggggctctcaccctgagcggtaggaatccgcagggctccggttgggtgccagaagcatccaagtcgttggcgggagaccgggaaatggcggaaaaagagggggcgaaggttggggcggaagagatggaagagcgggagcaggaaggggaggcggaggaggtggaggtgaagtttcgtctcttcgacggctccgacatcggccccgtgcgctgcaacgccgccaccaccaccgtcgccgctctcaaggatcgcgtcgtcgccgactggcccaaagataaacaaattatcccaaagactgctagtgatgtaaaactaataagtggcggcaaaattctagaaaatgacaagaatgttgcacagtgcagagctccttttggcgatcttcccagtagtgctatcacgatgcacgttgttgttcaaccatcatcagccaaatcaaaaccagatttcagaagcatattatatccacagagatgtatgtagtctgttgatgcaacacaactacataccaagtacctacagagcaggcaacactaaggcatagaaggatttaatgatatgcctctgaaatttgtggaggagcagaggagtaagtaggctatctggctacataggagcagaggaggaaggactgaaggagtacagaggaggaagatgacagggag

SEQ ID NO: 22370 - DNA, 2853 bp, Zea Mays
gcggttcctgctcaatcttccccttcgtttattgctcttctccggtccttctccgcaacccctggccctgtcaagcagacgcagggtgacaccaggcagcagcccacctccacgcgaacacgccgcaccacaccatcaccggcaccgcagcacggcagccagtcaccaggactccaggagtgatctttgatccccaccaggccgccacgctactgtcggaggaaagacacaaaatgtttcagtaccgcctgttgaaggtgtagctggaggaggaactagctatggatgggtggatggaggtttgcggggtacaaatattggtgctggtgtgattgatcctacaaaagtacactcagatgatcttttgcacgtctggtctatgcccagcacagcaaatgttagccagcaagaagcgcctcggcctctagagaaagtcaaccttttggcagcaagaaatgaaagggaaagttttcaaattgctttacgcccaaaggtttcatgggcaacttcaggtattgcagggtctgtgcagatacaatgcaccgatctctgctcctcctcaggagacaggttagtcgttggtcagtccataactttgcgacgtgtggtgcctatcttaggtgtaccagatgcacttgttcctattgatccactcagtcctcaaataagtattcaaccaggggagacagctgcagtttgggtatcagtaaatgttccatgtgggcaaccgcctggtttatatgagggtgaaatattcattactgcagttaagacagaattagattccagaacagaatctctaccaaaatctgaaaagtgtaggctatacagagaattaagaagttgtcttgacctcactggacccagagactactcgtcaccagaggaaatggtacaaagactaacatcagcttctactgtactaaggagggtgttggataatccagcactccaggactgtcaagagaataatggatttggagacatgatggatgaagatgttataaacaatatttcagttcgcttgaagttaagccttactgtttgggacttcactctcccagtgacaccttctttacctgctgtttttggtatatctgaaactgtcattgaagatcgattctgtttggagcatggcactgaaggatggtatagtgcactggatcatcactttaggtggctcctccaatataggattagtccatttttctgcagatggggtgatagcatgcgcattctagcatacacatgcccttggcctgccgatcatccgaaggctaatgaatattactctgacccaagattagcagcatatgctgtaccctatgcacctatcctatcgtgtacggatgctgcaaaaaattccctgaggagagaggttgaaatcttaaaatcgaagcctcattggtccaaagcttacttctatttgtgggatgagccattaaatgtggaacagtatgacatgatatgcaacatctctaatgagctacggtcatatgcacctgatgtgcgaattttgacaacttactattgtggtccaagtggctctgaactggctccctctacatttgaagcttttgcaaaagttccaaatgttctgcgtccgcacacgcaaatcttttgcacaagtgaatgggttcttggcacaagagaagacctagtgaaggatattgttgctgaattacggcctgatcttggtgaggagtggtggacatatgtttgtatgggtccttctgatcctcaaccaaactggcaccttgggatgcgtggaacccagcaccgggcagtgatgtggcgagtgtggaaggaaggtgggacaggatttctttattggggttccaactgctatgagaaggctatgatcccaagtgctgagatctgtttccgacgcggccttcctcctggcgacggtgtcctgttttaccctggtgaagtgttttcttcgtcacatgaaccagttgcttccacccggctagagcgcattctcagtggcatgcaggacatcgaatacctgaagctttattcttcacggtatgggagggaggaaggcctggcccttatagagaagactggcatgtaccttggaccggatcgatatacgctggatcatggaccggtagatgtgatgaggggtgaggtgtaccgcacctgcaggtcttagtgtagcaatgcctgccagatgctgtccttccagtctagggcgtctgttgtattatatatggtggtatgtgatctatgtagcgaattaatctacccttggtgatcgatcagatcatcaaacctggactaaactagtcctggtgcatcttttgaatctggctcgagagttgcatcaagtcgggagaaaaaaaacccaagagatctggccaagagatggagcgacccaggtccggctctggtacaaggcccagttagctaccggaagtgggccctatctgctgcaacaggattgagacgagattggcattgtcctctcgattccatgacgctgtgcccgcatacagctgaagctgaaatattctcctattagctgttaccttccatttcctttctgcgatttgcaccgcaggttacaccctccaaaggcgcattcgtttctaccgtgtgccgtgacgaggattcccgtctcagcaacggacgctgccgccgcgatgccctgtctctttcgaggtcggtagcgccatggcctaacgcggagctgtgtttggttggaagggaataatgcatgcgatgcatggtgaggaaggatgagtctatcccgagctctgtttggtccagagacatgaaaattaggtccagactgttaagtaaccctagttagggttatgtgggcaaatacctgctttgtccctg

SEQ ID NO: 22371 - DNA, 2048 bp, Zea Mays
cttccttgagggaagcagaaccgccttgaccgacgtgactacggtacggcccccaaacccggaacggcagcgaaacgacagccatgcttctccagccgatccccaccgccaccctcgccgctcgaccgagatcaagcgaagcttccttcccctttcgttgccaccgccgccgccgcgtgctcctcccagtccgcgccgacttgaccccgatctccctctcggcctccgccccctcgcggccggccaagccggccgtttgcaccgccgacgagctccactacgcctccgtcgacggtgccgggtggcgactcgcgctctggcggtacaggccaccgcgcaatgctcccgtcaggaatcacccgctgatgctgctgtcgggagtcgggacgaacgccgtcggattcgacctctcacccggggcttcgtttgcccgtcacatgtctagccaaggatttgatacatggatagttgaagtaagaggtgctggtctgagcatgcgtgaatatgatgattctactccatctggctcagtcacttttgaggatgtctctagtggtattcaacctcttaatagtacattcgaggccacttccattcagagttctggtggctatgctagtgattgtgatgaccttggaatagttgctttggatgaaccacctttacttgctgaactttctaatttttttgatcgaatctcaaaactcatggaagaggctgtagttaatggaaattttcatgagatcacagaaaaagtttctgttctctcagaaatggtagagagctctaccattattggtccagtgagagaagaaagtctacgtcttcttaagaattttcaggaccagttggattcatgggagcgttttgtagcaacacaaatggatctgacttctgagtataattgggacttcgaccattacctagaggaggatataccagccgcgctggagtatattaaacaacacagcagagcaaaagatggcaagttgcttgccattggacactcaatggggggaattttgttgtatgcaatgctgtcaagatctggttttgaaggagtttcgtcaaatttagcagctattgtcactttggcttcttctgttgactatacaacatccaattcatcgctgaagctgttactgcctcttgctcatcctgcacaagctcttaatgtccctgctgttccattgggtacattgttggcagcggcgtatccgtgggcatctggtccaccatatcttttttcctggcttaatcctcaaatatcagctcaggacatgatgcatccggagttgctggctaagcttgtttcaaacaacttttgtacagtgcctgcaaaggttgttctgcaacttacaaccgctttcagggaaggtgggctgtgcaaccgaaatggaaccttctcatacaaggatcatttgcgagagtgtcagactcctgtccttgcattggctggagataaagacctaatctgccctccagatgctgtttatgaaactgtgaaactcattccgaatcacaaggtggactatagagtgtttggaaagccacaaggcccgcattatgcacattatgacttggttggaggccgactggcgatcaatgaggtgtatccatgtatcatagagttcctctctcgtcatgatggttattgatttgattatatgatgctaatacagagtaacttacaacaccatgttcatctcaaaggttttttaagttgagctgaacagtcttttccatggcttggccagaaaataggtgcatgcacgaattctcgtgtgtgttgaagagagagaaaaaaacacgagctcatctgatgtatccttgtaacaagcatcggttagtgcttctctgtttcccgttttgaggaaaagttaatggtaatcttgtagaaaaagggttgaaaaaatttacagtaggcttacatgtactcccacgaacaagaagccaagatcaaagaaattgtacaattgatctcttactatgatgtaacacttctaatataatgatacgcatctcacatttccacttgcattttcatg

SEQ ID NO: 22372 - DNA, 878 bp, Zea Mays
tcaaaagcgggttgaatccatttggattttggatgatccaaatccattttctggtacaatgtggtctaccggaactagaaaaggaagttgacgaaaagatagaccagttcagtgcatgggtggagaaacacccaaaccgcagaagccagatctgcctctcctttttcgacgagaaacacagacaccctggttggtttgtcaacaaaacagagcgcatctattgggagcaatggttcatcaatttgcaagtcatgttccccaaaagatacagcaagtcaaacagctccaaagggctgacaaacatccaagcaaatgccgtggaggagaccagcacaaggcgtgctgcattggaggcgtcgattaacgaagtgctgttccagatcataaagttcgccaacgagaaaaaggaccacattcctgctatccctgacaggattttcaatcacgagatcatgatcccaagctcggattctgtatttggatggaacacggacgtcattcgcagagttctgaatagcgggcacccatactcgctttaactgaagacgacatctcagtgggcgcccgtattcagtttattagcgtgctgccgccctgtttggaagacggctctgttaaccatcgtggtgaaccatataatatgcctaaggaaaaacctagttctgtgtacatcaccctgctcatctggcatgtacatactgtgttgggatcttgctcatcggtcaaacattcttaagttcgattaagtttataaataacaatattatgattctaaataagtttatcatgtaaaagtatttttcatgattgatacttattgcgaagcatctccgagtgagttaggtggttcgagtaacactccttaagtcttgaattcg

SEQ ID NO: 22373 - DNA, 1947 bp, Zea Mays
gatccgctgtgtccccagctgtccaaagtcccactcccagcttccctccccctaaaaaactctcacacatcaccgcgagagaggaggctgagccgcggaggagcagcggcgcatcgcaacactaaccaaagatactgataggtggtctggttcgtgacttgttcagtcctcctctccaggtgccgagccagggtgactgttccgaggagcgtggcgtggacccatggggaagaagggcaagtggttcggcgccgtcaagaaggtcttcagccccgaatccaaggagaagaaagaggagaggctaaggaggaaatcagcagctagcaacccagcaccggtagatctgaccccatctacctccctggaagtcaatgtttcggtgccaccccctccggctcctcctccagttcctcgccagaccgacgaggtcagggtccccgaagccgagcaggagcagagcaagcatgtcaccctggaggaggcccctgctgctgctgctgccccagcacaggcgtcggtgctgccacctggtgcgccaaccgaagagctcgccgcaatcaagatccagaccgccttccgaggttacctggcaaggagggcactaagagcactacgaggccttgtacgattgaagtcattggttgagggtaattcagttaagcgtcaatctgcaagcactctgcgctgtatgcaaactctatcgcgggtgcagtcacaaatacgatctaggagagcaaagatgtccgaggagaaccaggccctccaacgccagctcctacttaaacaggaactggagaatttcagaatgggtgagaactgggacgacagcactcaatccaaggagcaaatcgaggcaagcctaataagcaggcaagaggcagcgataagaagagaaagagctcttgcatatgcattttcacatcagtggaagagcacatcaagatctgcgaacccaatgtttgtagacccaaataacttgcagtggggctggagctggttggagcgctggatggcagcaaaaccttgggagggacgcaatgggaccgacaaggagagcaacattgatcgcggctccgtcaagaatatgagcttgaaccttggagttggagagggtgagatcacaaaagctttcaaccgccgggactcaaagccagagaagccatcaccaccgactccaaaaccggcccgtccagcttccaggcaatccccttcgacgccctctgctagagtggccccaatacctgcgaggaggaaatccagcacgccaaagaatgggctttcacaggtggacgatgacgtgaggagcgtgctcagtgtgcagtctgagcgaccaaggaggcacagcatagccacgacgtcgaccatgcgggacgatgagagcctcgcgagctccccgtcgctcccgagctacatggttcccacagaatctgcgagggccaaatctcgcacagcaacggccaatggcgcagagacgcctgagaaaggaggctctgctggaccagtcaagaagaggttgtctttccaaggtggagctgcggctgcctcaccgatgcgacggcattctggccctcccaaggtggagagcgctgtgaaggacattgctgcgccaccacagcctgaggccttggtagccaatggtggtggaagcaagtgacttgtattgacaagttccaggatgggggagcgggttatggtcttatggagggacatgtttcatccgtgaacagaagttaagagtggtgccggatctacgaatggtttgaattgttttcccgttacaaccacattgtttgctgtataagattcactgtacctgccagttggttccatttgttgttttctgtaaaacaaacatcaatttgtcactagaatctgtgatgcttgtatgtaaacaggtcctctatttatgtgagccatatatttcattttcagaagattccttgtgct

SEQ ID NO: 22374 - DNA, 189 bp, Zea Mays
tataatcagagtacttattacatagcggaagtcttacaaaataaaagatacatataaaacaaactaaagtccatccttggcgccataaagtcaactgggagacgccacctagatcaaatcgaactcctagttgtgtggctcctcttgaaccacatgttcttctcctgtgggaaatgtgagacaacaagg

SEQ ID NO: 22375 - DNA, 2045 bp, Zea Mays
aagcgtgggcctaccaaccacacatgtcaattctcggaatttctcagaagattggagacgggcgttctcttttcatttggagttttggactagtcgaactgacgaactggcagagcgttcaggatagacatggctgccacctttgccttcatccctctcctgctactggtctgcgtccagagcgcggctcctgttctcggcttcacaaggagcgagttccctgaagatttcgtcttcggatccgctacctcggcttatcagtatgagggtgctgttggtgaggatggtaggagcccaagcatctgggacaccttcactcacgcagggagaatgccggacaaaagcaatggtgatgtagccgccgacgggtacaacaagtacaaggtgaaataaattagctgcgaatcagtttttctgctggtatcgaggtgctggtttcttactatgcctgtcaactaaccttttgtctgatctctattttttttattgaaaaaccctggcatctaaatatgaaagttgctgtcttaattttaacatgtagtttgttgggctgacgtactgtcacttctgagatcagcatgctgaatttttcagcatatggaaaggagcattcttgatctgtttcttgctttgatcttaaccatctaatgttttaggacgatgttaagctcataattgacaataacctggaggcatataggttctctatctcctggtccagacttataccaaatggaagaggtgctattaatccaaaagggatagagtactataacaatctcatagacgagctagttacacatggtgtccaagtccatgttatgatttaccagctggatctccctcagatcctggaagacgagtatggtggatggttaagtccaatggttgtggaggatttcacggcatatgcagatgtgtgcttcagggagttcggtgacagggtttcacactggaccactctggatgaagtcaatgtggctgcaattgggtcctatgataatggacaaattgcaccgggaagatgttctgatccatttggaacaaaaaaatgtacagtggggaactcaagtgtggagccatatatagcagctcataacatgctactggcacatgcatcagctaccagactgtacagagaaaaataccaagctgtgcaaaaaggagttgttggtataaatatatatacaatgtggtcatacccactaacaaactccactgccgatttagaagcaactcaaagatttctggacttctattccggctggtatcttcttgactcttgttgcatcacaaatgtggaacatttatagagataatcgaaaacaatatgtatcgattgtaggatactagaaccattggtgtttggagattatccaagcgtaatgaagaagaatgttggttctcgccttccgtcattcagtaaagttcaatctgaagccattcgtggcactctagatttcattggaataaaccactattattctttctatgtgaacgaccgccctttagaaaaaggcatccgtgacttctcactggacattgctgctgactatagaggtaaaacagtttgtcactcgatacatgattatccttttattgcttgcaattctttagatacattccctgggacttctgattcatttatctagagtcacacacacaatggcctacagaagttcaaaacggtgtcacatggaccaaataatttgatgatacttctgaaacatattcgcaattttatgaaacctacaagctaaatgctgtatataacaaaacaattatctgaaacaggttcgagaactgatccgccaataggtcagaggattgcaacttttggtagagtacctgagtgaagcctatgggaaccttcccatctatatccaagagacaggttatgcaaccacaaacggcagcctccatgatactgacagggttgattacatgaagacccacataagcagcacattggctgctctaagctttccaaggacggtaaaaggcacaatagcagaactcagcaatgtgtatcaggcactcgacaa

SEQ ID NO: 22376 - DNA, 803 bp, Zea Mays
gttttctccataataccaaactggcgaagcacggctgcggagtaataaagtggcgaagccgcccgacgagaatgttacaaattcaaataactccaccggcaagtcccctccgccgtccttcagtaccggaagaaggcgaggcgcccaaccgagagcaccaggggaaaggaagtgcgcctaggcatcgacatggaggacttctacgtcacgatcctctacggcctgctgctcgtagccggcggcgtagccggctacatgaagcgcggcagcgccgcgtctctggtcgccgggggcggattcggcgctgcgctccttctcgctggtgcgctcagcgcctgggccttcgcgcacggcagaggtggcgctgccgccatctttgccaccgtccttcagatcgtttgtgctgtgctattgactgttgtcatgggaataagatacgtcaaaacacaaaagataatgcctgctggaattgtcgcttctatcagtgcactcgtactgatattttacgtgtacaagatatctaccggtggcaacaaggtttatatgtcggtgagtgccgagtgaatctgctgggcgtgtggtgttccgtgtacatgtttgtacggcagctaaatgtgaagacaacaaaatcatctgtgtatcaattgtattttagtgaggcaaacactgtaccaaacaatgatggcatgagttagttaagatgtggatgtggacacatgttcaatttaagctttttgatagtacttgttaaattgctgcaacttcctccatcaatgatgacacacgacacttcaaaattaaaa

SEQ ID NO: 22377 - DNA, 535 bp, Zea Mays
ctcacagaactaacagttctgagatcgagctgcacaaggaaggaaagaaggagacacacaatcgtcgcctgcttaaccagagcgacaatgcccaagctcaggctcatcttcaccgttattcttgtggtgtctctactgttcagtggtgtgtcttcaggacaaactgcagctacacaagccagcgatgcagatctttctgaagcggttgaggttgagagacgcagtgggaaggttctgacgtacgttcaggactacgactacggcgggtccaaccccaaacatgacccacgcaggaagccagggagcggacaccctccataggtagccaaggataaacgtccggtgacgctccagccactggactctgctggtacctagctagtcttgctgagttgttcctgtaatgagtagaaagaatcagaacggtttggtcccgtccacgcccacgtcactttgttagctacgtagtagtataataaggtagtcttttagatgatgatgaaataaagatccagaatgttctgtcaaaaaaaac

SEQ ID NO: 22378 - DNA, 1837 bp, Zea Mays
ctcacacgatactttccccctccactagggttccccgtccgttccccctcggccgcatcagctgtttgaggcggcaaccaagggccgcggaagcatctgtgtcgagccatggataaggggatcttcaccaacgatggctccttcatggagaggttcaagcagatgcagcaggaggcgcaggagaagaaggccgctgctgcctctgcctcatcggctcccaagcatgcgaaccccaagcaggggtttgctgttgcggcaaacaagaggccattcgagctgaagaacgctgctccggtagcctcagctggtaagctggcctttagtctcaagaaggccaaggtcgccgttgcacctgtgtttgcagccgacgaggaggatgaggatgctgtggatgttgagagggaggagcccgccaaacgccagaagtctgtgcaagctgatgctcctgcggcagctgccgcgtccggggctgttgcttatagttaactaaattgacattgctgggaaggatgtgattgagggagttggaggctctactgcagtaatttgcattgccttgtcatgcactagatattaatcagttctttaagtgacatgcagccccacccccaccaaatgatatgacagtgagacaagtcgctgacaaactggcaagctttgttgccaaaaacgggagacagtttgagaatatcacacgacagaggaatcctggagatacaccattcaagtttctatttgacaaaaactgtccagactacaaatattatgagtttcagcttgctgaagaggaaagggctcttgctcagtcaaaggaggctgaagcatcgaaagctaactctggcactgcaagcttcaaggcaccaggtggtacttatagaagctcatttgaacagaagtctaactatcagacacctgcatcagctttgtacggggcatatgagggtagttcttcccaaggaagctcttctagttatggtgatcatacagctccaccatcagatcctgtagcattgatggaattctatgcaaagaaggctgcactggaagaacggaagaggccaccaaggcagtcgaaagatgaaatgccgccacctccttctcttcaaggtcctcctaagaagggacaccacatgggtgatttcattcctcaagaagaacttgaaaagtttatggcacggtgtaatgatgctgcagcacaaaaggctaccaaagaagccgctgagaaggctaagattcaggcggacaatattgggcacaaacttttatctaagatgggttggagggaaggtgagggtcttgggagcgagagaagaggccgtgcagatcccgttatggctggagatgtgaagaaggatcatcttggtgttggggcagtccagcctggtgaggtcacatctgaagatgacatctatgagcaatacaagaagcggatgatgcttggataccgctataggccaaaccctctgaacaatccaaggaaatcatactactgatgtgggggagttcgtctgaggggagataaatgtcaagaagttcgttattcagcatatttcttggaatgccacagatgcaaggcttccgggggttctacaaagctttgttctttgtgtagtgtgtttatctttgtgggtttaaatgtctgttcaaacgtgtatcatgtttcagactgttgtattgctttcttggatcacccttttttctgatctcatttcagttacaagttggaaccataaggtacaaaatttgtgttgggaggggttatattttagaatggagtgtgaataactatagctagcataaggctatctccagcagattagccatcctcacatctaac

SEQ ID NO: 22379 - DNA, 2460 bp, Zea Mays
aatcctccaaccaagctccagtaagagccacctgcagcggctatcattaaagcaatcaggccaggcgttaagccaatgagctctccgaatcccacctttaatcagctcctccagctcccaaaccttccattataacgcataaatccgtgctcactctatttctactgcttctagtactctccccacaagcatccccctccatgatagtgcttcctctgagctaaggctctctcacctaaacacccgctcaccccaagtccacgccggcgattgccgcaatgccggcgccggcagcgggcttgtccgtcctggtgctcttcgtcttcgccgccgccctgccggccctttctgccgatgacctcaacaccgacgcgcaggcgctgcaggcgctacgctcggcggtcggccgctccgcgctgccatcgtggaacagcagcacgcccacgtgccagtggcagggcgtcacctgcgagagcggccgcgtcgtcgagctccgcctccccggcgccgggctcatgggcaacctcccttcgggcgtgctcggcaacctgtcggcgctccgcacgctctccctccggtacaacgcgctcacggggcccattccggacgacctctcccgcctgtccgagctcagggccatctacttccagcacaacagcttctccggcgaggtcccggcatcgctgttcgagctcaagaacctcgtgaggctggacatcgcggggaacaagttcagcggcaagatctcgcaagacttcaacaagctgatccgcctcggaacgctgtacctcgacgggaacagcttcaccggcgagatccccaagctgcagctgcctgcattggagcagttcaacgtgtcgtacaaccagctcaacgggtccatccccaacacgctccggaagatgcccaaagactcattcttaggcaacacgggcctctgcggcggtccactcggcctgtgccccggcgagtccgcgcccacgccggccggagcgccggagtcgcagccaggcgcgggcggtgcaggcgacgtcggtggcggcaagaagaagaagctctccggcggcgccatcgctggcattgccatcggctctgtgttcggcgtgctgctcttgctcgccctgcttttcttcctctgccggaagaggtccagcgcgccacggtcggcggcggcggcggcggagaaggggcgggaactcggcatggggccgatggatgtcgagccaaagggacagaacggctcagcaggcggccacaacggcgttgcggcggccgtcgcagttcctaccgccgccgctgccgccgctgtggctacggcggcagcaaagaccggcgggtcgaccgggtccaagaagctcatcttcttcggccccatggcggcggccccgccgttcgacctggaggacctgctgcgcgcctcggcggaggtgcttggcaagggcgcgttcgggacggcgtacaaggcggtgatggagaacgggtccgccgtggcggtgaagcggctcaaggacgtggacctcccggagccggagttccgggagcgcatcgcggccatcggcgccgtgcagcacgagctggtggtgcccctccgcgcctactacttcagcaaggacgagaagctcctcgtctacgactacatgtccatgggcagcctctccgccctgctgcacgggaaccgcgcctccggccggacgccgctggactgggagacgcggtcggcgatcgcgctggcggcggctcgcggcgtggcgcacatccactccacggggcccacggcgtcgcacggcaacatcaagtcctccaacgtccttctcaccaagaactacgaggcgcgcgtgtcggaccacggcctccccacgctcgtcggcccctccttctcgcccaccagggtgtccggctaccgcgcaccggaggtcaccgacatccgccgcgtctcgcagaaggccgacgtctacagcttcggcgtcctcctgctggagctgctcacggggaaggcgcccacgcacgccgtcgtcaacgaggaggggctcgacctgccgcgctgggtgcagtccgtcgtgcgggaggagtggaccgccgaggtgttcgaccaggagctcctcaggtaccaaaacgtcgaggaggagatggtgcagctcctccagctcgccatcgactgctccgcgcagcaccccgacaggaggcccgccatgtccgaggtggccacgcggatcgacgagatccgccgctccagcctcggcgaccggcaggtggccgacagcgccgaaggcgacgagccatctctataaccgccgtagcagtagctcctcccctgatccaccaccacacgtactgtgtcaatctcagtgaatgaaaattgcttagttctttgcatggatcgatattgctcttgcttcacatcagcaacttgtgcatgctccgttcatcatcggcgttcgagatggccaagaacaacagcat

SEQ ID NO: 22380 - DNA, 507 bp, Zea Mays
tctcttccgttccgtccttccccgaactcgctcaaaaccctagccaaacgccacagggtcgccgccggtcgcccggccgcatccgctgccgccgctgccgccggggacgatggcgaagcctcggcgtggccgctccgcgtctcgctccacctcgggatcttcctcccgctcgccgtcccactccgtctcctccggctccgtctcgtcccgctcccgctccttctcgtcgtcgtcgtcccagtcccggagtcgctcccctcctcctgctaagcgcagttcgcctggagcacggaaaggacgatcaccttcaccgccccctaaaaagggttcaccttcaaaaaaagttcgttcgccatcaccaccccctaaaaaggcttcaccccctaggaaagcgtcgcctcctgctgagtcggttgttctctgcattgatcatttatcaaggaatgttaacgaagctcatctgaaagagatatttgtacagctaggaacctcgaaacctgagaagag

SEQ ID NO: 22381 - DNA, 4647 bp, Zea Mays
gcacaaacggacgaactcgaaggcaggagcccccacggaaaggcaaccgagaagccgagaaaacctcaaaaccccgccgcggccgtttcctcccatttcctgctgcccaacacaacaccgcctccctcccatcgtcgcccctcgcgcacggccaccaccagttcgtgcgtgaactccgcgtcccctctcggctctcgccgctcacgcgttcctcgtgcccgcgccacacaccgcgggggcacggcactgccgagaccggcattgtggagcgcccgcgaccccggcgaggatctatattgttatacattgccgctttgattgctgatcttcttctgctgccactacttggatggagaatgccatcaagttaaaggttacaatttgaactgctggcaatggggcctcattgttccttcatcttgatcctactgctatgcttcacccccagctctgctttgactggacataatgatataaatacattgttcaaactgagggacatggtcactgaagggaagggatttctccgtgactggtttgattcagaaaaagccccttgcagttggtcaggtataacttgtgtggaacatgctgtagtggatatagacttgtcatctgtgccaatttatgccccgttcccgttatgtgtcgggtcattccaatcactggctcgtctcaacttcagtggttgtgggttttctggcgagcttccggatgccttggggagcttgcacaatcttgagtaccttgatttgagccataaccagcttacaggggcccttcctgtttcattgtatggactgaagtcattgaaagaagtagtgcttgacaataatttcttttctggtcaattgagccctgctattgcacagcttgagtacctcaagaagttttctgtatcctcaaattctatctctggtgccattcctccagagttgggcagtttgcagaatctggagttcctggaccttcacatgaacgcacttaacgggtcgataccatcagctttgggtaatctgtctcagctcttgcaccttgatgctagccagaataatatctgcggctcgatatttccaggaataactgcaatggcaaacctagttacagttgatctctcttcaaatgctttggtggggccactacctagggagattggtcagctacggaatgctcaactgataatattgggacataatggtttcaatggaagcattccagaagagatcggtgaactaaagctgctggaagagctcgatgtccctggatgcaagctcacaggcatcccttggacagttggtgatcttagaagtttgagaaagcttgatatttcagggaatgatttcaatactgaacttccggcatctattggcaagctgggaaatctgactcgtctatatgcaaggagtgctgggcttactgggaatattccgagagaacttggtaactgcaagaagcttgtctttgttgatctcaatggcaactccttttctggccctatacctggagaacttgcaggtttagaagccattgtcacattagatgtgcaagggaacaatctatctggtcccattccagagtggatccggaattggacgaaccttcgttcaatatatctggcgcagaacatgttcgatggacccctgccagtactgccattgcagcatctagttattttttctgcagaaaccaacatgctatcaggttctattcctgatgagatctgtcaggccaaatcactgcagtcactcttgttgcacaacaacaatctgactgggaatatcatggaggcatttaaagggtgcaagaaccttacggaacttaacctgcaaggaaaccatcttcatggtgagataccacattacttgtctgagctaccactagtaacagtggaattggcccaaaacaacttcacaggaaagctgccagagaaattgtgggaatcatcaactattctggagatcacactcagctacaatcagcttactggccctatacctgaaagcatcggtagactctccagtttgcagaggctacagatcgacagtaactacttagaagggcctattccgcggtcaatcggctctctaaggaatctgacaaatctctctctatggggcaataggctgtctgggaacattccacttgagctcttcaactgcagaaaccttgtcaccttggatctaagttctaacaatttgtctggccacatcccgagtgccatatcacacttgacatttctcaacagcttgaacttgtccaataaccagctgtccagtgctatacctgctgagatctgtgttggatttgggagtgcagctcaccctgactcagagtttatccagcatcatggtttgcttgatctttcatacaacagattgactggtcatataccagcagcgatcaagaattgtgttatggttacagtcctcaacctccaaggaaatatgctaagtggtgccattccaccagagctttcagaactgcctaatgttacatccatctatctttctcataacacattagttggccccatacttccttggtctgtaccgtcggttcaactgcagggcctttttctctctaataaccacttaagtggctccattcctgctgagataggtcaaatacttcccaaaatcgaaaagctagacttatccagtaatgcacttactggaacactacccgactctttactctgcatcaattacttaacctatctggatatcagcaataacagcctctctggacaaatcccattgtcttgtcctaaagaaaaagaggcatcgagctccctgatattgttcaatgggagcagtaaccatttctcagggaacctagatgagtctatttcaaacttcacacaactgtcttttcttgatatccacaacaacagcctcactggaagtttgcccttctcactttctgatctcagttatttaaactatcttgacctctcaagcaatgacttcaatggccccgccccttgtggtatctgcaatatagttggcctcacatttgccgacttctctggtaatcacattggcatgagcggcttagtggattgtgctgcagaaggcttttgtactggaaagggttttgatcggaaggcacttaattcatctgatagagttcgaagagcagcaatcatttgtgttagtatactcactgttgtcattgtcttagtttttctggtggtttatctgaaacggaggctattgagaagcagacccttggctcttgtacctgtcagcaaggccaaggctaccattgaaccaacctcaagtgatgagctcctagggaagaagtttcgagaacccttgagtatcaatcttgcaacatttgagcatgcacttctgagggtcaccgcagatgatatccagaaagccacggagaatttcagtaaggtgcacattattggggatggtgggtttggcactgtctacagggcagcacttcctgaaggtcggagagtagcgatcaaaaggcttcatggtggccatcagttccaaggtgatcgtgaattcctggccgaaatggagacaattggaaaggtgaaacatcctaaccttgttcctctacttggctactgtgtatgtggtgatgaaaggttcctgatatacgagtacatggaaaatgggagccttgagatgtggctcaggaaccgggctgatgccatcgaaacacttggatggccagaccgcctgaagatatgtattggttctgcccgcggtctttcgttcctgcatcacggttttgtgccccatatcatccaccgtgacatgaagtcaagcaacattctattggacgagaactttgagccaagggtctctgattttggccttgcaaggataatcagtgcatgcgagactcatgtcagcactgacattgctggtacatttggctacatacctccagagtatgccctgacaatgaagtcctctacaaaaggcgacgtctacagctttggcgttgtcatgcttgagctgctcactggacggccacctacagggcaagaggaaggggaagggggtggaaaccttgtaggctgggtgcgatggatgatggcacatggcaaggaaggtgagctgtttgatccttgtttgcctgtctcaagcgtgtggcgggtacagatggcccatgtgctcgccattgcccgagactgcactgtggacgagccatggaagaggccaactatgctggaggtggtgaagggcctcaagatggccgaaacgatagaatgtggacctctggttgtgacagtcaccaaggacatgtaatgctgacggcatcaacgctgatgtatggaactgggtgttcagggaatgttgttcttgtgtcgatataataatgtaggctccttgttgctgtagctgtactggtgactgtaatgagaaactaacgctgctcatgttcaggctgtagttattgatgtaaccttttcatctggacccaagcaagcacttatgatatggcagggatcgtttaagcacaaaagatgcagtgactaggtttagctcttgagattttgcattctactacattttctactttgttgttctactgctcatggtcctccccagattcaacccatgccagtttggcctgattactcagctatccttgctgtcttaatggggctataccgct

SEQ ID NO: 22382 - DNA, 1768 bp, Zea Mays
ctaaatgatgatcaagtgaagaaagaaatatcaaggatttttctccagatgaggaccttattgttttaaattgattaatctatgtgcaatatgtttggaactcctcagcacgagcatcagcagcgatgttgacagtggtgaggcggcagcaatctacacagcgcagtgctcccactcattccacttcctatgcatcgcctccaacatccggcatggcaacgtcagctgccctatctgccgtgcacaatggtctgagctaccacgtgacctgaaggttccaccattgctgcacaaccagtcagacccaatccttcgcatcctggacgacaacattgcgtcatcccgtgtgaaccgaaggtcctccatccgtgctgctcgctacaacgatgatgacccggtagagcctttcaccttggctgagcatgtggatccatgtctccgctttgtcctcatcccggcaccggtgtcagctcaccatcacgtcctcgggcattacccctgtggacgcatgttgccactgcaacagccatgccagtacagcggctcctccatgctttcaccaccgcagattgcttcgccaagtggtcaaaggcgagcctacctctctgtcagtcttgctccacagccagccatggacctggtcctggttgccagccctaacggaccacatctgaggctcttgaagcaggcaatggcgcttgttgtcttctccatgagggcaattgaccggttagccatcgtcacgaatgccaccactgcaacccgtgctttccccttgcgccggatgacgtcccatgcaaaaagaatggcgctgcaggttatcgaacacctttgctgtgttggtgggactgatccagtaggggctctgcacaagggcctcaagatattggaggaccgggcgcatcggaacccgagcaactgcatccttcacttgtctgatcatccagtccgcaactgtgttggtggtgtggacatgaaccactccagcatcccagtccaccagttccatgtcgggctcgggttcggtgtgcggagtggatttatcatgcatgagtttgaggagctcctcgcgcggttgcttggcggcgtgataggcgacacccagctgaggataggggagcatggcggaatggtcaggcttggagagctgaggggtggtgaggagcggaggataccgctcgaccttgcggcagattgtggcttcatactcgttggttacagttacctggagggtggaagagaggagcagctgaggacaggtgagatcgccgtcgggttcgaagagaaaggtgacaacgggtactgtggaatgagagagatggggctgagcattggcggcgagaggaggagctgctgcgccgagaggcgggactaccatgacccgttcatggcacggcgatgggcgaagcatttcaacgtgtacagggcctgagtagaagagcttgatcgtcagctgctgcgaaatatgagtcttgttggtttcttttctctctttttttccccattcctgcaagcatctaggtttggtgtctgctttttggcttcttttgttgtggatctgaatccctgtaagatctctctctctttctctttttgcatgaaatgtgtgggttctgtctgacaaaatctgcttgtgttgtgtgaatctgaacgtgaacagatcatactggagaaaaaaaagcagcaaaactagaaatattatttgattgagcttgcaaatttggaagccagggagttaaagaattattctttcgaagttgtaatgcta

SEQ ID NO: 22383 - DNA, 3269 bp, Zea Mays
ggagactggagttcacaactgttttcgctgtttctctctcccgtagcccagtttacctcgcctagggcgaccaccgccgccgccctacgccagctgcccaggtcttgggcggaccctttgccggcgacgagcacccaccacaccagatcaaactctagatattgccactctacgtcccagcatcctatgaccacatggtttagacagtgctgtccaggtggatgatgaattgtggtgcccaaacggaggcacgtggcacgcctcttgaagataggcactggttggaaacagattttgttggcgctccaagagttcatacttatgtactttcctttctcaaatcataacaaatcttaggcagttcaagcttagctgaatgtcaacttgcctccacgtgcaagatcccagaaacattgctatgtctcgtccgctcatagcagatctgggtatagtttctgtttgcaaaaatgaatcttcacgttcaagctgcagtacagggaacaacaatatacgaaaggactttttaaatggacttttggaggctggtgccacagaaagttcaggttctcccaattgccaactaggaaatgacgtctcttcagaacaatcaacaacaattgatattctgcagaagctattccttccatcaagtggtccatggcatgtgaataacgagtttgtttctgctgctctcatgaagttgccagaaaatgaacacagcaggcaattgcacaatgctaccagcgatgtgttatccaagcttcatgtggtgatgcgtacagtagataatcttcacttgaaacacaggcagttagcagcgaactatcaaaaacaaagagattcgagtgcctggaacagagctgaacagaaacgtctgaaagaggagttgactagtgttgttgccaagttggaaggaagcaaacaaaaactggcagtactgaaagcacagggagacaataaacaagcaacaccgatcctggttcctacgctgggaaacaaaaatatgactgcagaaaaggtgagagataaacaaacagaactgcaagatcttgaagctactcacaaggagttaatggaattgatttcaaagcgtctggaggaaattagaaggctgcatacagagagaattgaaattttgaacaagttagcaacttttcagaatatactaacggatttcaaaagcattcactcttccaaagcttttcaacttgtcaatgaccaacttcagaagtcacaagcagaactggatgatcaccaaacgttgttagagaaattacaggttgagatggatacctttgtttggcgagaaaggcaatttaatcaaaaagttgatttggctgaaatcccccagaaggtttctgcatactgtgtgtctagaattgctgaccttgaaaaggatgtccagaaactgtgtaatgaaaagaatatgcttgtgctgaaacttgaagaggcttcgagagaacctggtcggaaccaggttatctcagagtttaaagctctggtgtcatcactaccgagggaaatgggtgccgtgcaaagtgaactgtccaaacacaaggatgcttccttacagttgcattctttgcgagcagaagttcattcactttctagtatccaaaccagaaaggaacaagaaattgaagaaatgtcatttagatctgcccatgctggatctgatataagccaacttcaatctctggtccgtgagctgagggaaaatacacaggagcttaagctatttgtggagttgtataagcatgagtccactgattccagacagctgatggaatcgagagatagggaactcgctgaatgggctcgagttcacattctcaaatattctcttagtgaaagtaaattagagcaacgtgtaatttcagccaatgaagctgaagcaatctctcagcagaggttggcaactgctgaagctgagattgctgaattagggcagaagctagaaacttctaggagagatctagtgaaacaatctgatatactgaagtctaaacatgaagaatgtgaagcgtatgttgtggagatcgagagcattggccatgcctatgaagatataatgtcacaaaatcaacaattgctacagcagattattgaaagagatgatcataataccaagcttttcatggagggtgttaaatcaaaacagtcacacgatgctttgcatttggaggtgcgctcgttgcaaagaaatttgcagcatgcaagtactttgatggatttgtgcaaccagaaaactatccgcctagaggaccagctaagaggttggtcagagcggttgaggagactgtcagaggatggaatgcagcagtctatttcattgggcaattatcaaaaaaagctgtctggtatgcatggagaagctccaaagctcaggcagtcaatggatgttctacaagcgaaggctgggagcaatcggctggaaattgctgagctgcttatagaactagagaatgagaggtttggtaaaaagagactagaggatgatcttgatctaatgtcaagtaaagctaattctctaagagagaagacagataattcagcagttcttcagaaacttctccatgaggccaaggagtacaggggaatattgaagtgtggtatttgtcatgataggcagaaagaggttgtgattgccaaatgctaccatctcttctgcagtcagtgcatacagaagccacttgggagccgtcagaagaggtgtccatcttgtggactaagcttcggtgttaatgatgtgaaacctatctacatatgaaacagaaggttggcgcctgtgtcgcagcaccaaaacaaaactgcttggcgcttactaatttccggtatatggtaggcggccatggtaattcagtcggtgatgtagcataagattatgtagcatttaagttgctacatgtgattgctggtacccgctggcatatatgatgctggtgttacctcaagcgccttttgtaaagtctgcttgccttgcccaatctggtagaatagcctgacatcgtcaaccattagttccttttaggagaaaaaaatatccaacaaatgaggattgatgcttcctgcaatagtgagcaatgtacaatatatagctttagtcagtttcattgttgtagctgacagtaagaatgtagttttcttttctttttaatataccggttatccagtttgtatgtttctggagtttgccaattctgtttatcaaaaaaaggagatttagtcatttctaaccatttttttcttgtcacgatatccaaaattac

SEQ ID NO: 22384 - DNA, 188 bp, Zea Mays
gcaggttacgagtcactttgactgtgattgatgttaagtgccggtgggctcggccttcttataagtctaagtacttcttctatactttttattgaggattgtcattaagctagcatatatttcaaacttataaataatttataacttttcaaagtttattcatttgaatcacttttgtaagcactccg

SEQ ID NO: 22385 - DNA, 551 bp, Zea Mays
aggcacagacggacggcagagcttgcgtgtagcaaacagcgtcaaagccaagccttgcatccgtcgtggcttgcatgatgcccttcatgctgggggtctgcttcctatgcccttcgatggactgcctctggcacaagtaccattattgccccagctgtggggaaaaggtgggtgagttcaggaagtcggacccgtgcctcgtcgtggatgcgacccggtggtccgagccgagcttcgccgtgcctgcgtagcgcacatatgtacatgtaccacttgctatactgccttaaaaaatgagtgtgtttgtttctctcgtctagtctgtatataaaagatgctactggcttgttgcatgctgtatattactgaacctcaagaactgccgttgcgctctagtctctgctcccaacgttagaattgaatattttttttctttggaacagaataaattttctgctcttaccagtgcattatcgaatctagtacacgtgtaaatgcgtaacaggaaatttatcagcaaggaaagaaaagagacgggtcacataattgca

SEQ ID NO: 22386 - DNA, 820 bp, Zea Mays
cagagaagccgtccgggggcttgtcctgctgaactgcgccggtggcatgaacaacaaggcgatcgtcgatgactggcggatcaagctgctcctgccactgctctggctgatcgacttcctgctgaaacagcggccgatagcatcagcgctctttaaccgcgtgaaaaacagggacaatctgaaggacatcttgctctctgtttatgggaacaaagatgctgtggacgatgaattggttgagatcatacgcggaccggctgacacggagggcgccctggacgcgttcgtgtcgacggtgaccggcccgccggggccaagcccgatagccctgatgccgcggctggccgacctgcccgtgctggtgctgtggggtgaccgggaccccttcaccccgatcgacgggcccgtggggaagttcttctcgaagctgccgtcggagctcccgaacgtgacgctctacatgctggagggcgtggggcactgcccgcacgacgaccggccggacctcgtccacgacaggctgctgccgtggcttgaagcgctcctgccgcccgccgccggcgcggtgactacgacgacgacgacggttgtctaaggctaataataatacgccttattgctgactggatctttgaagtctagttggactcttcatttttaactctctagttatctctttataaaaaataaattctataaatcttatagattttgtttagaaccaactcagtttttaaaaaattggcttttattttttagctagcagtggccaacttcttagtttctaagagcatctctaatctaacatagttcctatttc

SEQ ID NO: 22387 - DNA, 1110 bp, Zea Mays
cgcatcgccgcgtcggcgtcggcgtcgtccacgttctttcgatctgtatgggtgtgcaactcggtgtttcgatctgtatgagtgcaagtgcaatgtatgggtgcaagagtgcaactcgatctgctttgggaaacatggtccatgtgcggttgtgtgcgcgccgcatcatgcatgaaacagtccagttcacttgcacattgcacttttgtttctgtcgggaggcattagtgctttgcattgcatccatgcctgctagcttggaggagttgcatccttttgtgcttggagtttattagtctcagcgctacggttactgtatatgatatcctagacaatggtcgcgactgccacgtgccggagccggtgacgatccaggccggagagcgtcgtctcagcaacggcgtcggcgcagcagcggtggcgacaacgacgacagcaacagcgggcgcgaaggcgacgaggcagcagcaagaggcaaagcaggataccggcggcggcgcgaggagggccgcgcggggccctgcaggcgcgctgatggaggggtcgcggtgcagccggaagaacgggcgcgggtggcggtgcagccagccgacgctggtgggctacgctctctgccagtaccacctcggcaagggccgtatgcggagcgggagcgccgcgaccggcgggcgcggcccaggccagctcggacgcaccgagcacgcgaagaaaacctccgccgctgcgcccaaggcggacgtgccgctgccgctgccgccgccgagcgtgcagcgctgctagaggcgcgcgcacatggctgtgatccgtcgaccatggggaacgcaagattcttggacatcgtggtggggttgcatatcatcctggcggtgcagtggtggcgactggaattcttttgttgcgtttctaaacattaattaatttaaatgttgtcctgcccacgtaccgtggctgttgttggctcagctttggcttgcggtccttgtggtggcgcatcgaagccccagtgcatttgccgcagctcgtttctttgttttactcggattattctaacccatgaaatttcaaaatgtttttgcatgaacagaacgcagtgcattgagccagggaaca

SEQ ID NO: 22388 - DNA, 2134 bp, Zea Mays
cacccatggcgataaaaaataaaaaatagaaatccatccaaaacccagctctgaaccgaaccgaaccgaaccccgccgtgctcgcttccactgccttcgattcctttggctctctctgtcgttggtcgtcctcgcccaccccaaccaaaaccccacggacggaacccaagaaagaagagaggggcacgagtccccatgaacgacgccggcgaggccgaggcgcaagaactcgccccacccggcgcctccgccgccgccggcctgcaaggcagggcggaggtcgacacctcgacgcccttcaagtcggtgcgcgaggccgtcgaccgcttcggcggcagcgccgcctggagctccgacctcatcaagcgtatgttcgcgctgcccccgagcccaaagaagcaggaggggggcgacgaactggccgatctggaggagcagaccgcgcagctagagaaggagctcggcgtcaaggaaagggagacgcttgatgtgctcaaagagttggagtccaccaagaaggtggtcgcagatttgaagctaaagatacagaacgaagctgcaccagtctcctggtacttcagtgctgaagggccttgagcaggcaaaagccaatctaaacaggaccacgagtgatcttgcagctataagggcctccgtcgagtcgctgcggaacgacattgcgaaagagagaatcttggtggagagaagccgagagaaggtatgtgccaacacgacactgattgcttctctggaggatgagctgaaccggactgcacagaagctgcagacgctgcgggatctgcagaggaggcgtgacgatcaatcggacatcttcatagagatcaagaagatgacatctgagctagagcagctcaggaatgcagcgagtgctgccaaatcggaagctgctatgctgtctgccgaaattgagcagatgagagctagcatcggcactgctgaggtgaggtgccgtgcagccaggaagatagaagaggcggcaagggcagcagaagctcttgcccttgctgaaatcaagatcctactacgcaatgaagcttcagttgaggatcttcagggcatggaagatgtgagcctttcattggaagagtactctgagcttgctgccaaagctcaggaggctgatgaacgctcaagaaagaaaatcgatgctgcaatggtgcaggtagatgaagctaacaggacagaatctgactccctcagaaagctggaggaagctcgattacaggttgaggaatgtaagaaggcgctacaggatgcccagaagagggtggatgctgctaaccgagggaagagcgcagtagaagaggctcttcgcagatgtcgatccacgactggacacaggaggaggtcggtccatgaccctcccaggttcaaacatccagctccccgttccagagattctcagaatatggatatcgtcggtgtttcaaagggtcccttgaaaccaacgttgtcaatagggcagatactgagtatgaagctaatgggaccagatgggtatgacaaaagcgtctgggacgacgcaagcgaagcttctactatgtcgctcggacatatcctgaaccgcaggcatgcagtcgtgtatagcagcgatgcaactgctcagaagaaattcccagggaagaggaagaagtttgcctttacaggactctctattttcttggcgagacaggccaagaggaagaaggaaaagggatcgcattagaaactgctgaagccaacttgggctgggaaaagagaagcattgtagtctaccttgctagctgttaactcagaccctagtgttactgttcttgtaatttactagtatgtgtcgttgataggtgcctagatcattggtttttccatagcaggctagtaagttgtagctgatatttctgtctagtggttatttcaggtgctgtgtgaacttgcaatgtagcagtatgactagtagctgatatcaagtatatgaggcatatgtggttcactgagattggaatcttcttctctgctacatgatttcacaactgatacctctctgttttgtgaacttggtcttttcaaccatggttctaacctgtcttgatgaaacgcgtgcttgcatgtccttcaagaaaataagaaaaaaaaa

SEQ ID NO: 22389 - DNA, 999 bp, Zea Mays
ctttctgcttctcccgtattgccgtgccctcctccctctccctgctcgctctctccctctcgtcgctttctttcctggtcgcgccgcccttcatcaggtctcctccgccttagccggtgaagagcgaccaggcccaataaataatcaccatggctcatcaaaagcgtgaaggcagctacgccgatgatgatagtacatccaagcgcatcaaaggcaccgacactgcttctgaaacgggggacagtgtagagtctagtgtttcacagcaaatggatgctgaagctaggaggacctgccaaaaggaaagcgaagcaccatcggacaaatgcgtttcagatggggaatgcgctgcaaactctaaggttttgggtgagcagaagatggtattgactgttgtcgaggctgatgcggcggacgacaagggttgcaggcacactatggaggacgcctgggtggtgctccccaatgctggtgcagaatccccaggaagcttgaggtgcgtacattttgcgatttatgacgggcatggtggtcgcttggcggcagattatgcacagaagcatttgcatcagaatgtcatcgctgcaggattaccacatggatattaaagctgcaaagaaggctgtaattgaaggtttccgtagaactgatgaatctttactgcaagaaagtactaagggaaattggcaagatggtgcaacagctgtatgcgtttggatcctgggacagacggttgtagttgcgaatgttggagatgctaaagcagtattggctcgttctatttcaactgagggtgaaggtgtggttgatgagaccaaaagtcaactaaaggctattgttttgacaagagaacataaagccatcttttcacaggagcgctcccgaatccagaaggtaatatgttttgtgtgttcagattcgtttattttctccctaattcctacttagtccataatcaatataactgtgctgtatccattttacattgtcatatcatgt

SEQ ID NO: 22390 - DNA, 4397 bp, Zea Mays
gtaggtagttgctgctgtgctgttcccccccgtctgtccctgagaggcccgcggcgtctccgcttcgcctcaccacccaccacctcctcctcgccggtacccctcgccggagccagcgagcttccggcgaagaaatccggcgggcacaccacacgggggcggagcaggggggaaggggtccggcgccggaatgggggcaagcggccgggtgctcaacgccgtcgtcgctggtgtcgcgtcgctctagggttaggtaggtgtccgtagctttctccttcgctccccctccctcccctttgccgcccggcgtcgcattggggtcccgtgccgaccgccaggccgcgtgatccacccgtgctcgagctcggagaggctcccggttgcgtggcatggggccatctcttccgcctgctgccgctgactgggaattcggcaccatttcttcgctctgaggagtagtaggtggcagcagtcgccgatctggatgccatctcaagtcatggatccgaggcgccacctctcccagttcagcaatccaaccgtggctgcgtcctccttctctgaggagcagtttcgccttcccacagagaggcaggtcggattttggaagcaggagtcgctgcatcacattggaagcaagtcagttgcatcttctccaattgaaaagccccaacccattgggacaaaaactgtgggtcgggtagaaccacaaccatacaagctgagagaccagaagactgcatttagccttgagcacaagacttttggtcaagagagacatgttaacctaccaccatctctgtggagagctgatcaagaccctaacctccaatctgatccatctttatttcccgatggaaggaggactagtccaaatgaggcctacaacgagaatgggcttttctcaagctccctatcagaaatttttgacagaaaattgggactgagatccatggatgtgcgtctacgccagccagttcaaaaggttgatctaactcatgtagatgatgagccctttgagttaacagaggaaatcgaggcgcaaataataggaaacatacttcctgatgatgatgacctactatcagatgttcttgatgttgggtacacagcccatgctaacatgggtgatgatgtcgatgatgatatattctacactggaggcgggatggaactggaaaccgatgaaaataaaaaaaatacagaacttaatggagctaatgatggtcttgggttgctaaatggcacaatgaatggtgaacatccatatggggaacacccttcaagaactctttttgtccgaaacattaatagcagcgttgaggattctgaattaaaactcctatttgaaaattatggagaaatcagcaacctttacactgcctgcaaacatcgtggttttgtgatgatatcttactatgacataagatcagcatggaatgccatgagggcacttcaaaacaagccactcagacgtagaaaacttgacatacattactccattccgaaggacaatccttcggagaaggatattaaccaggggatgcttgttgtatttaatgttgacccctctataacaaacaatgatatccatcagatatttagcgaatatggtgacataaaagagattcgcgatgcaccgcaaaagggccatcacaaaattatagaattttatgatgtcagagcagccgaaggtgcagctcgtgctttaaacaggagtgatcttgctggcaagaaaataaaactggagactggccgtctgagtggtgctagacgttcaacacagcacatgtccaaggagttggggcaggaagaatttggtgtatgcaaactgggcagtccaagcacaaatagcccttcattgccttcattgggttcatctaatatagcagcaatgacatcttgtggacgtgaaaatgggagtatgcatggtttgcattctggacttctcacatcaatgagcccgttcagagaggcttcatttctgggtctatcatctaccctaccacagagcctgtcctctcccattggaattgcttctgctgcaactcatagtaaccaggctccccttggtgagctcagccactctcttagtcggatgaatgggcatgtgaattatggttttcaaggcttgggtgctattcatccccattctcttcctgatgttcacaatggagcaaataatggcaccccttacaatctgaacaccatcacacctgttggtgtcaataagaactcaagaacagctgaagcagttgacagcagacatcttcataaagtgggttctggcaatctcaatgggcactcatttgatcgtgccggtgaaggaggcaagtttgtaaattttgacatcctagtctccatttttatgtttgaccctattctctcccatttccattctttaagcatgtgctttgtaataaagctgttaggtttatcaggattgtgaaagctaaactgtgaaaagttgatcaattaatgcatgttatttaattgatccctgcatgactgcatgtgtaccaatttttgcagccatgggattttcaagaagtggaagcggtcataactgtggtcaccagttaatgtggaataattcaaataacttccacggtcatcccaattctcctgtgctgtggcaaaatcccggatcatttgtaaataatgtaccgtctcgccccccagcacaaatgcatggagttccaagagcaccatcacacatgattgagaatgttcttccaatgcatcatcatcatgtgggctctgcgccagcaatcaatccgtcactttgggacaggcggcatggctatgcaggggacttgacagaagcatcaagttttcatcctggcagtgttgggagcatgggatttcctggtagccctcagcttcatggtctggagctaaatagcatattttctcacactggtgggagtcgcatggatccaactgtgtcttcagctcagatcagcgcaccatctcaacagagaggtcctatgttccatggaaggaatcctatggtcccccttccttcatttgattcacctggtgagcggatgagaagccggagaaatgattcaggtgttaaccagtctgataataagcggcagtatgagcttgatgttgaccgcataatgcggggggaagactcacgaactacactgatgataaagaatatcccaaataagtatacctccaagatgctcttggctgctattgatgaaagtcataagggcacttatgattttatttacttgccaattgattttaagaataaatgtaatgtcggctatgctttcatcaacatgaccaatcctcagcatatcattccgttttatcagagttttaatggtaaaaagtgggagaagtttaacagtgagaaggtggcatcacttgcttatgccagaatccaagggaaaacagccctgattgctcatttccagaactctagtttgatgaatgaggacaaacgctgccgccccatacttttccactcagatggtcctaatgcaggagatcaggaacctttccccatgggttcaaacatccgagccaggtctgggagatcccggacttcttcgggtgaagaaaatcaccatgacatccagacagtcttgaccaacggtgacacttcttccaatggagctgacaattcaggtcccaccaaggatactgagtagctgaactgcagcttgctgcatcgctaaccacaaaggcccaaacttaggctgctgcagaagttttgtctctggcgggaagctatatgcaagagggtggtaccggttcgttccccagaatctatgtgcttgttaacctgaaggccgagaaaggcgaaaaggcgcagggagagcctccagattttggtcgctgtaagaattaaccccatgttgtacagctggtcccagtaatttgtgctgaggggagagtgaaggagtcatttgatcagtttttagtggtggtgtgtggagaggaagagtcttgcctgcttttcctttttgaactttcttttgtgccttcacctgtgttacattttgagtcgagggctcctcttaaattgtgtgcagaggggctcgattttgttaccccagaacaaggcgcatgtgcgtcggcgtcgtcttctgccaccgtatctatcgaccttatgtacatcttcatctatatatagtatgagttttgatgtcatctatttcttggatgtctcacaaggttatttatttgtatctacgtgtctgttatgcttgtggtgtgtaaagcctctgtgaatcttatgcttggttgcttactatgtgagcatgaatgcaagctgtgagcgtgtaatccttgttcaaatccagagtataccaacaatagctaattgtttgtacattgctatggtttctatatgtagatcttgcttaaatggg

SEQ ID NO: 22391 - DNA, 944 bp, Zea Mays
tctctctcaccgtgcactgtctctatcctctcccatccacctccctccgcacactccgccgcctcaccttctccccctctccctccccgccgccgcggtccccgccgccacgctgtggcccttcttcgacgccgtctgctccgacaccgccatcaccttcggctcgctcgtcgcgctccacgagtacctttgagaattcgtcgttcttgtttcttacaagtggtgatggtggtagtggtctggtctctatgtgagcattggtctagagtatcgtgaagctatgcggctcttctttcatgttcaagatgaagttcatgaagcttggatcgaatctggatacctttaatgatgatggcaatgaaatcagatgatcgatcgcttcttttaatttggcttttaccttgtttctttaatgttgcctttgaatccttgtgttgttcttagaatctgactgatttttatttatttcaattataaatggtatgatctgactaagaaattcctagacgcattctccctgattgctgttactgttgatggatactagatgattatataatatgtggtaaagttttcccaataagctcagttgtgcagatcgtttgtttcttcttcttagttagagtgaaattatttactttatgaataactagatccatataggatatagtgatgttatttaggatggagggattcttatcgctctttggtgcttctccctataatcagtgctgaataactagatccatagtgctgataaatttttggtgcttctccctataatcagtaatagcatactaaaagtacctttgaactagaaaccttatgatattatttttccacaataaattcttggtgctactccctgtatatcagaggttataatcactcctgagcacaacgaagaagggatttacacgatcagattctacattcagcgaagc

SEQ ID NO: 22392 - DNA, 5845 bp, Zea Mays
agccgatccaactggctagggccatggtacgtgcctgcgtaaaagaaaaattcagagatggtcctcgactcctggtgggtggtggcgatctcccagctgaactgaaagagcaagcgtgcgtgtgagacaaccaggtccgatccgcccccgccgagccgaggacagcagcgggggctctcggtctcctcctaggctcctacagatctcgtaccccgtcacagatctcgcgccctctccatcccatgcccaccccccctcgtcggatctgaccactccgcccctcctcccgtctccgccgccggagctgatatccgcggtcatggcgggcgccgcgggcgggttcgtcacgcgggccttcgaggccatgctcaaggagtgcgctgccaaccgcggcaagttcgccgcgctgcagcaatccatccagtcatacctcgatagtatcaagggggctacagcagagggcgcggtcatcaccgaggcgctcgggtcagctgggcgcgtgctcgacgggccgcaggccgagctggtgctgcagccgctccgcctcgccgtcgagaccaagcacgtcaagctcgtcgagcccgcgctcgactgcctccacaaacttattgcttatgaccatttagaaggcgatcctggtttagaaggtggtaaaaattccccaatatttacagacatcctgaacatggtatgtggttgcgtcgataacacctcctctgacagtactgttctccaagtcttgaaagtgcttcttaatgctgttgcttcaaataagtttagagttcatggagagccattgcttggggtcattagagtatgctataacattgctcttaatagagccctgtgaaccaggctacctcaaaggctatgttaacccagatgatcagcattgtattcaggagaatggaatctgagcaggtttctgtatcgcccggaagctctgtggttaaagatatgccttcatctatcacaaatgattctgaaaatggagaaatatctactgatggccaagatgaggaaaaggttactctgggagatgcattgtccatgaatcggccttctgaagctcctccaacgtctgttgaagagcttcagaatcttgcaggtggagcagatattaaggggctggaagctgttctagataaggctgttgaacttgaagacgggaaaaaagtgtcacgtggaattgacctggacactgtgaatataatacagcgtgatgcactattgctctttcgaactctctgcaagatgagcatgaaagaagaaagtgatgaggttgctaccaagacaaggctgctatcacttgaactgctccagggattgctagagggagtcagcaatgtgttcatcaaaaattttcacttcattgattcagtcaaagcatatctttcgtatgctcttctgcgagcatctgtctcttcatctccagttgtttttcagtatgcttgtggtatgttttcagttctgttgctccggtttagagagagtctgaagggggaaattggtgtcttctttcctttgatagttttaaggtctctggatagctctgatagccccctcagccagaaggctagtgttcttaggatgttggagaaagtttgcaaagatccccaaatgcttgcagatgtgtttgtgaactatgactgtgatcttgaggggccaaatctttttgaacgcacggttagtgcgctatcaagaatagcacaaggatctcaaattgctgatactaactccatcgtgtcatcccaaacagtttctgtaaaaagctcctctctccagtgtttggtgattattctgaagtcattggctgattgggagcaacttcgaagagattcctcaaagcaagggagcattgttgaatctcatgaagaggatgcttcaaggagattgacaactgatgagatgaagaaccaagaggatggtcggaatcagtttgagagagccaaagctcataagtcgacaatggaggctgcaatctctgagtttaatcgtaaaccaagtaaagggattgaatatttgttgtcaaataaattggtagaaaataaggcatcatctgtagctcagtttctcaagagcaatcccagcttggataaggttatgattggtgaatacttgggacagcatgaggagttccctcttgctgtgatgcattcctatgttgactccatgaagtttatagggttgaaatttgatgctgcaattcgtgcgttcctgaaaggatttcgccttcctggtgaggcgcagaagatagatcgcataatggaaaagtttgctgagcggtactgtgctgataatcctgagcttttcaaaaatgcagatactgcttatgttcttgcttatgctgttataatgttgaatactgatgcacataatccaatggtgtggcctaagatgtcaaaatcagattttgttcgtatgaacactgcaagtgatgcagaagaatgtgtcccaaatgagctcttggaagaaatttatgattccattgtcaaggaagagataaagatgaaagacgattctcatgatacttcaaaatccaccaagagacctgaaacagaagaaagaggccgtcttgtcaatattctcaatttagcccttccaagactgaagtcagctagtgatacaaaggcagagagtgaaaagatcatcaaacagacccaggcacttttcaagaaccagggacagaagaaaggtgtttttcatgttgcgcagcaggttgagcttgttagaccaatgcttgaagctgtaggatggcctttgcttgcaacattttctgtgaccatggaggaaggtgacagtaagcctagggttgtatcatgcatggaaggatttcgtgctggtatccatcttactcgtgttcttggaatggacaccatgcgctatgctttcttgacgtccttagtgcggtttacatttttgcacgctcccaaggagatgcgcagtaaaaatgttgaggcactgaggactcttcttggtttagctgacactgatatggatgctttacaagatacttggaatgctgttttagaatgtgtctcaagactcgagtatatcacttcgaacccttcaatttctgcaactgtaatgctgggatcaaatcaaatatcgagggattctgtagtccaatcgctgaaagagttggctggaaagcctgctgaacaaatctttgtaaacagtgtaaaactgccaagtgattcaattgttgaattcttcaccgccctatgtggtgtttctgctgaagaactaaaacaaacacctgctcgtgtctttagcttgcagaagcttgtagagataagctattataacatggctcgcattcggctggtgtgggctagaatatggtctgtgttggcccagcactttattgctgctggaagccacaatgaggagaaagttgcaatgtatgccattgattcactaagacagcttggtatgaagtacttggagcgtgctgaattaaacaatttcacatttcagagtgacatactgaaaccttttgtcattttaatgaggaatacccacaactcaaaaatccgaggtttaattgttgattgcattgttcagttgatcaagtcaaaagttggtagcataaagtcagggtggcgttgcgtattcatgatatttactgcagcagctgatgatgaggatgaatcaattgttgagagtgcttttgaaaatgtagaacaagttatcttggaacattttgaccaagttgttggtgattgcttcatggattgcgtcaactgtcttattggttttgcaaataacaagtgcactcctcggattagtttgaaggctattgctctcctgcgtatatgtgaagatcgtttggcagagggattcattccaggcggcgctattaaacctattgatgttgttccagaggccaattttgatgtgactgagcattattggtttcctatgctagctggtttgtctgatttgactttagactccagaccagaagcatgctggaagggatgggctttcttcttctggggatgattggcttcgtgatactagcattcattcgctgcagttaatctgcaaccttttcaatacattctataagtttgctgcttgaatgtgcgaaaaaaacagaccaaactgtcgtttcaatttctcttggcgctttagttcatctgattgaagttggtggtcaccagttcagtgatggtgattgggaaacattattaaagagtattagggatgcgtcatacacaactcagcctcttgaactgctcaattcattaggattccataaatcaaacaaccagcagttactttcaagagaagaaagcaatgcacatggcaatagttaccatggcagccggggggaaccctccatcgttaataatggtgagcatagtcatgcagaggcaggtccacaaactagcctggagaattcggaaggtttaccgtcaccatcagggagaacacaacctgctgtttccccacgtggccaaagctttggacaaagaattatgggcaatatgatggataatcttttggttagaagtcttacatccaaatcaaaaggtcgagtcgatgatattgctccaccctcacctgtgaaggcccctgatgatgatgagacagacaaggctgaaggggaagagagccctatgatggaaactgtccggagcaaatgtatcacacagttgctgctgctcggggcaattgacagcatacagaagaggtattggagcaggttaaaagctacacaacagatagcaataatggatatcttgctctcactgctagaatttgcttcttcgtataactcaccttcaaattttcggacgagaatgcaccatatacctctagaaagacctccactgaatcttctccgtcaagaactagttggaacaacaatttatttagatatccttcataagtcaacagtggagcaggacaaaattgactccattgaggaaacaaatggtttaaatgtggaatctggtgaccaggaaaagatcaagtacctagcagaagggaagctggtttctttttgtgggcagattttgaaagaggcgtctgttctccagcctagcactggggaggctgccagtgcagacatacatcgtgtattagacttacgggcacctgttattgtaaaggttttgaaaggaatgtgcatcatggatgctcagatcttcagaaggcacctgaaagagttctatccattaattaccaaacttatctgttgtgatcagatggatgttcgtggagcccttggtgatctctttagcaaacagcttactccactcatgccctgaagtctggcagtatttcctcccttgcatagatcttgttggaacatattcttcgtcagcatttttgtgcaaacatggagcaccggttgggtgcttgacatccttaacgcgctttctggtgcaacagctactccctaggaacttaagagcttgatcagcgggaacggcaggtccctaggccacatcttttttttttggatgacgcaagggaagtagcttgactgatgcgcacaccgtgtttttcctagcaggcttgtactttggagctatttatctgtgcccggacagggatgatgcttccattatacagtagagtagtgttggtaatatgtacacattgttgagaacgttgtacttgaggcctgttgttattatacggcaatagtagattgtttgcggcaagcctcgttttttgtgcgtctaattctctgacttgcagaattgcggtggcaaatacccattgccctccaagttgtgcgttagcgtatttatccgtagttgacagcaatgaacatattactactgctttctgtattttctattaacgcatgcacatagtttattgg

SEQ ID NO: 22393 - DNA, 776 bp, Zea Mays
ttagagttcagatcttcctaggcatgtgtgtggacctacaaaatttttgtgatcttgaactttccagcttccttctgcttgtgggcacaaaccctccaattgcaatccgacacctcgcacacaactctatcgttcagctcctggtggtgctacgggggtgactgcgggggcgactgcggctggtggctgttgtcctcatcgaccatctcggcgacgtcctactcgagcgagatctcgctgcagtccctcgagatctgcagaactaatatgttgcaggaggagattgacaaggagattgaggacaagaagacagagctggagcccaaggtcgtggaggcctacgaagcatctcctcctgaggtcaaggctctgttcaaggataagaagccagtcaaggtcatcaagaagaactcggctgcagtcaccaagttcctcgatgagctggctaagattggccatgttattagtcttgacctgtctaggcatgtaccaatatttcatggcaaatcttatatcccaagttttttatatgctcaacaggccgcacttgaagaaatcttatatcagtttgaggaaaaactccaagctgaaaaagtggaagctgctaggaagcaggaagagttgcaatctgtttgatgccttttctagaacatatctgtggttagaactttgtcagaactacgtgcaatctgtttcaatgcttcaaacctttgtggtggaacctttgtatgtttgaacctctgttgtggaagaactagtgtgctggaattgtgtat

SEQ ID NO: 22394 - DNA, 4536 bp, Zea Mays
ccgggtggccccacacgcgcacatcgggagatgcccgcctgacctctacgcctccggccgtccccctctctctctcactttctcttctctctccccggccagacacaaaaacttttacttccccgaggcgaggcccgcagaagcagagcaacgcaccagcacgcacaggcacatctcccctacaacacgcatgcccacgctctagctagagaagccgccctgccctgctgtggtggtggtctagagacaaacaagcctttggtctccgtgcgtgtatcatcgtgttggtctgcctccctccctccctcggcccgcccccctgcctgccttctcgcgcccgcttccacccctgtccctcccgtgtcggaggggacacgcgcggccgcgtgggacgggcgcacgggcctgctcgcctgctccggcgccgcccatgcgcggggcccgctagctagccgacctctccctccccctctctctctctccatcgagcgcttggttggctagccgacggtccgggacgcggagggagatgatcaagcagcagcagcagcaggcgccgccggcgcctgctccggcggcagcgccgccgcccagcgcatgtgaaggggagaagaaggcgccgccgatcaactcggagctctggcacgcctgcgcggggcctctggtgtcgctgccgccggcgggcagcctcgtcgtctacttcccccaaggccacagcgagcaggttgcagcttctatgcaaaaggatgttgacggacatgttccaagctacccaaatcttccgtcgaagttgatttgccttctgcacaatgtcactttacatgcggatccagaaacagatgaagtgtatgcacaaatgactcttttgccagttacttcatatggaaaggaggcgctgcaactatcggaactagcgctgaaacaaccaaggcctcaaacagagttcttctgtaagacactaactgcaagtgacacaagcactcatggaggcttctccgtgcctcgtcgagcagctgagaagatatttccaccccttgatttctccatgcaaccgcccgctcaagagatccaagccagagatttacatgataatgtgtggacattccgccacatatatcgaggtcagccaaaaagacatctgcttaccactggctggagtctttttgtgagcggaaagagattacttgctggtgattctgtcatttttgttagggatgaaaaacagcaacttctccttggaaccaggcgtgctaatagacagccaactaacatatcatcatctgtcctttcaagtgacagcatgcatataggaattcttgctgctgcagcccatgccgctgccaacaatagcccattcaccatattttataatcctagggccagtcctacagagtttgttgtcccgtttgctaagtatcagaaggcactctatggtaatcaaatatctttaggaatgcgcttccgcatgatgtttgaaactgaagaattaggcacaagaaggtacatgggtacaataactggtataagtgatctagatccagtaagatggaaaaactcacaatggcgcaacatacaggtcggctgggatgagtctgcagcaggcgaaaggcggaacagggtttcaatctgggaaatcgaaccggttgctgctccttttttcatatgccctccaccattttttggttcaaaacgtcccagacaattagatgacgagtcctcagaaatggagaatcttttaaagagggcaatgccatggcttggtgaggagatatgcataaaggatccacagacgcagaacaccataatgcctggtctgagcttggttcagtggatgaacatgaatatgcagcagaactcatttgcaaactcggctatgcagtccgagtacctacgatcgctaagcaaccccaacatgcaaaatcttggcgtggctgatctctcaaggcagttaaaccttcagaaccagattctgcaacagaacagcattcagtttagttctcctaaactgcctcaacaaatgcagctggccaatgagttgtcaaaggcatctcttccactgaatcagattggtgtgggcaccaaacctcaagaacagactcaagacccaaacaatctgcagaggcaacaacagtccatgaaccaactacttccattgagccaatctcaaaccaatcttgtccaggctcaggtccttatccagaatcaaatgcagcagcaaaagcaaccaacatccatggctcaaaatcagcagccagctgccagccagtcactgatcctgccccagcagcagcaacaacagcaacaacatcaacaacaaaagttggtacatcaacagcagcagattttactgcagcagcaacaattgcagcaacagcaacaattgcagcaacagcaacaaaatcagcaacagctaaataagatggctgcacaaatgccaaatctggcatcacatcagccgcaactgtctgatcagcagcttcaactgcaactgttacaaaaactgcaacagcagcagcagtcgttgctatcacaaccagctgttactcttgcacaattacccctaatccaagagcagcaaaagttgattattgatatgcagcagcagttgtcaaattctcaaccactttcccagcaacaaacaatgccccaacaaagtattcaagttccatcacgggcaacaccaccaccaacaacaaccgtgcaacaagagtcacagcaaaagcttccacaaaagcatgttgggttcactgacacatcacataccaccattcctccgactacatcagtcaacaccatttcagttgtaggaagtcctctgatggcaactggtgccacacattctgtagttactgatgaaattccttcctgctcaacatcaccttcaacagctaatggcaaccatattgtgcaaccagtcctcggaaggaaccaactatgcagcatgatcaactatgagaaggtgcctcagtctactcctatgtcgatcccaagctccctggaagctgtcacagcaacgccaagatcaatcaaggaattgcctaagttgaattctaatgtcaagcaaagtgtaatggcttcaaagctaccaaatgcagggcatgtagctcaaaatttgactaacaatgcacccccgacggactatccggaaacagcttcatcagcaacttcagtgtggctttcccaagcggacgggcttctacatcatagtttccccatgtctaactttaatcagcagcagcagatgttcaaagctgcggctcctgagactgatattcagggtgcagatcccagtaataacacactctttggaataaacggtgatggtcagctgggctttcccatgggagcagatgatttcttatcaaatggaattgatgcttccaagtatcagggtcatatttcaacagatattgatggtaactacaggatctcaaaggatggccagcaagaaatatcgtcatccatggtttcacagtcgtttggtgcatcagatatggcattcaattcaattgactctggtatgaatgatggtggtttcgtgaacagaacctcttggcctcctgctcctcccttaaagaggatgaggacatttaccaaggtgtacaaacgtggagctgtaggtcggtccattgacattagtcagttcagtggatacgatgagttgaagcatgctctggctcgcatgtttagtatggaggggcaacttgaggaacgacagagaattggctggaaacttgtctacaaggatcatgaggatgacatcctacttcttggtgatgacccttgggaggaatttgtcaactgtgtgaagtgcattaggatcctgtcgcctcaggaagtgcagcagattagcttggatggggatctggggaacaacattctccccaaccaggcctgcagcagctccgacggcggcaatgcctggagagctcgctgcgatcagaactccggtaacccatctactggttcatatgaccagtttgaatgacctaacttgccggtccatacatgccggatcacaagtaggcgtctcgtgaggggatggcaggtgcagaatgtttgtagatgtgtcgccagatttacgtccgggagagcgaatcgctcgatggattggtagtgtttttgttcatatgtgtaggttttctcacatggaaggaatgtagtatagaggatgggagatgaagattaccgtaggtgaaagatgatgttgtaccatgaggggggaaaacatgcttgtagtagtaaagactgctgcttcagtccacgtatctaaaaagttcttctctgaccatgtgctgtttccaagtgttaatgttcatgcgtccttcaggaattgaaggcaataattcttgtgttgatgctcacaggaacacatatttagcgctgaggaagtttactcgacaagttcgttttcctgctgctactatggtaggcgcatttgtgggcctcgtatatcagcaccaacattgtcagaaggcaacgactcaacagataagataaagttttccttaaaaaccttcccaagttaaattattt

SEQ ID NO: 22395 - DNA, 4301 bp, Zea Mays
ggagtgagagcacgaaacctgtgccatattttttttgtcttcgatttgcagctccaagcagcagagctgcagagaggcgtcagcggagcacaagctggcgtccaagcaaagcccgctgaagtgtccccccctgcctttcttctctccttcactctctcgttcgtggcgacgcttgtgcgaccactcaccgtagcccgctcgacgccagttattcgccgtgcagctcgccggcgacgagcaccctccagcctaaggaggggagccggagatgttctactcgcagttcatcttggccaagaagggccccctcgggaccatatggattgccgcacacttggagcggaagctgcgcaagaaccaggtcgcggacacggacatcggcgtctcagtagcgaagctttgctgaagataaaacaagctttcaggtccactgctgttgatctacctcctgaggagtcaactgctccatatcactctataactctgcctgagacattcgatcttgatgattttgaactgccagaagctgtgtttcaaggcgatactgatcatcatgtgagcacaaaagagcagatcactttgcaagacaacccagagaaaacaggatattcaacatcccagtttggcctagatgaaagatttggtgatggcagttcatcacatattggcttggacttggaggaggaattaattctgaacaaggaccactcaattcatctcgagtctgatgatggtattattattcaaggtcggtcatcggtcccttctactgatatggagattgatgataacaaaagtacaaacataacagctgaaggatacagcaacatggacggtgggccttctagtcatgtaaagttaggtccactgaatgcagatgacctaggaggaaacagtatccgtaactggactggttacaatgtacagactcctgatttgaatgatatattattgcataataatgaggatattgcaggcccatcaacttcgtactatcaacctagcccatttacttgtgatgaacctgcatcaccagagttcattagcgctcaggccccagctacacctggtttaatggaagagacagttccttccagagtccatgaaagtcctgttctgagtccacagagaaaggcatcaccatcaactaatgatgaaactgcaaaggctgacactcctgctgcaccagcctcagattttctccattcagctacaggaaatgccagtgatgtggtgggtgctgagatgacagaacttggattggcgaaaccggtgcaagttgagtcttctgttgtgcaggactctgatgcatcggtgcaacagcacacaagtgagggtttaccatcccagggtcaagcttcacacttggaagctgctgctgataagttggtcggctctgatggtatagctgcatcggttgatgaaacggtaactgtcaatgcaaccattgaagatgtacctttggctgtaaatgattcagagccatgtgttgatggttctgctggaccatctgtggtgaacctggtacagatggatggtccattatttgatgcacaaggtacagtactaagtgcagattttcaacatgaagtccaagcaatgcaacaagtagtggcatctaacgatagactgaatgaactatcaacttcagaatttgccgagcctgagaaaatgctgacagctccgaatgctgaattcaatcatgcgattgacttggggcagataactgcggaaaaaggaacaattgaatctgatggaagtaacataataggcagcctaacaagcagaaaaagacacctggaatatagcttaccagctttagagagtgagaccactaaaaagttgcctagccgaccacatgttaaaagaaccaatgattttgttcctcatgatgatgatatactggcatctattttagtcggtaggacccctgggttcacacttgattcaacaccactaccaccaagggaatcatctctgaaacgcccaaggttggggtcgaagatgggtacactcaagagaaaagtgcagatagatgatgccatggtcctgcatgctgatactatacggcaacagttgatcaatactgaggatatacggcgcattcgtaaaaaggctccatgcactcgttccgaaatatggatgattgagaaaggttcactggaagatgatttattccacgagcccatcttttcctgcctatctgaggagctaaacaatttacacaatcggacatatgagactattgtacaccctgctgttcagagaatggaactacatggtcaattagacatgcctgaaacaataccagaatatagaaatattgctgggtttggttctgctactattgatggcccacttcacataccagatgggattcaatcagatgccatgttgtcaggcgcaaatgttgcatatggcgctacagctgcttttggtttgcaaattcctcctgactaccaggttaaccgtgcatctaatgattttgttgtcggcactcagcttcaagaggtggctaaaccttttattggtaatgagcacgaagtggcacctcctgacagagagcatgctcaagtagatacattgtatagtgaccgttttcaaggtgttccatctgatttgcagaggagtaatgatgcaaatgtttctagtcaagatgtggttctagataactctggccaagcttgtgctcatgcagtggacggcatgacaagggagtttaatcattttgttcatagagacgctaatctttttgggagtactgaggtccctgcttctgagattactggggtggaatataatcaagatgcctctggttttcctcgacaaacagaggatgacaacacggtggagtataatcaagatgcctctggttttcctcgaccaacggagggtgggaatgcggtggagtataatcaagatgtctctggttttcctcgaccaacagaggatggaaaaacggtggagtataatcaagatgcctctggttttcctcgaccaacagaggatgaaaacacggtggagtataatcaagatgcctctggttttcctcagccaaccgaggatgaaaacacggtggagtataatcaagatgcctctggttttcctcggccaacggaggatgaaaatgccgcgtctgctacgggagataattctggcttccaagaaaacaacacgggttctcatatggatctggatatgatgaatgactatgaagtgaaggaatgcaacgattttgggagtgcgattcatggcgttgatacagattttctgaactatggtgacgacgacaacgacgacgacttcgtcgacgccgacgagccaaatcccagtgagttccagtctctcgacaacagcggctggtcttctcgcaccaggggtgtcgcgagatatctcaagactctgttcgacgaggagtccggtctggggaggaagagcgtcgccatcgaccatctggtgcgcgggaagacgcggaaggaagcgtcgaggatgttcttcgagaccttggtgctgacgacgaaggactacatcagcgtggaccaaccgaaccccttcgactttgtgagcgtgaagccaggcccgaagctgctcatgtcagagttctagttcaacaaagtcagcgtaccctggcgcgatacattccctcttaccattgtatccatcatcacaccgaccaacaacaacaccgcagatatccccccccccctcctcttccaaaaccatttttgtgtatgttgttgcagttcccctcccctgtagcatctggtgcgctgatccgttgttgttgccagggcgtctgtccgagtaggatggtggttgtgttgtaccgtcggctatccaacagtatatagtagtagtatgattttagcgacactcggtgaagcccgccatgtaatctgctagggttcatgctcccctaagttactgtcgctttagactggctaaagcccgtagaggaattgtatacgagaaggacagggacagcccgagatgatgaatgatgtattgatgtgcctgttgactatgtgaggactgacggttttaactcaataattcaagtgacctttcctgtgaaccatgaatccatgccggatatgaggtaaagatgaggaatggcctcgtacatccgtgcctttcgcgatgaaagaaagtggcttgtgatttgttttcccgttacaggccgatgggcgatggtggcccagggaagaagagacgagagcaggagaggaacgagaagagaaggcgagaaatcggtagaggacgacgagtggctggcaagaggatcatgtcgtcacggtcac

SEQ ID NO: 22396 - DNA, 1993 bp, Zea Mays
aaattataatttaggagggtcattctaacgtcgtcttatatcagataaaatggttttcgcgtacccattagttcatgagcgctcttagttcattaccatatgtactcgtgttggtgcgttcgccccgtagcagccgtcgggcttctctgccttgtacttgcgatcgagtccagacctgcggagatagatctactagtcgaccgatccggatccttcccttccgtctcacgctgcttgctcgggacgggaaccggaggtggggttgcgatggcgctgcagtacgtggaggcgcagcggcagttgcgcccggacctctccgactggtacgcctccctcgccgacctctaccagcggaagctatggcaccagctcaccctcaagctcgaccaattcttacagctccaggtcgcacagaccggagacactatcattcagctctacaacaatttcattgtcgactttgagaccaagattaatctgctcaaacttgcccattttgcggtgataacttctcgccagtaccctgataaggatgctgcaattactttcttagagggggtgatcacaaagctgcgtgagacaagggagtcacggatcaatgaaccaattctctatgtgaagatgcaaattgcagctattaatcttgagaaaggaaacaaaaaagagtgcaagaatttgttggaagatgggaaaaccactctggatagtatgactgatgtcgatcccacagttcatgctagcttttactggatatcatctcaataccacaaggcctgccaagaatttgcagagttctataagaatgctcttctctatctggcctacacaactgtggagtctctatctgagtcattcaagctagacttggcttttgatctatctctagcagccttgctgggtgataacatttacaactttggggagttgttagctcacccgattatcaatagtcttattggaactaaggtggagtgggtttatcatatgttacaagcattcaacagcggcaaccttgccctctaccaagaactttgcagggttcacaatgctgctcttactgcacaaccagctttggtgcagaatgagcggaagctgcttgagaaaatcaatattctttgtctgatggagataatctttagtcggccatctgaagatagaactattccattaagtgttattgctgagcggactaagctttcaatcagtgacgtggaatgtcttcttatgaagagcctctcggttcatcttattgagggaataattgatgaagtggacagtacagttcacgtatcatgggtccagcctagagtgcttggaattccacaggttaaggctttgcgcgaccgcctggatgcctgggttggaaaggtgcataccacattgctttcagttgaggcggaaacacctgatcttgttgctgtgtaatttcacagctgttacacttccgcgagaggcttggtcagcaaggtcccatttgcaaaatgacatggatggttagaactgcacgcagtgtcacggagacgggaccaatggattgaaaatttcatactagtagggtgttactagtagaacacgatgcaggagaatcttgctggaacatgagttgtgcctgatgtttgcatgttgcactgcgataagacgtggatcatcattaacatattagctgtttttcagtgcacatggctcttaccgatcgctaatgttggtcatctgttaaatctgttaaagctactgcatgaactataccagggcacacaattaaaggtaggatacattctcctcttgccatgatgtaacacttcaaaattgagtttggagattaggcaaattttcttttcaaaatctaagaaaatgtgttctctagtagggattaattaaaaaaagagatccttagtcaaactatcctttgttcgacgatgtaatttgaaaatatttgaactaaaacatctcttagaatttacgtttttaaacaagtaataaatattgatatcac

SEQ ID NO: 22397 - DNA, 1596 bp, Zea Mays
atacctgtgccctaatagaatttttacccgtctggtttcggggtaccgattgccagccagagcgagagggagagcgagcgcgagcgcgcagtcgccgtccacaccgttgagttttttctcaggcttcgcatggcctgattcatcctacagtctccaacaagccaagcaaacgccgcatcgcgctttctccgcttccttctttcccctcacagggtcagaccccaacgccgggagaataggggattaggagccagacctggcggcgccgggcgtccaagaaacgctgcctaataaaatccctccggcgtctgtcgtcttgaccgcggcggcgcaggcttcttcttttcgctctccaccgtcatgaagattaaggggaacttgcatgtttgatgtacccctgtagcaaaaaattcttgtgataaaatttgttgaattagtcactgtcagggagggatctagttgtcagttgtttgtattaaagctgctggcactttccttgcagggtttctgtagaataaatgggagaaggtaacaattttcaactttatattgtttcttgtggatcaattgactgttgcacctttgcaacatcagagtccgtcattgtagaattgtgcttttctgttaccttcagaattagatgttattatacctgccatgtgtaaacatcagcatggctgcgtgttcctcttggggcctctttgtcatgcctctggaaggcgcttggtctactgtacataaacactctttcgtatcttaatcgaaaggcagagctcctgccacatctttcaaaaaaaatgcatctcattaacacttagacttgatgtaggatactggctctgttcattatcttaaatttccagatttaggaagaaacttcagttactgatcatattcttcctttgctttgcatagcacacttggatgaatgttgtcattgccaagggtgtgctggcaagtatacactactcagagatgaagaaaacccacggtggacaatctttgagaggcggcttccttgctgtggttgtgggataggatggtcttcttttcttttaggtttcttgtgtcctttgatttggtactttgcaaccactctttactgctgcaagtactacaacaaagatcctcgagagcgccctgggctagctgcatcagctgttgcggcactcatcttcacagtcctggcactcatcgctctctctgtggcactgataatctatatataaaacgaggaatgaacttgcgcttgcttgaaatgcgtactcaggcactcatcttcacagtcctggcagccatacatcgctctctgtggcacagatcatctgaaacccaaagcgaggaaaacgcggtagctggacctggcattcagaaggaacttgtaatttcagtgatagtagcatatagttgcaatcatccttcatgtatcaccatatcaagttgttgatttaaatgctgcaaccgtccctgttgtcggttgacctgtcggctgctgttgtctatcaacgaggatgatcattgctctatcgcaaactgtgtgctccgtgatctgcgatgcttctgaactcatgctgtcttggcaacctttagggctca

SEQ ID NO: 22398 - DNA, 925 bp, Zea Mays
tcactgtccgcatctcgagcgctctattccgccctgtgttctcgaacggtcccaaaccctaggcctaggcgcgaccagagtccatgtcggggtcttacggatccgacgactaccgcggcggcggcggcggcggcgtggtggtggaggcgggggcagaggaggatacaatcaaagtggtggtagtgaccgtggttttgatgaccaccgtggtggcagaggtggcagctatggaggacgagaccaggagaaccaaaagggtagtgaaggtggctacaatgctggtggttatggacaaactcctcaaggtcctccttcctacggtggtcctgcaggctcatacccaccaagctatggtgccccgcctccacaccaatatggtggtgccccaggcgggcaaggcggcctgcctcctacatatgctggtggatatggtggtcagtccatgcctgggggtggaggatctgggggtgcaccgccaccttatcgtggcggcgctagtgtttatactggtagtgctggtcctgaaccagctggaaaagtcaagcaatgtgatgaaaattgtgacgagacatgtgacaacgcaaggatttacatatcaaatttgcctcctgatgtcactgttgaggaattacaggagctatttggaggaatcggccaggttgggaggatcaagcaaaaacgtggttacaaagaccagtggccctggaacataaaaatctacactgatgactctggaaaagccaaaggagatgcttgccttgcctatgaagatccttctgctgctcattcagctggtggattttacaataattatgacatgagaggctacaaaatcagcgttacgatggctgaaaaatcagcacccagagcagcaccttcttatggtcatggcaagagtgacttcatcaaggtgattacacaagcg

SEQ ID NO: 22399 - DNA, 989 bp, Zea Mays
attaaatacctcatcattgcggcaaagccaaatcgaccaaaacaatgctgcaacgccattcatggtgttgagtatgcatttggagcacatgactattcgattagtggagtttttgaggtggaacctcggcagtgtcctggtttcaaatttcggaaatcaatatgcatgggaactaccagcctggatcctctccaaatcagagagttcatggagattcagtcagtaaattacaatggtgatacctaccatttgataagtaaaaactgcaaccatttctgtgaggatatctgcaaaaggttgacaggaaattttattccaaaatgggtgaatcgacttgctagaatgggtgctgtttgcaactgcattctaccagagtccctcaagatcaacgcggccggtcatgacccagcttctcgagctgaagatagcgagagaaaaatgctgacaagttccttcagttgcttctgttcaatctctctatgccaaagacatttctcaacatcttcgccgtctctgcgttcctccgcgaacggcacttcttgggataccaagcagtccaattctacccgactgaagaagagctgacagttgaggtcctgtgtatcatatttaactcatgaggcacaaggatccttttttgtcagcaatctcttctacgaccttcatcagagaaggatgaagaggtattgattgataaggtgtttttgcatactcgagcgtcggatccagctgtgcttgaacatctgtacagagattgtgtagaaattatttcttacatttgaatttgaaatacagtgagctggaggaaactccaccctagacttttggaaaaaaacaaactccaaaaaaatcattgatgggtgctgcctctggagtccgaagtgatatttcgcctgtggtagtttgcaaatttggccatttttatacccttgcctatataaagttttatagttttgttttggttgcatgaggattataggagattgagg

SEQ ID NO: 22400 - DNA, 491 bp, Zea Mays
ttaaatcttccgaggaatagaggagggctgagactttgcttggctacctgcgggagcagagacaagggtttggctgcagagctggagcagtggtagcaactagcttggccaggtaaagcaagaattatggtcgaaatctgatccattctctgtggaaattttgcgagcagatgtaaataacagcttattctggttagtttggctatgtgaatacacatgtggtttgcgagtgaggatgcttggttggttactaacgtagtgtcagttaagagtaaggcttaagatttgggtggtaatgacgataatgctggtttgtagctatgtacaggatgctagggtatgcttgctttgtcttgtcaagttatgggggaacgttggattgtcaatcagtgttttttttgctcgaggtcagagtccaaattcctctcttcctttttatccactcactaagtcattgccacacccacatgtttgcggacgtttcatgattc

SEQ ID NO: 22401 - DNA, 5103 bp, Zea Mays
cccaaccccacttcccgtttttcatgcgcgtgagggggtgtggtgttcttccgttcggttagctcgtagccgccgccgtccgtagttccctctccgcgcgtggccgccggtcccgcggcttcctcctcccgtgcgtggctgtggcgccggtcccgcggcttcctcctgagcgggcctgctcttcccgtcaggcctccgcacccacggccggatctcttcctctcgtctccacggccgccttcctaggacagccgttgcccgcgcggtgcccgcagccgcctcgtcggcgcaacgctctcttcctccccagtccctccatcggaaccaccctaagcttccttagcccattcggttctaccgaaagaatccccatcctctgtcgcgtccgccacctcctctgcggcttaccagccggactcctcaagcctcccgcttagccccctcgccggtgatggccgcggccccgccggtagccggagaagatattaaagacggcgttgaggtgtgcctgttcgatgaatcagcagatgggttctcgagaactgtgcgcgccatctcggagctcgtcgacatagagcccgaaacagacttccctgaggcggaagttgagcggctctcctcctcaataacgttcctcagagaatggaggcacttctcgtatgagccaaaaagtgtaacattcactaatggcaccgagtccacttcatatagagatgacatgcacagtgtaactttaccacagttttcatctgcttctgttccccagattacacctcaggaagaccgaggggataatacggtcagctttgattttattctatatgcgggggggaatgtctgggccttggactggtgccctaggttgtgcgacaagcctgactcttctataaactgtgagtatcttgctgtttctgcgcatcctcctggttcttcttaccataaacttggcatgcccttaaccgggagaggtatcattcaagtttggtgtctgttagcaccatttgaagattcacattctcaccagccagtgaatgcattcaataatggtaagcaaagaggaaggcctagaaaaataccttgtagtgataagctggtacctgttccaaaaggaccaagggggaggccaaaaaagagatcttacgatgatcagttagaacctgttccgaaaagaccaaggggcagaccaagaaagtatccattaccagttgcaaaatttgaaggttcatctcaaaacggtgaaagtcaggatattattctttttgatcccctttctacttcaagttttattccagatgacctttcattggcttctgtcatgccaactgaaaagtctgtgcaatcaacacctaaaagaggcgctgatgttgaattagggaaagagacaacttgtcagactgcttcatttggctgcagtttggaccacactgcttgcacagagtttaatgccaagttatgtattgttgcagttgatgcagcattgccacctattgacaaactgacctgttcacctggtactgtatcaggagatgtgtgtacagccccaactctaacaactgcaatctgtacaaaacctaagagaccacgggggagacctcgaaagtatccagttcaaatcaatggtagatctgtttcaggcactgttgctgaattaggacaagagtcaacttgtcagccagtttcatttggccacactgtttgcacagagtttaatgctaatttaagtattgttccagttgatgcagcattgccaattgtcgacaaactgtgcagttcatctggtactgtagtaaaagaaagtgtgtgtaccgaaccatctccagcaactgcaactcgtaagcaaccaaagagaacacgggggatgcctcgaaagtattcagacactatgattgacctggggaaagatacaactggtcatcctgttttatttggacgcagtatggatcacactgcttgcacagagtctaactctagttttagcattgttgcagttgatgcatcatcactgtttgcatcttcatctactgcaacttgtgatgataagtcaaaaggtcagagcattagagggaaagataagaagaaaacaatttctaatgctctatattgccctgtggtttctggtgttgaatcacagagcatttgttccacagaaattcttccaaatgatcctgcagtctctgttgagaatgctttgccatctgcacagaacacggtatcaatgaatgagctttgttcggctagcttgttaaaccgtgagggtaatgcgtgtaaaagtgctctttcagatgattctgaactgcctatccacatttcacctaaatcaagtaataaaagagagtcaagtggcaggaggggaagaggaaggcctaaaacgataccactttctgctggaactggtcattttgtggcttctgttgccagtctcccaaagacaacctgtgtactgactagttcaagcaatctcacgtcgttgaacaagagtggtggcaaatttatagtaagtagcgttagttcatgtggctgtgatgttgagaaatgcagtgttcattcaggtgttttgttgtctgatgatgcaccaccagcacatggcttacaaaatacaaattgtaaggaagaatcgaataccaaaataggaaaagcgggatctagaaataagcctgttgcagttgagcacaatcattttactgatcttaatgtaaaagaacaaaaagtgcagacaactccaatgtcaggtgatcctgtgatcttggttgaaaattgtatggaaggacaaggccccagaaaggctggggggcaacttcaaaggatacctgcttcaaacaagagtagtggcgcatctgttggtggtggaacatataaaatagagacattatccacaccaatgactaaaggatcatctaaaaataatgacatggcttatggggctggtttgaatcagtctcagaatgcaattgttggttgtgaaggcatggaagttattgaaagcaacactgccaattatacttctcattgtaatgaaaatgcacgagcaaatcaagttgcacccagtttcaagaacagtgatagggtcattgatgaaacggaagctgcggaacttgggccactcaaggaaccaagggaagatgacaatttgtttacttgtgtaaactcaaactcagcttcaattacaagtgacattgctcaaccaagagttgtcttgtgtttagctcacaacggcaaagtcgcttgggacatcaaatggaagcctcctttactaagtcaacctgaacagaaatcacgacttggttttcttgcagtattgttggggaatggcgctcttgaagtgtgggaagttccatcaccatgtatgatccagaaaatatattccccctctaaggtggagggttctgaccctcgttttctaaagctccaacctgtatttaggtgtgtcaaagtgaagtgcaggaacaggcaaagcattcccttgacagttgattggtcaccttctcctcctcatgatatgatattggcgggttgtcatgatggaacggttgctttatggaacttctcgatgaatttgccaacacaagattcaaaaccttttatgtgtgtcactgctgattctgttcccattagagctctctcttgggcaccatatataagtgaagaaagcacagatacctttgtcactgctggagaggatggtctaaagttctgggatttaagagatccataccatcctctttgggagctaactactgctccaagggctgtattaagtcttcattggctaaaagatggaagggggatcattatctcactggaagatggtacattgaagtttctaagcttgcctcggattgcaaatgatgttccagccactggaaggccattttccggaacaaaaactcagggtgttgcaacttatcagttgtcagaatatttgatttggagtgtccatgcttcagaacctacaggttgtgtggcttactgtggggcagatggtactgctgtgtacttccagctaaaatcgagattctgggataaggagcctgggcgtaaccgtgttccttatttcctctgtggatcattatcagaggatggagaaaatattaagattggcagcaggctgcaaacatctccattaccaaatgtgcctgtggggaccaaaaagggttcaaaaccatcccaaagtatagttcaggcgcttgctacaagcgatgtcactagcctgctgacatatcagctcaactcccccacaggaaacaatgatgccgtaaatctagaagctcatgatgatcaagatgatggacgcagcaaagagcaaggagcaggtgctgtaaatcaagaacttgatggtgaacaagatgatggacaccgtgaagaacaagcagcaggcatggtaaccacagaatttggcgatgatcaagccgatggacacagcgaagaacaaggagctggtgcaataatctcagccactcctgcaaaggaagagaatgatggaacatggaacgacaagggtgttcaatcccctaaagaccttaatgtcgtccctccgaattctgtcgctttgaatcaagtgcggtggaacatgaacaagggtagccagagatggctgtgctatggaggtgctgcaggcatcatacgatgccagagaatctgaagagccgcaatctggaatgctcttcgagaaacagaggcttgtcacacagatggtgaacatgatgcattcgggaggaaataataaatgccatagtgctcgagattctggtttcctgatgtggttcctggacgctgacatgctattgtactgagttgtatcgaatttcgtgatgtgatcatgtgatttatggtcgctgacactattctacacccgcttcgtctcggaacaaagttaattgaactatatcccatcacgacactcgagtcttctgagcgcttagcgtctctctcaaatagatcaggtttctttgcaagctacctgttctgagctaggccttctaaatttatgcaacaatgaccgttacgcttgttcaacgctatatttagattctagatttcttctagccttctaaaaggaacgctcactctcacaatcccctcttcgtctaccaaaagctacgtagg

SEQ ID NO: 22402 - DNA, 4154 bp, Zea Mays
aaaagaagcgcgcctgtcagacacgaaactgtgcaacgtggagatcgcaggagggcccgggagaatttatccgcagcatcgcccgttctccagaccccactgccgattccgcgattcgtttcggtgcctccgcggtggaggtggagcggagccagcctcttgccgtgccgcgcgcggccgtggccgaccgagcgagagagtggcaaggcaagcggggatttgcgggaaggaaggaaaaccccgcgcgagactcacgtcgcgcctccggcctcccccctcccccctcccccagcgcgcctttcggattctgttgcgccctcgccaggggcctcggcgaacaagcggtgcgcgcgagcggcgggaaccctaggcggcggtgatggcgagcaggggagccgtggcgccggcggtggaccctagcagcccgagctcgagggcgtggggcggggaggacgagacgcctggggcggggaaggtgaagctgatgtgcagctacgggggccggattgcgccgaggcccggggacggggcgctgcggtacgtgggcggccagacgcggctcatctccgtaccgcgcgccgcctccttcggggagctcctgcggaaggtggaggcggtggacgaggcctccgcctcctctggcggggtgctactcaggtaccagctccctggggaggacctcgattcgctgatctccgtctcaggcccggaggactacgacaacatgatggaggagtacgagaagctggccgctgccgcgcccgacggctccgccaagctgcgggtcttcctcttcccggcctccgggagcgatgcggccggctctggctccgggtcccacctcgtcgccgcggtggacgagtctgggcagcggtacatcgacaccatcaactgcgtctccgcggaggctatggccgtggccatgcgtccgaaggacagtgtcgccagtgccggttcctccgcacacaactccgaggcatccgagtacagcggcctagtggaagagccatcaacgttaccgcctcatcaggttgctcctgcttatgcaacaccgcatcagccgcctcaagtgccgcagtcgtacatagagccacagcaggcagtacgttcaggcctgcttccgcaggtgcagaaccagttctggagaccacacagttcacaaggccagtgcaagctcaggttgatcatagttaccgggtggtgcaaactccgctatcacagcttcctcctttgtcttctgtgcatcagcaggcaaatgatgcgcagaggcagaggtttggtgttcaacaagcgatgataagtgcagtaagcatgccagtggtgaccagttcaggcacaattcctgtggtggttagctcggccactgttccatcattgagatatgatgattgcacaatgtgccaaaaagcattgccacatgctcattcagataatattatccgggagcagggaaattctcgtgcaacaggcaaccttgaggcagctccaatgttttatagcccccatcaagacagtggatccaacaaatctagtctaggtgcaagttcaggaactcctacaaactatgtggcggaaccaagagctgggaacacagcagtgatgacacaatttaattcgactcttcctgccagaaaacctgcagttcaggcaactgcatctccggatacaggtgtgccggttcaacccaccgtgattcctttaccagtgtccagtgcacctgctccagatggagtatttgtcggtcattctcctcaggctggggctgaagatcctgtcaggtaccagcagcaactattctcttatagcatgcagccagcacaagttctagtgaatggcccacaaggcattgatgccagtgcatacaaggattcaaatcatccagcagcggaaccgctgagagaatatgcacacaatcttcttcatgactatgccagagctatcgatgttcatacgcaagcagttcatttgggtcctattgcaccaccagaatctactgtgcatgggaagccttctacttatggtatcattgatcatgccaaagttggaaagctacctttaaatattgatggtagttctatctacaaatctcaagctggagggtatcatatagggattacaaatgcctttgctgctcctgcattcaaccaagaggaaaacatttccaggcacagtgagaagccacgttatgcttttgatattggtacacaaaatgtccatcctgacataatccagcaaccacccaatctggctgtccagagcaaccttatagctcccattgaaccacctggttctaatgaaaaggttactgtgctaccatctaactctggtgctcaggttccttctggatcacctgtacagcgtcctaaagaaatggccaatcacttggtttcaattccccccaatggcagtaacaaatttccattgcagtctactgttggtattgatcgtgttgaaggtacacaggaaccggcttatgcagattcacttttctcaaatcaggatccttggaaagcagtgggcaatgcatctttagtgcctccaagaccaaacaagctaactaaggagtctgttgtttctggaggtcaatatattgatggccatatgcctgatatgaacatgcatgctgccataccctcagaagaagactcatgttttaaggatatgcacacagttaaattgaacaaaggacctggagaagatagtatcaagcgacaattacaagctgttgctgaaggggtagccgcatcagttcttcagccaccctttcctgaaaaaacagtggtgttctctggggatcacatcgattcgcatggagcagaagttgatgtcaagttccaggatgaagggaacaatcagtcagacaaaataagtcaaggggttcaagttttagatgacaacgataaccttcagataataaagaacagtgaccttgaagaattgcgtgaacttggttctggaacctttggtactgtttaccatggaaagtggagaggttcagatgttgctataaagagaatcaacgatcgatgctttgctgggaaggcttctgagcaagagcgtatgaggactgatttctggaacgaggcagacaagcttgcatctttgcaccatccaaacgtagtagccttctatggtgttgttgtagatggacctggtggatctgttgcaacggtaacagaatacatggctaatggctcactccgacaagcattacaaagacatgaaaagatctttgatcggcgtaggcgtctactaattgcaatggatgttgcatttggaatggaatatctccatgggaagaatatagtgcattttgacttgaagagtgacaatctgcttgtcaacctaagggatcctcaacggcctatatgcaaggttggtgatttgggattatcaaaggtcaaatgccagacactaatctctggcggagtaagaggaacacttccttggatggcccctgagttgttgaatggcagcagcagccttgtctcggaaaaggttgacgtcttctcgtttggcattgtgatgtgggagctacttacaggtgaagagccttacgccgagctgcactatggggccattataggtggaatcgtgaataacacgctgcgacctccggtgcccgagtcctgtgatccccagtggaggtcactgatggagcggtgctggtcagccgaaccgtcagagaggccgagcttcaccgaggtcggcaagagcctgcgcgccatggcttctcctaccaaggcacaacaatcgaaatagatgctttagccttgcctctcgcgtccttctgttcagcagattgtttcagtcttcaaaccgaggaggtgccaccatggctggcctgccttttgtacatgaataagttgaagaaaaatacgagaatgtggcatgcttatagagtcggtggatgcttgatgcttcctgtcttgcttttgacatggatcgtggatatatatggtagtacagcgtagtgtaagagtggcccctcgttctcacgtccattaggagttcaggacgaggtgagagcatctttagcagcgctcaaattagggcctcacttttgatctgaagacttattttggcgggcctagcttttgacatgtgctctaacaaagttctccaatctatcgcaacagacaatgggcctgttt

SEQ ID NO: 22403 - DNA, 1867 bp, Zea Mays
gtgcatgtcaataccttccaaagcatcatgttacttatttgattaagctatgatttgaatagctctgaagaggaaaggaactctatcaagatcaagaaaagtatgaaaagctgaggaggcagtgccaacaaattctgaatggctacaagggaaatgggttgaaggcaataactgaacttaatagtgatgagtgttctagtttagatggtattgctgaaggatcagaatcaccttgttttgaagatgccaatgctatacgtgctcctgtttcactcgaggaggtgaagcctgaacagaatgaagctgaccaaccagacaacattctctgtgatgttgttgaatgcatggaagaagatgcagatgagttagcttatgcatatccatgcaaagcagagtcagaatcgtctgattctgaatcatctgatgaggatgaccctggagggatttctgtgtctggcgacgagaactgtgacccagatactaaatttaccatgagcaattcattcaaggcagatttttttaggtctagcagaacatcagaggacttcgccacatggcagcgcatcataaggttggatgctatccggtcaaacagtgaatggattttgttctcccgcaaccagtctgaagttcccaaggagagagcattgcagtctgcagcatctgttgggttgaaagactatgagcacttggagcccagtatgatttatcatgcagctcgattagttgggttgctcgaagcatatgcggtctacgatccagagattggctactgccaaggcatgagcgatctgttgtcacctatcattgcggtgatggaggatgacgatgaagcgttctggtgtttcgtgggtttcatgaggaaagcaaggcacaacttcaggctcgacgaggttggaatacgaaggcaactgaagattgtctctcagattatcaagcgcaaagattcgcacctgtataggcatctgcagaagttgcaggccgaggactgtttcttcgtgtacagaatggtggtggttctgttcaggcgagagctcacctttgagcaaaccgtgtgcctgtgggaggttatgtgggctgaccaggcagccatacgagccgggatcgggaggtccacctggggaaggataaggctgcgtgctcccccaactgacgacctgttgctctacgccatcgccgcctgcgtcctgcagaggaggaagctgataattgagaagtatagcagcatggacgagatactgcgagagtgcaatagcatggccgggcagctagacgtctggaggctgctagatgatgcacatgacctggttgttaaccttcatgataaaatctgatctgatctgttctcggccctcatggtagaacagatgtactaagcctcaacaaaaggaaagaaaaaaaagaaactgaggctccttccacctacggcattgttcgtttattccaattccacatggattggagtgtattggaatggattaggatagatttttatttgctatggatttaaaccgacttaataccacccaatctacatggattaatggtgaaacggccaagccctaaggaggccaaatggtggtattctgttacctgctattcgttcccaccacagaacccaattctagatatagagaatgttgtaacttagagtgccctcgcaataaaaaggctgaaatattgcttgtgttcccgtgtagtgaggggttaacgtgttatagacttataggcaaaaacagagtttcctgggaagtcacttgggagttaattttatatgcatccgcacttgggagttaattagtagaaatagtatggtcaatgttttggtctctttttaatattatatcataagtcagaaggttggtta

SEQ ID NO: 22404 - DNA, 2930 bp, Zea Mays
ggacaacgtcgaactttggcccagcaagctcacaccccgaaattccacctcaaaaatcaaaaagagaaaaaaagaaagaaaaaaaaggcgaaacccttctctcccccgccccaacccgatctctcgctgcctgcctccctccggtcccccgtggccccgtcccctcttcgccaccgcaccgactcgctcacaaaatcctcacgccggactcctccgccgcctccgccgcgccatgcccgtcggcgcctgattcatgtctcagccccacgccgccgctcccgcctcgaagcgccccttctcgtccaccaccacatccccgtctccgacgtcctcccctgcgacgccgcttatgaagaaggccaagcacccggccgccaccgcctcctccgttgggacggtcgagaagaacggtatccatcttgataccgccgccgccgccgccacgggcgggggccgaacgaacggcgaggaggatgcggaaatggtgctcgtggaccaagatgagctccccgcgcccagcgcgccggcctccgcgggcgttgccgccaacctcttccgaaagaaggccacgcttccgcagccgtcgacctccgcccgcaagcccctccgcatcagaataggtcaaccaaaactgccaaaaaacttcgaagaggatacatggacgattttgaaggatgctatcacagctatttttctcaagcagaaactttcttgtgatgttgagaaactctatcaggctgctggtgatctttgtctacacaagctaggggcaaacctatacgaacgaatcaagaaagaatgtgaaatacacatagctgaaaagatatcagcattagtgggccaaagcccagatttggttgtatttttgtctctggtccaaagaacatggcaagatttttgtgatcagatgttgattattcgcggtattgctttacttcttgatgtaaaatatgtcaagaatgtagcaaatatttgttcagtatgggatatggggctgcagctgtttcgcaagcatctatcactatccccagagattgaacacaaaactgtaactggccttctcagattgattgagagtgagaggcttggtgaagcaatagataggacattacttagtcatcttttgaagatgcttaccgctcttggaatgtattctgagagttttgaaaagccctttcttgagtgcacttctgaattttatgctacggaaggtgttaaatatatgcaacaatctgatattccagactacctgaagcatgtagagtcgaggttgcaagaagaacatgaaaggtgcattctgtatttggaagctaacacgaggaagccactgatcgcaactactgaaacacaattgctagaccgtcatacatctgcaattattgagaaggggttcgcaatgctcatggatgcaaatcgtataaatgacctcttgaggatgtacaaccttttccagagggttaatgctgttgagctgctaaaacaagcacttagttcatatatccgggctacaggccagggcattattatggatgaagaaaaggacagagagttagttccatttcttcttgattttaaggcatccctcgacaaaatattggaagaaagttttgctaaaaatgaggctttctccaataccatgaaagattcgtttgagcaccttatcaatctaagacagaaccgtcctgcggaattgattgcaaagtttcttgatgagaaacttcgagctggcaataaagggacatcagaagaagagctggagggcatacttgataaagttttggtcatgtttcggtttatacaaggtaaagatgtatttgaggcattctacaagaaagatctagctaagaggttgctgcttgggaagagcgcatcaatagatgctgaaaaatcgatgatcacaaaactcaaaactgagtgtggaagtcagtttaccaataagctggagggaatgttcaaggacattgaattatccaaagaaataaacgattcattcaggcaatcatctcaagctaggacaaagcttccctcaggcattgaaatgagtgttcatgtgcttacaacaggctattggcctacatatccaccaatggacgtgaaactcccacacgaactgaatgtgtatcaggatatatttaaagagttctatttgagcaagtacagtggaaggcgtttaatgtggcatgcctatcagttgaaactatctgagatcaataattatgttttcccgtaacttattgctgccatcagagtgtggttttgatgttgttcaatgacgcacaaaaattaagcttccttgacatcaaagattccactggtatcgaggataaagaattgagacggacactgcaatcgcttgcatgtggtaaagttcgggttctccaaaagataccaaaagggagagatgtagaagataaggatgactttgtattcaatgaagattttagtgctcccctctatcgcataaaggtaaatgcaattcaaatgaaggagacggtagaagaaaacacgagcaccactgagagagtgttccaggatcggcagtatcaggttgatgcggccatagttcgaataatgaagacgcggaaggtcctgagccacacccttctaataaccgagctttaccagcagcttaagttccctgttaagccagctgatatcaagaaaagaatagagagcttaatagaccgggagtacctggagcgggacaggagtaacccccagatctacaactatctggcttgacagagctttggaggatcattaaagagaccgctcactttattatcagaaaagacactgtaaattggtttgttttccagttccttgttctttcctgtttttcttctctgggagggagttgtaactgttgcaacgtgtctgtatacgagaacgtctttttttcagtattagtataaaatgtataagcataa

SEQ ID NO: 22405 - DNA, 990 bp, Zea Mays
tgtcgatggtgttacttagtgtagatgggataatagtgccaatcatgctctcgttatcttgtgttatttttttagctccattgcatggttttgcattttggttcgatgttgagttcaatggaccagtacgccagaaatcgaagaagcaacctagtcaatcattggatgagaacacccaaaatgccagcccaagcaataggaagagaaaaccagatgtctctattgttctttcaactgcaccagaggatgcccctactcactggcagcagacccttttgtacttgtttgaacctatagaactaaacaaagatcagatcatagaaggctctgttactatctcccagagccagcaacatgctcgcttccttaacatctgcctgaaatactttactggcgaccaatggtatgtcaaagaatctgtgatgcgataatctgggggaaactgaaacatagtaaccttctttctgaataggctcaaatctgttttgtatgaaggacaaccttgctgctggtcattgcggtttaggagcattctgactgtactgggttgtcgtggtagcaaattgataaaaaatggagtgccatttcgagtgcagcttgatcaaaatggtagtgggcctcgacaagtaatatgtgaatctttggctccaaactcaaattgacgaacaaaacatagaacatgttgacaagagtagtaccgttttctttttttttttgttcttttgaataggtacaagctgctggtactttattccccataatagactgctcattcattgtaacgcttctgcagcgtgtagtgcagcatagacggtatgattttacaaatggtagcattgaatttttacgagtggagtttttgaagagtaaaatgcatgaataaaatgtgcatggtgtctggacaagtagaatgcatggtgaatgtcagtttgtttcaatttggccattagctccttaataatcatacgtatttgatttactaggttccgt

SEQ ID NO: 22406 - DNA, 2467 bp, Zea Mays
actccgtttaccctgcaaccccatcctcctcggcttcccatgtcgtgctcggcggcggcgggcgccgaggccaccgctctcctgttccgcagcgccgctccgtccacgatcgtcgggcgtcaccgcctcgctatgtctcgccggacttcgcgccgaaacctcaggactggtgtgcaccctcatcagaagagtgcacctagtgctaaccatcgtaacagggctagcattcagagagatagagcatcagcttccattgatgaagaacagaaacagatgtctgaagatgaaaatggcctactagacattcaactggaagatctggtaggaatgatacagaatacccagaagaatatattgcttctgaatcaagctcgtcttcaagcattggaacgtgctgacaaaattcttaaagagaaagaaactttgcaacagaagataaacattttagagatgaaactgtcagaaacagttctggtttgcacattgtccacatagcagcagagatggctcctgtcgcaaaggttggtggtctggcagatgtgatctctggtcttgggaaggcacttcaaaaaaaggggcaccttgtagagattattcttcccaaatatgattgcatgcagcataaccaaataaataatcttaaggttctagatgttgtggtgaagtcttactttgaaggaaatatgtttgccaacaagatatggactggaactgttgaaggtcttccggtctactttattgaaccgcaacatccaggtaagttcttctggagggcacaatactacggagagcatgatgacttcaaacgtttttcgtactttagccgtgttgcactggaattgctttaccaatctgggaagaaagttgacataattcactgccatgactggcagactgcatttgttgcacctctttactgggatgtatatgcaaacctgggcttcaactcagctagaatttgttttacctgtcacaattttgaatatcaaggaatcgctccagctcaggacttagcatattgtggtcttgatgttgatcacctggatagaccagacagaatgcgggataattcacatggcagaataaatgttgttaagggtgcagttgtatattccaacattgtgacaactgtatcaccaacatatgcacaagaggttcgctcagagggtgggcgtgggctccaagatacactcaaagtgcactccaagaaatttgttggaatacttaatggcattgacacagatacttggaatccgtctacggataggtttctcaaggttcaatacagtgctaatgatctatatggaaagtcagcaaacaaagcagctcttaggaagcagttgaagcttgcttccacacaagcttctcaaccattaagagagttcgagggtattgcggaccaatttcagaacaacaacaatgtcaggctgcttttgaagtatgatgatgctctggcacatatgatctttgcagcatcagacatgttcattgttccttctatgtttgaaccatgtggcctcactcagatggtagctatgcgatatggttctgtgccagttgttcggagaaccggcggtttgaatgacagtgtcttcgatttggacgatgaaacgatacccatggaggtgcgaaatggcttcacctttttgaaggctgatgagcaggattttggtaatgcactggaaagagctttcaactactaccacagaaaacctgaagtttggaaacagttggtgcagaaagacatgaagatagatttcagctgggatacttcagtttctcaatacgaagaaatctatcagaaaacagccactcgagccagggcagcggcataaacagcagagacattgagacagttccctgctgtctccatgaagtctcctagatgctgtgcttaaccgtatggtaaagaaatatggtctgtatcagctcagaattaagcatctgccgaggaagcgcggtgcatccggactcgggtgtacaaggggcgacgtggcgttacgtgcagtccccaacgaagcaaagagacagaagtacagctgtacagaacggatatcttgtgaagcacacattgggatcaggacgtttggtgctgcagctactttcggtgcagaagcacatatatacgagacctgccagggcgagcaaatacccagttatacacgcgattgctcagctctatcaagctgtgaattgaaagatttctatagtgtattcacgcgacgttttcataaactagtgtgagttatgtactctgaccagtgaccagtgcgaagtctgtgttgtctcaacaatgttgcttggtataaaatgctaaaatgacgtttaagacgagaggggtttttagaaaagagagaaaataagagttttatgggtatgaaactcggttgccttcatttctagctctatatgagtcttggaattaaactccctataaaacactaaaactagactatgtattgtgaat

SEQ ID NO: 22407 - DNA, 1817 bp, Zea Mays
atctcgcaagcagcagcagagcagaaactgagggaagcgagggacggcgatggcgggtgcggaggggagagggccgagacggagccgcgtggcgttcgtgctggtggacgggatcggggacgtgagcgttccgtcgctgggcgggcgcacgccgctggacgcggcgtgcgcgccgcggctggacgcggtggcggcggccggggtgaccgggctcatggaccccgtggagccggggcttgcatgcggcagcgacacggcgcacctatccctcctcggtcgaacttcgctacactggatgagaacactggagttatcatcagcaggagggcagatcggcactttgaagaggaaggccctatactctgtgctgcgttggatgggatgaaacttcggtcgtttcctgagtatgaagtcagagtaagatatgctaccgagcatagatgtggtgtggttgtcaaaggaccaaagctgagtgggaacatttctggaactgatcccttgaaggacaaccgcttgcatctgaaggctgaaccgttggatggctcagaagaagctaaaaacactgcagctgtggtcaatgagctttctatggagattacgcgcatactggtttctcaccccatcaacgcaaagcgtgcagctgaggggaagaacatcgcaaatgttgtgttgctgcgaggttgtggtattcggattgaggtgcctgcctttgaaaccaaacatggacttgcaccttgcatggttgctcctaccaagatcatagctggcctgggactgtcactggggattgatatccttgaagcacctggagcaactggagattatcgtactctcttaacttctaaagctaaagccatagccaaggcactctctgcccctatggatacaccacctcgtgtttttgtgcctggagaggatggatacaaggctggaaaagaaaatggatatgactttgggttcctgcacataaaggcaaaatgcatattcagattctttttactagtactgactatatatgtgattgtgatagctcttgtaataatgtcaatgcaggccattgatgatgctggtcatgacaaggctgtcaagttgaaagtacggggtctagaagctgttgatcgagctattggtcagcttgcgaggcttctttgggaagctgaaaaggccggacactatcagtactttctttgcgtcactggagaccattctactcctgttgaatatggtgatcatagcttcgaacccgtcccgtttgcaatatgcagactgagagattatgcaggagccattggggaggataatattatgaatacacagctcgacgattttcccctcccttcggtaaaatccggagaagatttgctcgacagtatagaatcactggagcacaagcctggtcaacttaaagctttcagtggcgacagtgtgtgtgagttcaacgagatcgccgctgcgaggggctgccttggacgattcccaggaagcgagatgatgggcatcattaagaagtttatcaaggccaagaatgattaatgctggttgaaatgctaacctttagcgtaatatattggccataaggtttattatcaatgtaataaactaataatgacagaatggagcaatatggaagaaccgtcttgattggagatgaataagagataccttggtgaaaaacaatgagatctgcttatgtacattgtacccagtgttgggtcactttccggccacatgaatgagaaattttgatggaagttttctcctctcttttttgcggggttgggttaaggagtccagacttgaagcttcttgcttagccg

SEQ ID NO: 22408 - DNA, 177 bp, Zea Mays
acatgaaaattgtaagtatccagggctgctacagccactacccattcctcaagattgttggcaagatatctccatagactttgtggaagggctgcctaaatcaaatgggtactcggtcattttggtggtggtggacagattgactaaatatgcccactttatcccagtgaaacaccc

SEQ ID NO: 22409 - DNA, 2021 bp, Zea Mays
cccagcacacctccctttacccttccttctctcccatgcaagcaaggaatcgagggagggagggaggaagcaaaaggggaaaagctcgtgcaagacaagccgccctgccctgggaccattcccacccacatcgatcgtcagccagagagaggttcgttagttccagaaggacactggacagttggagacagcgagcgagcgagcgagcgagcgggaggagaggaagaagagctagggggcgatgggcggcgagatgaagcccgggaggggcctcaggacctgggcgcagcgccacctcaacgtcaccttcgccgtcggcttcctcctcgtgctgctcacctacctcgtcgtctcgcggcagctcgccgtcgccgcgcccggcggtgcagcgtcgagggtggtggcgggtaagcaggtggtcgtcagagacgccggagacaacgcagagggcgcgagcaaaaggcggcaggaatggcagccaaaacaggcggcggcggaggaggaggagacgtccggtgccgtcccaacggaggaggaggagtcgtatccgaaaagagatgaggccgacggcaaaccgtctgaggcagagacgacgacgacgacgacgagcaaggccgtgtgcaacacggacggccccgtgtccgagacgtgcgacctggacggcgacgtccgcaccaacggcagcgccctatctgtgacgttcgtcccggcgagcccgtcggagcggcgggagtggaaggtccggccgtactcgcgccggaccatggtgggcgtcgacagggtcaccgtgacgcggctggggtccccggatgacccggcggcgccgtgcgcggtggcgcacagcgtgccgggcgtgctgttcgcgctcggcgggctcacgggcaactactggcacgacttcagcgacgtgctgatgccgctgtacgccgcgtcgcggcggtacggcggggaggtcctgttcctggtcagcaacatgcagccgtggtggctgggcaagtacgaggccgtggtgcggcggctgtccaggtacgacgccgtggacctggaccgggacgcgcgggtgcgctgcttccgccgcctcaccgtgggcctgcgcctgcacaaggagctcggcgtcgcgccggagctcacggcgccggaccggctgaccacggccgacttcacggcgttcctgcgcgagacgtacgcgctccagcgcggcgcgccggcggcggtcccgacgacggaggggagaaagccgcggctaatgctgatccaccgcgcgcactaccgccggttcgtgaacgtgccggagatcacgcgcgcagcggaggcggcggggttcgaggtggcggtggcgagcccgcgcggcgacgcgcccgtggaggagacggcgcgggcggtgaactcgtgcgacgcgctgctgggcgtgcacggcgccgggctgacgaacgccgtgttcctgccccccggcgcggtgctgatccaggtggtgccgtacgggcggctggagcgcatggcgcgccgggacttcggggaccccgcggaggacatgggcctgcgctacctggagtacagcgtgtccgcggaggagagcaccctgctggagatgctggggccggagcacccggtgatcagggacccggactccgtgcaccgcagcggctgggacaaggtcgccgagtactacctcggcaagcaggacgtgcgcatcgacgtggaccgcttcgcgcccacgctcgcgcaggcgatggaccacctgcggcaccgccaccagtgagccttcattggtcgaacgagctgcacatggagggaggatacgtacatcataacacatctcactcacataagggacgcacatgcaaacttgcgtttggcggataggttagctccaaactgtaagtcatcgattgtttggtacagaatcgagcggcgtatacgtattctttatcgtctttgtctgaaccatatacatgtatgtactgtttcattcagtcgctagattagctgcgaaatgaagtcattttgtttgttcgaaaaaa

SEQ ID NO: 22410 - DNA, 788 bp, Zea Mays
gcgcgcgagattgaccaaaaattcacccatctgtagctgctccccgaacccctacccacaccgctgccgccaccgctgccgacgtaatcgcacggccgctccccgacccacacctcgcacaatgtgcgccccgccgccgccgcctcccctctagatcctcaatgcaccgctaggtcccgtccacagccgctcactgccgccacctctaacgcgcctaggaccatcgccacctccacatctagcttctggagtcgagatccatggtcgactccactggaggagcccggatctggcctaccgggcacggtctcgagctttaggcatctcagcaggcagcggtgtactccgtcatcgcccaatggagcaaccaaccaagcaagaactctatccatgctcgtgtcgaggcgttgtctctactctctactccatcccgcgtctgcgcgtcgtcctctacggatccgtccaccgctgcgccagcacgatgtgaatcgagacacgcctccgcctatgcgtccaagacacgcctctgcatctgcgtccgtgcactggctacgcggcatcgattacggagtggagtctacctactcgcaattctctacatatgaggacttgaggatttagagcaagacctaaagtatacccttgaagggacacactttatgattccatggtttgaatgaccaatcatttatgatgtccgtgctcgactgaatctcgtggagagtacttctgggagcctagaccttcagatgattaagaaatcaccaatgcaacaactattttggatt

SEQ ID NO: 22411 - DNA, 3551 bp, Zea Mays
ctccgtttctgtttgtgtgcgtgtctcggagaagctctccctcgcctcgcagatccgcggcctgctttgttgctgctttgccagcaagctgccgcgctcatcctcgcgcgacgccagcggcggggtggcccctctccagtgacccggcgactgctcccgtcggtgccgccgccgcctcctcctccgagatccattcccgtgcccgcggcaaggaccagatccatcaccgcgccacgagctacagcaggcgacatccgccccggggtcgcacgccgcctgctagccgcggacgtcccgggagccccgttcgcagacgcctgcacgcgcgcggcgcgcaacgagctccgccacctgccgtcgtgaagcagcgacttgacggcaaaaggaccctttgaatcaaagagaagttcgtcactgaggctgaagaaaatctggatgtgtttacctttcagggcttactaattttgagaggtgtctgacatagactaaaaaaaaatcagcgccagggctcagggagcgacctaccccaaggtggggagttggttccttttccagtaataatgagggcaaattcatatcccatcatgatggaagaggacatggaaaatggaaggtcgtatcaagaaagaccaagggctttttcaacagtacgaagcaaatcatctgtaccgctggccttccgtttgttgatgagggtaaatccccgtgccgtgattattctttctcttttggtcttcagtggtgttttgtatgtgggagctagtacatcaccaattctggtctttgtgttctgtatatgtactctcagtctattcttctctgtctaccttacaaagtgggttcttgctaaggacgaaggacctccagaaatgtccgagatatctgatgccataagagatggcgctgaaggtttttttaggacacaatatggaactatttctaaaatggcatttattctggcctttgtcatccttggcatttatattttccgcactaccaccccacagcaggaggcatctggcttgggaagggcaacattagcctatattacagttgcctcttttctccttggagcgttatgttctggaatagctggttttgttggaatgtgggtgtccgtacgtgcaaatgtacgagtttcaagtgctgctcgtcgctctgcaagggaatcattgcagattgccgtccgtgctggtggtttctcagccattgtggttgtttgcatggctgtatttggcgtggcaatactgtactcaacattttatgtttggcttggagtagattcacctgggtcaatgaaggttaccgacttgcctcttctccttgtgggatatggttttggtgcctcttttgttgccctttttgctcagttgggtggtggaatatacacgaaagctgctgatgttggagctgatctggttggaaaagttgagcagggaataccagaagatgatcctcgtaacccagctgtcattgctgacttggttggtgacaatgttggagattgtgctgcccgaggcgctgatctttttgagagcatagcagcagaaattatcagtgcaatgatacttggaggaacaatggcacagcgctgtaaaattgaggatccgtctggctttattttgtttcctcttgttgtgcattcatttgatttggtggtgtcatcagtcggaattctctcaatcagaggaacacgtgactctgggctcatttcccctatcgaagatcccatggcaattatgcaaaaaggctactctgttactattatgcttgctgttcttacatttggagtgtctactcgttggctcctgtacacggaacaagcaccttctgcatggctaaattttgcattgtgtggcttggtggggatcatcacagcatatgcttttgtttggatttcgaagtattacacggattataaacacgagccggtccgccttttagctctttcaagttctacaggacatggaactaatattattgctggagtaagtttggggatggaatcaacagccctaccagttctagtgataagtgttgccattatatcatcctattggctggggcagacctctggcttggtggacgagtctggcaacccaactggtggtctttttgggacagctgtagcgacaatggggatgcttagcacagcaggcatgaaagtgtgagagaaatcacagatgttctagatgctgtgggcaacacaactaaagctactacaaaaggatttgccataggatcagcagcactggcatcattcctcctgtttagtgcatacatggacgaagtagcttcttttgctcaaatgccgttcaaggaggttgacatagcagtcccggagatttttgttggtggtttattaggctcgatgcttatattcctgtttagtgcatgggcttgttcagcagttggcaaaactgcacaggaagttgttaatgaggtcaggagacaatttatcgagaggcctggtattatggactacaaagagaagcccgattatggacgctgtgtcgcaattgtggcctctgcatccttaagagaaatgataaaacctggggctctagcaattatatcacccatggccgttggcgttgtcttccggattttgggccactccactggtcagcctcttcttggagctaaagttgtagcctccatgcttatgtttgcgacggttgctggtattcttatggcactcttcttgaacactgctggcggcgcctgggataatgcaaagaagtacattgagactggtgcccttggtggcaaaggcagtgagtcccataaggctgcggttacaggcgacacggttggagacccattcaaagacactgcaggaccatcgctgcacgttcttatcaagatgctcgccacgatcacactggtcatggctcccatattcttgtgattaaccaaccagatttatcaagcttgccattaaccctgcggagatgtatctatgcgacttgtagatgaggtgtttacctgcatgtgatgtaatgatccaatcggttttagtgtgactacatgttgtacccaaagaaagaaagaaagaaagcagcgatctgtacccaggttttaatggtccaatcggttttagtgtgactatatgttgtacccaaagaaagaaagaaatcagcgatctgtacccaggtttgacggtagatattattctgaatttctgacgggtagtgatggtgcaaatgccatattttgtgacggacgtcactgaactagtagcccaagtgttttgtatttgtttattgctgggaacattatgacatccgttgagcttagctgtaagaaaggaacgatccacgatggattttaggatcgtgactgggtctacaccttacctttgactcttcacattaacaaagaaactgatgttatgtaatggtgttaatatgaccgattgtgagcacttctaagaggattaatatttaatagcttccagcacagaaaacatgcgcagataacaaaagaaacttcatatcaatctcaacagaagctgcatccttaaccatcctgcatttgtggtgcttgtt

SEQ ID NO: 22412 - DNA, 3560 bp, Zea Mays
tcgtcagcaatcctaatccaaaccgccgcggccacggccgcagccttccatagttctgtcagaaattccccttctcatccctgatccctccaactcccaccccaatacatcctgccgacgccatcagccggcgggacgcacacacgaggtcgaccttcgaaccctagtccttggccgagccgccttgcgggatcgtccccgccgcgcggcagctctgcctcgacccttttagtctccgtccgacaccgcttggatcagagatggaatcaccacccctcacagctgaagcaattgcttttaccgagaaaaagatggacatgactttggaggatataatcaagatgtcaaagaaaaagaatcctggaggcaagaacccccctaggcagccgatcaaaaagcgtccattccagaatgccaacactaataaagggaatggcaaggttcaacggtttatggaatctagatcaaccattagacaaggtgttcttgcacagagaaggtcaaatcttggtggaagtcagtttgctgctacaaagcaggctgcaaagaaggctgctgctatgccaatgcgcagcggggctgtctattggaagaagcctaggtaaacaatggttatcttattgcttatgagaaagtttactgcattcaaggagttgttaaatttattgtgtcatgcaccttgggttatattggctgagaatgattgtgatgctggtgtttgcatggaactgccttgacttctctggttatacacagttacacacatgttattaaagaacaatgaacttcatattcctgttctgcaaggcttgttttcttggttgaactgctacaaatacatggtgaatataacatatgagccttaaagcttcattgaaagttatggcatttccctttattctggttgagctggtcaaatttgtgaacctgctgggacaccctggatatgtatctgctgttggctgacatttttctatgcaattcagcagtattcatggtgtaatctatagctgctggatgagtgctatttttggacaccagtgtctgaggtttacgttagtgttatttgtcaactatggttggaaggaccgaaggagatgtgataatgactagcatctcatgccactggtgactgatcatccagatacagggatgctacatgcctgagttggaattggtttttactactggctccttggctgtgctcagtgtttgtttgaatgatgaatgcaatgtgaatctagggtagtgatgctatagcaggacaattgtatgcctccaaggagtacattttgcttctgcctcctattaaagttggctgtatccataacagcattctatcataaagttgttcactagtttccacagatattgcttgcttgcatttctactggatgagaataaatcgtgttatcttgcgatttatctgactatatgctgagctgtatggatgctttcttttcaaggtcaactgttggaatttattttcatgatttcttatgtcttgttgatcctggatcagtggtcactaattacatgacttgagtttatcagttcaatcaatcaataagtggtgttaacttgggaaatttttgaaccatgtgtgttgaaattttggtggaaataaacagtctagactctagaatgttgggggccttggaaaccaagaggatgcactagatattttcagtgactactttatcatttctgtttgattttatttcgaagcatggtatgtacttcctgactccccttgagaagtgagaattgtatccttgttttgatggggcatggtgagtttgctcagaaaacagtattgatcctggttctccattgtttatgattcatggtacttgagcactcctgctcatgtgagatactaatgtttttattttgatacagtgcaagtaccttagtgcagaggaggtcagtaggtgatgcttttcaaaataccaaggaccatgggggtgaacactgaaggacttggaggaggccccaatctccttcatggtgtccttggctgcagtgcctagaaacattctctgagaagggctgtaagttaggttgcacatgtgagggacctccaggttaggttgttttcaaaagatcatattttggtgagcatgaatagtgcaaccgcgtcagctcttagaagcgatatgcaaccaaagaaaaggccgagaagctcaagtgaagcgattcagtgcagacgaacaggggaagcagacagataactcaagctgtttagtgcagacaggcagctcaagcaggagtcggaattggatgatgaatcggattagggagggagagatcaaaggaggggaagagatagggaggcgggggccggggagggagatgagagggtggtcaggaggattacctggtggtggtggtggccggtggcaattcgtgagggttggcggcgcgcaaccgctgacggtggcagcggcgcgtctagggttgctgtgctcgtgtgcgggagcgggagtcaccaagtatagcgaaggccatacaggtaagttgtccgctcttcaaagtatactacttatccccaggtaacccgtgtatccgctttttaaattaaatttctacttattccgatatgtataggatatgtatccgagctgtatcgctatccgatacggatacgagctctttgggaagtatcctggtatcataggcatcaatgtagcgactttcctgatttgttgcgcttcccttctttgctccatacacctctaacaatacttttttcttgatatgttttaatgtatagttttctcacataatccatcttctggtatctccatgtcactttataaccattcatagtactttcaggaccgtgatgaatgctatacttgggtccatttttatttttagaagtcaaggagtcgcagaaccatgcagcaccaaggacgatggatgcactctttgcacggatgaaggcgcaacgcatgaggaccgcaccacagcagcaggcaaatcctgcctctggacgtgatttcaaccagcagcgacgtgttcagcagcagcagaggcgaggtagagcatatggtggccgtgttgtcggcaaccaatgagcatatttggtgcatcgaagccccttctcttcactggtcttaaggaccttgagggctagtttgggaactctatgtttctctattttctcaagtgaaaatgagctaatttttcttgggaaaatgaggttttcaaactagccttgaatgaaaggacgccgggggaaaatctaacttgactttctttgttggatgaaaggatgtggacagaatatgaagcgaattttgtgtgactctagttgtctgcttctgttcagcatgtacactgacctacggaaattacttgctagattttgatgtcatgtttattgagttgatttggttcgtctcttcaacagaactaggagtattcgccttttaccatatgtataaaattttaaatacctttactgtgaggtagacaagctgaatttatcatagtcctttcgttttaaaattatatctatactgtgtatagatacatagtgtatggtagaacct

SEQ ID NO: 22413 - DNA, 2108 bp, Zea Mays
cccgactcttccccagtgattctcttctacgcttactaggctatacttgacttcgtgtgtttccattccacagaggaagggatggccgggagcagcgtccgcggcggcagcaactgcccaccgctgttcgtgacggagaaaccaacgcggatggcgaggtacgcttaccggctgttcgcgagcacggtcctcgcgggggttcttctggtatggctgtacagagcaacgcacgtgccaccgatgagcagcggcgcccggtggtgggcgtggcttgggctctccgcggcggagctctggttcggcttctactgggtgctgacgctgtccgtgcggtggagccccgtcttccgccgcgccttcccggaccagctcttgcgaaggagatgcacaaagatttggcagctcgagtgaattcagttgttaattcagggaagatccctgaagtttcaaaatgcaagcttatgggcttctccaggtggagcgagaatgcaagttttagagatcacccttcaatagttcagattttaattgatggaaacaaaaggaaagcaactgatgttgatggaaaagtgttgcccacactggtttatatggctcgtgagaagagacctcaagaacatcatcacttcaaagctggatcactgaatgctttgataagggtatcatcagtgataagcaacagcccagtcattatgaatgtggactgtgatatgtactccaacaattcagggtctatcagagatgcattgtgcttcttccaagacgaacagctaggtcaagatattgcttttgttcagtatcctcagaactttgaaaatgtggtgcaaaatgacatctatggcaatcccatcaacaccgtcaatgagttggaccatccttgcttggatggatggggtggaatgtgttactatggcacaggatgcttccatcggagagaggctctatgtgggcgaatatacagtccagactacaaggaagattggactagggtggcgaggaaaactgaagatgtcattgacttggaaggaatggctgagtcacttgtgacttgcacatatgagcacaacaccctttggggagtcgagaagggagttatatatggttgcccactggaggatgtcattacaggattgcagatccagtgccgtgggtggagatcagtttaccacaacccgccaagaaaggggtttttaggcatggcccctacctcactaggacagattctggttcagcacaagagatggacagaagggttcctccagatctccctctcaaagtacagcccgtttctgctaggtcacaggaagatcagcctgggccttcaaatgggttactccgtatgtgggttttgggctgctaacagcttccccaccctttactatgtcactatcccttcactttgcttcctcaatggcatctcattgttccctgagataaccagtccctggtttgtaccgtttgcatacgttgctgtggctgcatactcctgcagcttggtggagtccctgcaatgtggcgacactgctgtcgagtggtggaacgcgcaaaggatgtggcttttcagaagaatcacctcatacctcttggcagccatcgacacaatccgcagaatgcttggcgtcaccgagtcggggttcaccctgacggcgaaggtgaccgatccgcgggccctagagaggtacaagaaggggatgatggagtttgggtccttctccgtgatgtttgcgatcattacaaccgttgcactgcttaacctggcgtgcatgatgctcggggtggcaaaggttctgttgcgtaaaggagcggtgagtctgggagctatgtttgtgcaggccgttctatgtgcgctgatagtagcgatcaattttccagtgtatgaagcaatgttcgtccgcaaggacagtggcagattaccagcttctgtcagtgtcgtttcgctctgcattgtattaccattctgtatacttccaaccaagttgtagatgtggagctggtgaaagatgatatatatatttgaaacccgatggtgaaagttataagaactgtactgatataatatatttccaagagaattaaaaaaatatataacatgttcatttacagatctg

SEQ ID NO: 22414 - DNA, 2419 bp, Zea Mays
caattctgcccggacccgccgagaattgcccgttctcgggacgccgggcgtgctgttcacggcatgcggtgctttgatctgtgaattctgggagacggaaccaccttttctctctcgcctttacccgaaatctcctgtaaactgtgggtgacagtgataccactctctgcctgggtgttccgttcttaagatcaagtgctggacagtctagtctagccgttaactaagtccttgcttcctttttttttcactctctctgctggattggggaatttggtggtttccatctaccagtaaatcacgcgcgatgtaccgggtgaagagcgagggggagggcgagggcgagggcgactgcgaaatgatgctgcaggaacagatggactcgctggtggccgacgacgtcagcagcggaggagggtcgcctcacaggggcgtcggcacgcccctgaagaaggggccatggacgtccgcggaggacgccatcctggtggactacgttaagaagaacggcgagggcaactggaacgcggtgcagaagaacaccgggctgttccgctgcggcaagagctgccgcctccggtgggcgaaccacctcaggcccaacctcaagaagggggccttcacccccgaggaggagcgcctcatcatccagctccacgccaagatggggaacaagtgggcgaggatggctggtcacttgccagggcgtactgacaatgagatcaagaactactggaacactcgaataaagagatgtcaacgagctagccttcctatttatcctgctagtgtatgcaatcaatctacaaatgaagatcagcaactgtctggtaattttaacggtggcgagaatatatccaatgatcttctatctgggaacagcctttatctgccagattttaccagtgacaatttcattgcgaacccagaggctttatcctatgcaccacagttgtcagctgtttcaataagcaatttgctcggccaaagctttgcatcaaaaagttgtagcttcatggatcaggttgaccaagcggggatgctgaaacaatctggctgtgtgcttcctgcattgagcgatgccattgacagtgtgctttcctcagctgatcatttttcaaatgactctgagaagctcaggcaggctttaggttttgattatctgaatgaagccaatgctagcagcaagagtattgcacctttcggggttgcacttactggcagccatgcctttttaaatggcaatttctctgcttctaggcccacaaatggtcctttgaagatggagctcccttcactccaagatactgaatctgatccaaatagctggctcaagtatactgtggctcctgcaatgcagcctactgaattagtagatccttacctgcagtctccatcagcgaccccttcagtgaaatctgagtgtgcatcgccgaggaacagtggtcttttggaagagctgcttcatgaagctcaggcactaagatctgggaagaaccaacaatcatcggtccgaagttcaagttcttctgctggcacaccttatgagactaccacggtggttagcccagagtttgatatgggtcaggaatattgggaagaacagcccagttctttcctcagtgaatatgctcattttagtggaaattctttcactgaatccactcctcctgttagtgctgcgtcacctgatatcttccagctctccaagatttctcctgcacaaagcccttcaatgggctctggcgagcaggcgttagagcctaaacatgagtcggcagcttcacctcgtcctgaaaacttgaggcctgatgcattattctctgggaacacagccgatccatccattttcaataatgccatagccatgctcctgggcaatggcattgatgccgagtacaaacctgttcttggtgatggaattgtgctcgattcttcgtcatggaacaacatgcaacatgcttttcagatggcgggattcaaatgagttccatgcacttgtttgtgatgctgaagggcttcttgttgcttgttttggggtcagtatcagcgaaggccgcattgattgtgacgctgcattcctgacagagggcgtgcaggtgcagcagctaccatatgtgatcttcatgctaatagtccttttgtctaataaagtgcatgaagataaaccggatattttttttttgctttgtattagagaaccgtttttgtcaaccctgtcaggattctgttggaaatgtgtcatgatttttgtttgaacaatttaatatctgtcattgatactgtgctgtgtgctactccttgatgcatttgcttgtggcagcaaattgtttaagtatacactgtcattgctgctggcacatcatttgggcaatattgatgtttttcgagatgtgcattgaaataaattatatgcctg

SEQ ID NO: 22415 - DNA, 2997 bp, Zea Mays
gttgcatcggttcgtgcacggatgaggcccaacatcgcacggcacgagagaacccctcctaggctcctactctctccctagtccccgcgacggcacaagcgaccgtccccacgacggtccagactccagagcctgcagaccccgacgccgctcgcgttcgggaccgtaccgccctcccctgccgtatccgcccacacaccctccctccccgccgcttccgcccggtatcccccactcgcgcggccgtaggacacggccacgtgcgccgcctcaaactgggggctgtggctggggcgggaggagcggcggcgttagggtttccccatggacggtggcgaggatcggacgttcaaggcgaactttaccagcgagggggtgacgatgctgcaggaccgcgtcaaggagaagctcagtgagctcatgggcgactactccgacgacactcttgccgagtatgttgtagtattgctaaggaacgggaggcacaaggatgaggctgcaaaggagctacatgtttttttaggcgatgacaatgatgcatttgtatcctggttgtgggatcatctgtcctcaaatttgcacctttatgttcaacctaaagctgcctcttctaaggatgacactagaagcagtcacaatgctgccagaggattgcctgttcacagtgtgataagcagcacacaagttaatcatgaacctgaagctgaaacccagaagacagtgataactcataaaaaaaaagattggggtcatcgaaaaagagattggggaacaatcggtcgaggtcaatcagaaacagttcctcttagaagcgttgtcgacaatgtttctcttgcaaaggagaaggatcttcatgagtcacatgcagatgaaaaggcttttcataaatcacattctgtaagacgaacccgctctcctgacatgcataaccacagaaagaggagcagagaggcagatgtgcggtctactaagagtgcaacacacccagttaatggtgcaccacgtcggcttcttcagtttgctgttcgtgatgctgtcagaactgtgcccccagttacttctggttcagaatcagcttccaagcgactttgttctgtagtgtctacattggcttcagattccacacttgatattactcatattaggttacagaaaacaaattcagatttgagaataccagttgccacagcagcactaagagctgcagctgaggctgctgaagatgctctcaaggatagcttttgtggaagtgtttttagtagattgggcagaatgcccacaataaattctagtgaacaatcacctgatcgtagatcacaagatcttgaaggcaaagaatatgagaatatagataacatacaagctgaaaatcaagttgaattttatggaagaaatcaacatggtggcagtgatgtttacatgcgtgatcggagaacagaggaagccacaggttctctttctaatattgatgagtatggtcacaacagttctgttaggtataatggattgggttctctccgaagtgcattgcctgctagtggaggtaaagagtcattagtactggggtacgtaagaggagcttctgaagtacgaagcggaagattgatagctcaggggccacctgctggttcaggaccaagatcatctgaaaagatcctaaatgtttctggtaacactaacacacagaagcttccaactcatgtaactagggatgaccttgcatttgaccctcaagtgccaatggagaaggttgctgatgcaaggaaatcacatgtgaagattgcacatgctaacgatatgtccatgacaactgataagtccaaagatttgatacagtcaagttcaatgctggaggcacaaaaggctacatcaggtgctgctggatcaaatactacaggtcaacccgaaggtggctctgattctagaactgtctttgttagcaacgtacattttggtgcaacaaaagatgctctttctcgacacttcaataagtttggagcgatcttgaagacccatattgtgaccgatggtgtcactggtcagtcaactggctcagcgtatattgagttcttgcacaaagaatcagcagagcaggcgttaaccctgaacggggcatcatttatgttacgcattttgaaggtcgttcggaaaaactccactgaagcaacccgatcgcctggcttgcttcgtgtttcgcggggatcaccatttgcttcaaggctcattagaactgcatacccaaggccaacgtttcctggtgcaatccgtggacgactgccactcaggggtgttgcccagagcttacagtggaagcgcagtgccacagattcctcaaatgctgtaaaaccaagtcaggctgcaccttcagctcctgggaatcagttggtcaccccgaccccacgaagcttcacctacacacgcacggagccaaaaccaaatgacggtgcgatggcttgactgctcagctgcagcatgccgcagctcctgatgaatctcgcagaaagagttcgtgatactgttacgtggttcattcagctgcttttggtaaatatttaagtagctgcagatgttagtttgtagcaggctggtttttgtggaccaaaacctttgagcgatattctgtgaggttttctgtgctgtttttcaccgtcagcacatattctgtgctggctggctgttcggagttcgtggatggagagtaaaatatatataaaaaaagtggtagtaaaggaaaacacggacgcgataaaaacgttgcaacatttgttattattttttgatggattatttagcctccacggtttccttgtcaaggggggtgatctgtgagattgatcataatatccaaactaccggatggtcttgctgtctcagttttgtaaatagaaaaaccttcacctgtggggtatggttgcctactgcacgtctgcacattagcaagtgatgagagaagtgcattttatcttggaatcagcgggactcacgggtggctgaagt

SEQ ID NO: 22416 - DNA, 3099 bp, Zea Mays
atggcgtcgcggcaccggaatgcttctccggtgacggcagggaaggactcgccgcagcctgcctcggcggcaacctcgctgcggcttgtggcagagttcccgctcgacgcgcccgaggccaaggagagcgtgaccgttaccgtccgcttccggccgctcagctcgcaggaggttcggctgggggaagagatcgcttggtacgcggatggggacaccattgtgcggagcgagcagaatcacagcatcgcttacgcgtacgatcgggtcttcggaccaactacaacaacccgacacgtatatgatgctgcagctctgcatgttattagtggtgccatggagggaataaatggtacaatatttgcatatggagttacaagcagtgggaagacacatacgatgcatggagatcaaagatccccggggatcatacctttggctgtgaaagatgcatttagtataatacaggagactccaaagcgagagtttcttcttcgtgtatcatacttggaaatctataatgaggttgtaaacgatcttcttaatccttcgggtcagaacttacggattagggaggatcttcagggaacatttgtcgagggcataaaagaagaagtggtcttgtctcctgcacatgctttgtcccttattgcagccggagaagaacatagacatgttggatccacaaatttcaatttgctaagcagcaggagccatacaattttcacactgaacctcatcgatctggcaggttcagagagttcaagggctgaaactacaggagtacgccggaaggaaggatcttatatcaataaaagcttgctaactcttggaacggtgatatcaaaactgactgatggaaaagctactcatgttccatttcgagattccaaattgacacggttactacagtcatccttaagtggccagggacgtgtttctctaatatgcactgttactccagcatcaagcaattcagaagagactcgtaacacgttaaaatttgcccaccgtgcaaagcacattgagattcaagtgtcacaaaacaagattatggatgagaagtctttgataaagaagtaccagaatgaaatttgccaattaaaggaagagctagaccaactgaaaaggggtatactttctggcactccttcgaaagatgccacagaagacaatgtcattctttggaaacagaagctagaagatggtaatgtcaagctccagtctagactggaacaagaagaggcagctaaagctgctttgcttgcaaggatacaacgtctaacaaagctaatcctggtttccacaaaagcaactcagactcctagactgtcccaatgtcctaggccaaggagaagacattcttttggtgaagaggagttggcatgtctcccacacagaaggcgagatattgtattggatggtgaaagcaatgatttatttgttgctatggaaggatttgatgaaacatttgaagtttcttccaaaggagagaacaagaatcgcaaagggcttcttaactggttcaaacttcggaaacatgacggtggttctaatgctccaagcttaggtggtgaccaatctagcctgaggaaagcattggctgccccttggacacccgtagaaattggacttaattctcaaacagagcaagagatgtctaattctcccgagaatctatcagctaacctactgagcattgaccatgaagaatttcattctgatggactttatggagaagaagcttctttggtcaccagaaaaacatcagatcatgttgatttattgagagagcaactgaagatcctatcagaggaggttgcattacataaaagtgttctaaagcgactcgtcgaaggagctggaagaagcacaatgaatgggcatgtcgagatcgaaatgaaaaaggtcagtgacgagattaaggacaagcagcagcagatagcacatttagaaaggcagattaagggggagcttgaccagttagaacatacaccgtctcatgctacgctcctggagcaggtcaacgagaaagcatttgaacttgaggtgaagacagcagataacagaatattgcaagaccagctacaacaaaagacgagagagtgtcaggcattagaagaaacagttgcccacttacacgaacagctttcccaagctcttgaagctaatgatttattgtcagaaagcatcatatttcagcagtacacagacaacaaccttcaaactggatcgcaaattcacattgaaaatccagaatctatagatatctctgatgaactgcatcagaaggcagagcagtcagagattgatgaattgaagcaaagattgtgtgagcttactgaggccaaaactcaactagagacccacaatcagaagctgcaagaggaaagcatgtacgcaaaaggcctggcctcggctgcaggtgtggaactgaaagcactgtctggggaggtcaccaaactcatgaaccacaacgagaggctcgcgaacgatttggctttggcaagaaattcaacacgagtgagaagtggtcatagggttgggaggagggatagctatactaaacggcttgagccagcgagtagaagagatgttcatgctagcagtgagagggaatcagctctggaggtcatgcttatggcgaaagaccaaagagaggcagagctccaaaagaaaatcgaggagtccaagcagaaggaagccttcctggaaggagagcttgcgaacatgtgggttcttgtggcgaaactgaagaaaggtcaggtaattgaccaagatgatgtctcgatgccgtacccaatggatcgtgattcatgaccctagacaatgacaaaaacaattattgaatcggctatgcttcggcattgcactttccttgtctgtggactgtggtggtttgcaccagtgtgaatccgtgtatctatattgccggtagttgtaattagctggattggaatcttgtaatgtatataacaatcagattttgccttgttctcaggattgtcatgcctgtctagtttgttcagggctttcaacaattatactgtacatagattgtcgagtggaaagaaatgaaagcctgatgatgcatctccccca

SEQ ID NO: 22417 - DNA, 787 bp, Zea Mays
ctatccgtgcaatgcaggtgtttgttggttaagaaaaaagctattgcactctctgatgaccataaaccaaacagaagtgatgagcagaaacggattgaggatgctggaggagttgttgtttggtctggaacatggagagtaggtggtatacttgcaatgtctagggcatttggcaatcgtttgttgaagcagttcgttgttgcagaccctgagattcaggatctagaaatagatggtgatacggagtttcttattttggccagtgatgggctctgggatgtggtgccaaatgagcatgctgttgcatttgtgaaggacgaggatagccctgaggctgcagcccggaagcttacggagatcgccttcaggcgtgggagcaccgacaacatcacatgcattgttgtagaattttgccacgataagatggttgatggttctcccccgtcaaccaataagagttgacttcatcattcgtgttttaattatcccagatttgctaccatgatgctgcgcctctcgaagtatggtctcatcattggttgtctattatgttcgtttatagtcctgccatgctgattttgtttgcttcggcgcccccaattggttagcctgttgtttggatgcccagcactgtttcgtgcacgctggaccctgactccctgagcacccaggtcaatattatacttcattttcgattttggctgatattacttcatttttgatcttccctattgcggaaaagaaaacttgcgtttcgatctgctgtaagctactaagctcagcggac

SEQ ID NO: 22418 - DNA, 1210 bp, Zea Mays
ccaggggtttgtttgcccatcaaagtatgattactctggttatgggcagtcatcaggcaagccaagtgaagctaatacctttgctgacatagaggctgcatacaagtgcctcgtggacgtctatggaactagggaagaagacattgttctgtatggccagtctgttggcagcggaccaacccttgatctagctgttcgtttcgatggcgtaagagctgtggttctgcacagtccgatactgtctggattgcgtgtcatgtattctgtgaagaaaacgtactggtttgacatatacaagaacatcgacaaaatcccgcatgttaaatgcccggttttggtaatccatggcaccaaagatgacgtggtggactgctcccatggcaagcggctctacgagctgtgccagcacaagtacgaacccctgtggatcgagggaggtgaccatggcaacctggagaaattcccagtgttcattcgacatctgaagaagttcttactgtccataaagaagctgccatctgaaaaagacgccgcggccgagcacgagccacgggcagctgagaacagaacgcagcatggcggcgaagccatctccgaggctcctcctcgcatgatctcgcggaggctagagtcatcgaagaagagcacgatccatgaagcaaagcctaggccgagcagcgagcacacggataagcgcaggcgaagcacgggccacagggagaaggcgaggtccagcacagacaggagagagagatcgaggagaagcgtcgactgcttcgacagcatcctcgaacacgagcagccggaaaagccaaggaaaagcttcgacaggatcggagagaagattagagcaatgggtttgtgcaatgtcgactgcttcaaagagcctcctgatagcactgagctttccagaggtagttgagtggaaaaggaattctggttgctgtcagagtcagtatttttcttttcccttgctgctttagatacaaagaaaactacagctgcgtgatggcaatgttaatcataagatgttcacgaacagagcaaagagaaatatatgtcagcttctgattctgttacacatgtatatgttatgttgcttgtaaacacacgtacacagcgttgtggtctgtccggacagggactgctgaacctgttatcagcaagaaaaatactccctcctttctaaaaaaacgtaacattcgtcgaa

SEQ ID NO: 22419 - DNA, 1921 bp, Zea Mays
agtccccaccaggcaatcaagaacaccacctaccgctgacttgtcaattcctgtctgtgcgcgcgcgcgcgcgtggcgccggccgagcggccgttgacccgatgaccggcgcggcggccgtcgatcccccggcgcctcggccgcggcggctgacggtcctcccgctcatcgcgctcatcttctacgacgtctcgggaggccccttcggcatcgaggactcggtccgcacgggcggcggcgcgctgctcccgatcctcggcttcatcgtcctcccagtcctctggtcgctcccggaggcgctggtcacggccgagctcgcatcggctttccccaccaacgccgggtacgtggcctgggtgtccgccgccttcggccccgccgtggcgttcctcgtcgggttctccaagtgggcgtcggggacgctcgacaacgcgctctacccggtgctgttcctcgactacctccgctcgctggcggtcctcgcgctcacggccgcgctcacctacctcaactaccgggggctccacatcgtcggcctctcggcgctggcgctcaccgcgttctcgctctccccgttcctcgcgctcaccgtgctcgcggcccccaagatccgcccgtcccgctggctcgccatcgacgcccgcgccgtcgacctcaggggctacttcaactccatgttctggaacctcaacttctgggacaaggccagcacgctcgccggcgaggtcgaggaccccaggaagacgttccccaaggcggtgttcggcgccgtcgggctcgtcgtcggcgcgtacctcattccgctgctggctggtaccggtgcgctgccgtcggagacggcggccgagtggaccgacggcttcttctccgaggtcgggcagcggatcggcgggccgtggctgcgcgtgtggatccaggccgccgccgccatgtccaacatggggctcttcgaggccgagatgagcagcgactccttccagcttctcggcatggccgagatgggcatgatccctgccatcttcgctcgcaggtccaagtacgggacgccgacgttcagcatcctgtgctcggcgaccggggttgtgatcctgtccttcatgagcttccaggagatcatcgagttcctcaacttcctctacgggctgggcatgctggccgtgttcgctgccttcgtgaagctgcgcgtgaagaacccggacctggcgcggccgtaccgggtccccgtcggcaccgcgggggccgccgccatgtgcgccccgcccgccgtgctcatcgccaccgtcatgtgcctagcgtcggccaggaccgtcctcatcaacgccgccgtggtcgtcgccggcgtcgcgctgtactacgtcgtggagcaggccaagaggcgcccgtgggccgagttcttggcgcccgtgccgcccgctgacagctcccacggaccagccacggcgcctgatgacgccgacgccgccgacctcgaggatgtccgcgccgggctgctcgcgggcgagccggccgacgaagaaggcagcaaggtcgagtactcaagactggagattcgtgcatgaacccgtttgccgttctgtgtacagtaattccagcgaatacatggcgaatcattgtgtgaaattcagaggaggaggtcaggtgatcgatcgcgctcacaagaagattcagaactgcaaaccgactactagataagtctgaaccatgaatcggagaagtgagaacagatctcaaattgtagaagctgtttttgttttgaccttttaagtgtagtgtgatgccaggcgaggtggtgccggtttgagaagaagctgtatttttccagcaagggggtcagataggttgtactgtacttgcattgagtcaacttgataattcagtaaagtaaccagcatagaaaatctgtgtcgtaactacgcagaaa

SEQ ID NO: 22420 - DNA, 136 bp, Zea Mays
gcggaaatcttattaccaaattttacaagttacatcaagttttacaatgtacatgatcggagtgattacaaaagtgattaaaagaaataactttgaaatgttataaattatttatagttttgaaatatatgctagc

SEQ ID NO: 22421 - DNA, 4672 bp, Zea Mays
caacaagtatatttggccaactgttcacggttcttcaccagttgcgttcgtcgttcccgttctcctcctcgtatcccctggtccgtacgtcgtggccaccggcgccgcctagctcgcaccgccgacagcgtctcagactagatcgcgcctccccctcccaaatcgggttccagtcgggctcccgcaaccgccgccgtctacaccaggtgccgaggccgatcttttcgtcggcaaagatcgccgagcagatctgcccctggccgtcgccctacaccaggtgccgatatcttcgccagcgaagagcgcccagcaggtacagtgatttgggattctatactacctagctttatgattgcaagacctggttattttcacctgaggttgtgttcaacatgttagtggcatgaaaattgcctcaattgggggcaatggcatctagtacaaaatcagatttagtgtctggtagccctgatgggcatggatacttcaatgcacaacgtgggtcctatgcagctgcttcattggaaaggtcaggaagcttccgtgaaggcggtgatggctatgcgatgttttcagcatcaaactcatcaagaagattcaacatcacttccatctctagggagaaatttaccaaatgctatcgaagagatcagacgtatgaggagtaatcttaacgacaattcaaataaggccagggaaagatctagagcttttggtggtgctatggcgaagattgataaactttgtcccaatattgtgcgaaaacgttctcgaggagacagttcatctaatgaacgatctagtgtgttatcatctggaggagttacccctaaaaatgttcctcagagccatttaaatgcagatgatatggaagctgggcttcagagagaagagaggacaaagaatgcaggacaaaataggagaatacgtacatccatggtggagatggatgcaagaacagctggtccatcaagaggccccggacctactgataggatctcagatcctggtaaagccaccaatggcagttctgcagttccagaagaaaaaatcagaggtttggcaactactatcgatggttgggaaaagccaaaaatgaagaaaaagcgttctaccattaaggcagacatgtcactggctggtgttttgaggactgttgatgtagaccgagagtcaaaacaaggcatgcagcacaagtttactaatgacggtagggcgagaatgacaagttctagtttcaggtctggaactgttgcatctggcacaaccaaagcagatttgctttctacacaaaatggtcttgttatgcgacccttaaataggagtgatcaagacaatggtttccatcctactaacaaaagggaacgtcaagctgcattagataaagaaacgcccaacccgagaaccattaacaagcctaatgaagacgacagtggatgtaacattgcatcattaccgaaggcgaatggatctgcgcggggaccccgatcaaattcagggtcaatattgaagtcatatccaaacattcatcgatcacaagctagttctgatgattgggaacatccgtctggtacaaataagttaatttctgctggtggatctggcattcataaacgtacaaaatcaacacattcattatctcctccgatccaatggggtgggcagaggcctcagaagatatcccgttcagcaaggaagtcaaatttagtccctataatcactactgatagtgcactggtaccaggttcgctggacagtcctgtcaatgaagattgtgcaggtttaccgaggcgtgcatctgtaaatagccttcaacaaacaaaacgaggagatcatgggctctcaactggacctgaaggcaatgagcctgtagttgctgagaaaaagctaagggacaagggcaaaagggctggtgaactggatgatgggcatggctctggttttcagaagattgctatgcttgggcatccttccaaaaggaataagttgcctgctgatgaggatattggagatgctttaaggagacaagcaagagttgtcccgggttttactctgaccaggcctgggactcctgtatccattgacaagcttgaaaatgctccgattacaaaacaaagaagtgtgaggacagtctcagagagaactgagagtaaatctgggagaccactgatgaagaaaatatctgagcgcaaaagtaatgcacggcctaggcatacaagtagcagtgtgcagtcagactctcctgtgcaatctgaagatgatcatgaggaacttcttgcttcagcaaatgctgccctaagatctgcttgtgcaagcacgttctggcggcaggttgaacctttcttcgcatttttgactgcagaagacatcacatatcttagtcaacagatacatttaccagatgattcctcttcaagtaggtcaatggaagggggtgaatgccaaaaatataagggtggtcttgaatacatttcacacccctcaactccagccgctagcaacaaagatgatcacgctgctcttccaaatggttttggcttgaatcagttggataatgacataggggttggctgggaggcaagctgcattgaacctatcctcgatcaacttgtccatgggattggggtaccaggatggtcttcagttggccaaagacttattcaagcattgattgatgaagataggatcgatagtattaccaacaacacttacataagcgagggctatgcatttgatacacatgaaattcattttgatggaggaggatggaagcctcactcaaataattataagttagaacctttagcgaattttgaagcttcaaggaggggcccaaatggtctgacaatggattctgactggaaatataatgatgtgtcaaatagaagtggcaatgtcatggataaaaccaaggtgtggcctgagtttcagtacagtgagatgtgcttcaatgataggattatcattgagctgagtgaagttggtgtatctattgaacctgtgcctgatcttgcacagagtgaggacgaggatattaatgctgaaatctgtaaattagaaggccaacttcgtaaagaggttgtggagaagaaaaacttgctattgaaactggatggcattgttgcaactgcaaaagagtctcagcatagggaattctcacgccttgccatggatagacttctcctgagagcatatgagaaatatatggccttctgtggtccaaatgtttcaagcagcaaaaatgtcaatagaactggcaaacatgctgctctaagttttgtcaaacgagtactagtgcgatgccaaaactacgaagaggcggggacaagttgctttgatgagcctattttcaaggacatgtttttatcagcgacgtctcacagacgcagtctagatactgcttcacaagataacaatacaacagcgagaccagtccacagggccggtgcaccagacgcttcgcgaggaagcagtcacccgacggacctgtcgtttgcaaaggaggatccctggacaaacaacgtaaagcagcgggaactgttgctggacgaggttgtaggtagcataacaggaggagctctgagaacctcctcctccgtccttggtatctccctcgtcagcaatacgaaagggaagagaagcgagagggaagggaaggggcacaaccgagacagcctcaggtccggccgtccgtcgccgtccaacgcaaagggtgaaaggaagaacaaaacaaagctcagacagaaggcagccaacatctctgctccttcaggaggtctacagcttccagcgaaaacaacgcctcccagcagtgggaacggcaaggaggagagcgcagcagcagcagcagctgctgctgccaggcatggtggtgatccggcggcgaatgcttcgaatgacgccgaaatgcccgacctggctaacctcgagctgccaggactggacgccgactttggcggctggttgaatctggacgacgacgacgccctccaggacctcgacctgatgggcctcgagatccccatggacgacatcaacgagataaacctcatgatatagccgtacattttccttcgtttctcacagtaacaaccaacagagaaaaagctcccgatagtgcgtgcacaggtaaccaccaaccctgcagttttaacaccaggcctggttattaagcttcacttagggctagtttggaaactcaaatcccttccggtattggaggtgattgaggggagaatgcaataatttcttcctcaatctcctctaattctggaggggatttgagtttccaaactagctctgataaaagagagagagagggacagacagttgatagagacctcttgacaatcccaacaaccacgtgttgtcttttttgtaccagcgtgtaatttgcctccctgccttgtaccctcccctatacgttcatctgtcgtgtagacgtcggtgtacatatctattttggcgccctagttacaaggtagggaggctagttactgcatctgttactcgctccaaaggttgtgtgtgtacagactgaggacatttctcatctcatggcagcgccgactttccccccttattgcgagcataagatcacattcttttatctcagattagattgaggctagagactattccagccaatcaatgttaacgtaaataaatgtat

SEQ ID NO: 22422 - DNA, 1138 bp, Zea Mays
acaatgtttccaaacttcccatgatactaggatgcaagaggatgtaatcctttcctcatttccttgggcacactcttgattgttttaccccaccaacccaggaagcgagaggaagtcgtagactcgtaggagcagcagcggtaatgttcagttgctggaaaattagaacctacacttgccaggttcactatttttggcctgccacttctgatgctcgcagcatgtatgaggctatgtggcatgacataactgaccaatcaggagaaaatattgtttctgtcaccattcctgtaatgtttgggaggtctattgagattcctcaaagctgtaatggtgtcgcaaggtttgacttcgagtatctatgtggtcgcccagtcggagcagcagattatatagcaatagctaggaactaccatacaattttcatatcagaaattccagcgatgagtatgaagatccgtgacaaggcaagaaggtttatcactcttatcgatgagttgtacaaccaccactgccgccttatatgcctagctgcctcatccattgatgatctttttcaaggaactgaggaaggacctctttttgatttagagagttttcagtttgaaaccgagtccgaagggacaaagctgaggagggatgttttggcggaaggcaatgctggctcaggaccatctactaccggccttgtggcgatattgtctggtcaagaagagatgtttgcgttccgcagggcgatatcacggcttatcgagatgcagaccccgctgtatctggagcgtgtgctggctgtacatccctcgttccgtcgtcctggtcttgcaagaaataacaggcctgcagttcctcagcctgctccggcggtttgaggtttgacagcctcgcgctgtaccattgctttatttcgagtttcgtgtgacaaggcaataaaaccaaccagagatggtaacagtgagacattgtaaatgattgtagaaaggttgtgattattaataagttaaaatttactattttaaacttcaacaggttacacatactatctgtcatttcatcttatattttaaactttactctacgaacggtacagtctaccatttaaaactatgttttggatgactatatggataacctggtggac

SEQ ID NO: 22423 - DNA, 4141 bp, Zea Mays
ttatcgctcaactcggtgtcctaacagtttctactcctcaacctggttcggtggtgtgattatctccctctaccaggcggttccgtagtaaacaactcggcccggcagtcgttcccagggcgagatcggatcgatcgagagcttcctagacctggacctgcgctagacctcaaagactcgatcgcaccgcatcttctctctctgctcctcgttcgcttcgtcgccggcgaccccgccgccagcttccccttccgctggccgccctttgcctcgcccctgaggcgtcggtttccactgcataggagtggggcggcgatccgactggacctagggttgcgagaccccatagggtgaccctaggagcatccgcctccacgtgggtgaggcggaggagggaggatgtcgtcgctcagccgggagctggtcttcctcattctgcagttcctcgatgaggagaaattcaaagagaccgtccacaagcttgagcaggagtccggattctatttcaacatgaagtactttgaggacgaggtcgtcaatgggaattgggatgaggtggagcgctaccttggtggattcacaaaggtcgacgataaccgctactccatgaagatattctttgagatccgcaaacagaagtatctcgaggctcttgataagcatgatcggtcaaaggctgttgaaatcttggtcaaggaccttaaggtatttgcatcctttaatgaggagttgtttaaggagatcacacagcttctgaccttggagaactttagggaaaatgagcagctttctaagtatggcgatacaaaatctgcaagagcaataatgtttgttgagctgaagaagctgattgaagctaaccccttgttccgtgataagctacaatttcctagcctgaagaattctaggctgcggacacttattaaccagagcttaaactggcagcaccagctttgcaaaaatcccaggcctaatcctgacatcaagactctatttgttgatcattcatgtggacaaccaaatggtgcacgtgctccatcaccagcaaacaatccattactcggatctatgcccaaacctggaggtttccctccattgggtgcccatggaccttttcaaccttcaccaacacctgttccacctctggctgggtggatgtcaaaccctccagcagtaacacatcctgctgtgtctggtggtgccattggatttggcactcctacaaatcctgccgctttgttgaagcatcctagaacacccacaactgctaatcctggtatggattatccatcaggagattctgatcacatctccaagagaactagaccagttggcatgtctgaggaggtgaatcttccggtgaatatgctgcctgtgacttatccgcagagccataattaccaacaagatgatttccataaaactgttgcacggaccttgagccaaggatcaacaccgatgagcatggattttcatccacttcaacaaactcttcttcttgttggtaccaatgttggcgacattggattgtgggatgttggtaccaaagacagactcgttgtaaggaacttcaaagtctgggacctcagtaaatgtacaatgattctccaggcatcactggttaaggatccagctgtgtcagttaatcgcataatatggagtcctgatggaaccttgtttggtgttgcttattcaaggcatattgtacaaatttattcctataatggtggcgacgatattagacaacacttggagattgatgcacatattggtggtgtaaatgacattgcatttgctcatccaaataagcagttatgtataattacatgtggagatgataagacaattaaggtatgggaggccaccagtggagctaagcaatttacatttgaaggacatgaagctcctgtttattcagtttgtccacattacaaggaaaatattcagttcatcttctcgactgctttagatgggaagatcaaggcatggctatatgataatatgggatctagagttgactatgatgcaccaggtcattggtgcactacaatggcatatagcgcagatggttcaaggttattttcatgtgggactagcaaggatggtgaatcacatctagtagaatggaatgaaagtgaaggagcagtgaagagaacatatcagggatttcgtaagcgatccatgggtgtcgtgcaattcgataccacacggaacaggtttttggccgctggggatgaattcatgattaagatatgggacatggacagcacgggtcttctaactaccattgatgcagatggtggcttaattgcaagtccacggatacgcttcaacaaggaaggaactcttttggctgtctctaccgttgacaatggcatcaagatcttagcaaatgctgatggacttcggttgctgcgcacgctggaaaatcgttcttttgatgcttctcgtaatgcatctgaggctgtaacaaagcctctaataaatcccttgactgctgcggcaaatgcagctgcagcaagcagttcaggagctggtgctccgtcagctgtaactgcaatgaatggggataccagaagtttggttgatgtaaaacctagaatagctgatgagtcactggacaagtcaaaggcgtggaagcttatggagataactgagtcaactcagtgcagatcaattaaactggcagacaacatgagaacgagcaagatctcgagattgatttacacaaattctggtcttgctatcttggctttaacttcaagtgctgttcatctactctggaaatggccacgcagtgatcggaattctggaaaggcaagcgcgagtgtgtctcccacactatggcaaccaccaagtggcattttgatgactaatgacacgactgacaacaatcctgaagaagctgttcactgctttgctttgtcgaagaatgattcatatgtcatgtccgcttctggaggaaaaatctctctgtttaacatgatgactttcaagacaatgacaacatttatgcctgcaccgccggcagcaacttttcttgcatttcacccccaagataacaacataattgcaattggaatggatgactcaaccatccaaatctataatgtccgaattgatgaggtcaaaagcaagctcaggggtcactctaagagaatcacgggtcttgccttttcaaatgtgctaaatgtcttagtctcttccggagctgatgctcagttatgtgtttggaacacggatggatgggaaaagcaaaagaacagatttttgcagataccgtcaggtcgccaatctaatatcttggacactcgtgttcagttccaccaagatcaaatgcactttcttgttgtgcatgaaacccagattgccatctatgaaactacaaaactagaaccagtgaagcagtggcctgttcgagagaattcacctccaatcacacatgctgcattctcgtgtgacagtcaactgatctatgcaagctttatggatgccactgttggcatatttaatgcatcgagtttgagacttcaatgtcggattcttccagcttcgtatctccccccaaatatcagtccgagtgttcatcctgttgtggttgcggcacacccttcggaagcgagtcagtttgctctagggctgactgatggtggtgtttttgtgttggaacctttggaatcagatagaaaatggggaaatcctccaccggtagaaaatgggtctgctagcaacttgtccgcaccgcctcctaatggagcttcaagttctgatcaacctgaaagatgattgagaagatggaactggtagatttttcgtggcatgagtctaaccaagatgggcttcaaaaggtggtgcaactaaccttggcagatcggttccaagggactcggacaatgggctcaataaaaacaagctcaacagcagtttatccgttgcttatatatatttctattgactgtatcgagtgaagaggatagttctagtatttcattttgctttgtttactgtgctgtgaaaaggagttcttatcagtagataagctgtagacaactatcagtttggctcctacattttatgacttagtgaaagtatcttgtttcatttgcctattggccccgatccgccgttttttatgaactgc

SEQ ID NO: 22424 - DNA, 910 bp, Zea Mays
gctcccgtggattcactcaaatttccataccaaaccagcccgtaggctctagggcgcagtcaggtggagggatttttccccttttgcggcttcctgaactccatcttgccactgccacgagcccacgacgcccgcagccgcagcgaaccagagaggagagcgggagatgaagggcgtcgggggcggcgcggcctccccgggggactatgtctacttcaaatctgtcgtcccgctccacaagatctccattgggtcaaaactgtggaggtactatgactttggacccaaggttgtgccacctcttgtttgtatcccaggaattgcaggaacggctgatgtatactataaacagattatgtccctttgtatgaagggttatcgagtaatatctattgacgttcctcaagtttggaatcaccatgaatggattcattcatttgaaaaatttttggactccatgaatatccatcatgttcacatttatggtacatctcttggtggattcctggcacaaatatttgctgaacaccgtccaaggagagtaaagtcattggtcctatcaaatacttttcttgagacgcacaagtttgctgctgccatgccttggtctccagttgttaattggaccccttcttttttgctgaagcggtacctcttgacaggaatccgagatggtccccatgaaccattcatcgcagactcagtagattttgttgtgggtcaggtggagacattgtcaagagatgatctttcatcaaggttgatgttaaatgttaatgttgcatccgttgggtcgttaatgttgcctgattcactcatcactataatggatacaaatgactgagttgtcttgtttattgcagagatctcctttatatacatgtgtacaaagggcatctgacccttggat

SEQ ID NO: 22425 - DNA, 1995 bp, Zea Mays
cctgcttgagtgatgctaagggcagttctatttcgaagccagtagctacgaaagagaggtttaggccaatgccattttgtttgccagtattatttccaacggcccatgctttggctttgcgaatgatacttcaacttggggtgaagccttcttggtttgaatgcaatagtagtgataaattaactggggacagctttaaggtagcaccaacatttggagatcttcgtagttacatgattgagacaacactccctcctattggtgacgccgttgtggctgaattgctccttaaagtgttggaaccatacagaaaggagggttgcattcttgatgatggaagagccagcctatattcagctatagtgaacaagggagcttgtgcaagatttgcatttgctgctgcgatttttggtgatttccaagaagcacttttctggctacagctgcctcaagctcttcgccacttcctgggtaaatccacaagtagatcaagagagaagatctcacaatcaagtttacatcctgattctgaacaaagctccagatttaatcggatagcttcaagagagagatctgcttctgaaaaaagttcaatctttgtgcagaattatgggcaattaagctcaatggcatttaatcaagagcaactatggttcaatgcaagtgaaaggataccttggcatgacaagctcgatggtgaagatgctttgcaaaagcatgttcatgagcttgtctctctcgggaacttagaggctgcggtttcattgttactttcaacgccacctgaaggatcaaatttttacccaaatgcattaagagcagttgtgctgtcatctgcagtctcacaatccttgcatgaacttgcagtgaaggttgttgcagccaatatggttagaacggacaaatcgctatctggcacacatcttctatgtgctgttggaagatatcaggaagcatgttcacagcttcaagatgctgggtgttggaatgatgcagctactttggccgcaagccatttgcatggatctgactacgcaagggtgctgcagaggtgggccgattatgttcttcgtggtgagcacaatatgtggagagctcttatcctatacgttgctgctggagcactgccagaggctttggatacacttcgcaagagccagcgcccagataccgcagccatgttcttgctagcttgccacgagacctactcacaagccttatcagaatcagagcccgaggacgacacttccgtgttagcactgacgccgacgccggagcagacggagaagctccggttcccttccaagaatgtggccgacgaggacctgatcgcagtcagtgaggtcttcgggcagtaccagcagaagctggttcatctctgcatggacgccgaaccgacgtctgactgaatcgcacgccttgtcgcatggcagactgatgcgggcgtggattctccgtttttgaagcttattattatcaacaggttgcaaattccttccaagtttctgcgaagctttttgttctgtctgttggtaggtaccagacgtccagacatgacatcgggactgctgatgtggcagaatctgatggcaggaggcaggaacagacatgcagtgctgtatcgtaggtgccaatggttggcactgtttatacatacgtaagcatttgtatttggtacaagctatgttttttttttctttggtgcgcaaagagcgagtgcgcagcgaacttctcttgtggccgagatgagatgagaacagatgccatcgaggcagcagcagacgatatacttacacctgtacacccatgacagtttttgtctgaagattggttattatatgcttatctgcaaatgcatcgcttcaggccctggagacatcgctgtcactggatccatcgtcattgccgatccgtgcagacattgttttggaggtccgaaagctacgttcttgtcgcattcaagccctccatgattatggatgatggataatgata

SEQ ID NO: 22426 - DNA, 581 bp, Zea Mays
ggtccaggtagctgaacaccgcagcttcactagccggcaatccttctgagcctgagcccacagcaccaagcttcctttggttgaagttctctacctcctgcaccaactcatccttggttcaatataccaccacgggaaaccaagctatcaacggactgccaatacatcattctgaaatgcaggaggcgaacataaattagaggcttagacatgtgcaaacaaatcatctcttcctttccgcattaaaaagtttcagcaattgaaaacatgtccatcaggatggagcccaatcgcatcaagagtcccttcatccatgacaagttcaaatcttctctccaacttcgactccaaaacatcatcaacctgcaaaaggaccattcctataaactcaaataattcttttctgctcttataatattaaggctagttttgcacctaagatacaacgagaaccattggggatatgttataaagtgaagggcaaggacagcaaatgtgggcatgcatgtcgaggtgaatctacaaattataatatatgcttcagcggctgactcaccaagaaattaatgtgctcaaaccca

SEQ ID NO: 22427 - DNA, 1753 bp, Zea Mays
atttattctacctctttccaatgtcccattttccttgtgaatcactagtgtcgcaaatcccaatctcccagcttgcgcctaaaccctagcttgcctatcgatggcgccgaagaagcgcaaggccgatcccgccgagtcccccgccgccgtggaggcagccaccaccaaccaccgccacgagccggcgtcctcggagcccaagccacgcggctccatctacttccccatcactgacgacccgcccgaacccaacgccgccgaagaggacgaggacgagggcgccggcgacgacgaggacgacgcggaggacattgtcaagctacttgagccgctgtcgcgggagcagctcgttgcgctgctccgcacggcggcggaggcgagccccgccacgatggcggccgtccgccgcgccgttgaggccgaccctgccagcaggaagctcttcgtccacggtctcggatggggtgccggcgccgaggacctccgctccgccttctcacgcttcggcgagctcgaggactgccgcgtcatctctgacaagcaatctggtagatccaagggctacgggttcgtcctcttccgctcccgccgctctgcgctccgcgccctcaaccgccctcagctccaaatcggtggtcgtcttgctttctgtcacctcgccgcctcaggccccgcacccccagctcagtctcagaaccctatctccaacgccaaccccaatgctaactctaactccacgagcaacgcttctggatcctcatcatcacaaactgacaatatacaacgcaagatatttgttggtaatgtgcatgctgatgtggacgtggaccgcctatatgagtattttgcacaatttggtgagattgaagagggcccgttgggctttgacaagaacactggcagaccaaagggatttgcattatttgtttacaagtctgtggagagtgctcgccgtgctttggaggagccaataaagaattttgatggaaagacactcaatgtgcagaaagccatagatgggaggaccaagggctcatctggaatgaatacaaatactaactccaatcccactactgcatctgtggtcgccgcccagatgactgctccttccagtgttgccatcagcccatatgatgcatcagcatatagtgctactgtggttcctgacatgagttttgcacagcaagctgctatgctgggattaggtgcacagcaacaggcattcactcaacccaatgcaatgcttgccatgatagcagcaatgcagaacccagctgcgctagggatgagtccagccatgcttgctgctatgaacccagccttcgccgctgctgcattgggtgcaggggggcagcaggcacacacagttggtcttacaggttttggagctcagggttttgggacaccgtcgtttggagcaggtgccgctttcccaaatgcagcaggtgttcaagcagcagcagctgcatatcaaggaagtggagctcctcctggctttcaagggccacctgggtttcaggttggccaggcaactacccagacaagcactgcagcggcagcggctgccgcagctgccactgctgctggttatcaggctggggcatctgggcagggccaggtgcctggttctcaggtcggaggcactggttttcagggtggatattgacagaactaggttgaacattaaccctgaaacagagaaagattattcagttagtgtatactccttgttccaaaaggtgtcattcccctg

SEQ ID NO: 22428 - DNA, 217 bp, Zea Mays
ataacattctcatgactggcattattacattcttgaaattctccaaccctcgagtagcctacctagcccactcacgtgacgtgcttccgagatgatgtaaccaatctgatcccgatctgtcaatgctgtcttgacgaatagcgccttggttacacttgcagagtctgagtcgacaatatatagccggggcccggccgggggcatgacaccattgtga

SEQ ID NO: 22429 - DNA, 1008 bp, Zea Mays
ggcctgcaacttaatttcaagaagccgagtcaaatcgagctttaagagttctcttggccataagatctcaaggcggtgaacaagctctcatgcagacattgaaccgtgcacgtgaactctatgcacagagattgcaggccagtcctagtgttgatgagcttgcctctttgcttgcccaatgtgccatagcagaggctcagtcatcaaatactaaccctccacaagggcctgggtcagaccctgtcaatatgctgaattctgatgaggcctgcattcttgctgagagtggaaggaagcagatcatcctggacgcatttgctgatgggagcagcttcatttgcttgaaatgtggggggctctttagcacatctcgcaaggatgagcacttagcctactggtgcgggactgcatgatcctggttacgtcttgctgtggtatatccatggtcacacctagcaatgaaccgatgatcatgatacccgtgagattttgtataaactttgttctgttccaatccgattactgcttctttactgcggggatgccagaggcacgtctgttaagtcgtagtaaatacatttgccgatgacaaactttatgaacgaaagtttccatctctatccgcttgttgtacttgtgctttcggctgatggaatgtgttgagatgtttggcatggtcatcaaattctaatagttgaatgtgacgaagcaatgttcttgtggttagctctgatctgatcacgcaaatactgaagctgggtagaaagtttggaggaactgatgatatgccccttcgctttcggttttattgagttgaaaactggatttagcagtgatattcatgagaaaaatctgcaaagaagatagagcactgccatcactacctgctaccataaaaaggttggttttcacattcctctctctgtttatcaactgatcttctgtttggatgaccaacccatgcttttatgatattgttactagcgtcgccactgttgtgtcttcaaa

SEQ ID NO: 22430 - DNA, 2604 bp, Zea Mays
attccaaagccaaagattgcatcagttctgctgctatttcctcctatcattctttctgatgttgaaaatgatattaagcctaggattcgtgaatgggagaaggctggcattgaacaagactatgttagtaggatgttgttgaagtatccatggattctttcaacgagtgtgatagagaactacagtcaaatgctgttgtttttcaaccaaaaaaggatttccagtacagtcctcgctattgctgtgaaaagttggcctcatattcttggctcctcttcaaaaagaatgaattcagttttggagctgtttcatgttctgggcatcagtaaaaaaatggtggttccagtcattacatcaagtccacagttattactgagaaaacctgatcagtttatgcagaatgttttgtttttcagagaaatgggtgttgataagaaaacaacaggaaaaattctgtgtcgttcgcctgaaatatttgcttcaaacgtggataacaccctcaagaagaaaatcgattttcttaccaactttggtgtttctaaacatcatcttcctcgcatcattcggaagtatccagaacttttattgttggacataaattgtacattgctccctaggatgaactacttattggagatgggtttgtctaagaaagatctgtgctcaatgatctttagattttccccacttctaggttacagtattgaacttgttatgaaaccaaagcttgagtttctgctaagaaccatgaagaagccacttaaagcagttgtagaatacccaaggtacttcagttattcactcgaggggaagatcaaaccgcggttctgggtattgcagagtagaaacatagactgcactctgacagagatgttagcaaagaacgatgaactctttgctgaagagtacttgggacttggaggattgctcgagaaacctctacaatcaagcataggcagttaatttctggacttataagattgaaccatgcagtgcactatgccgaagctgtacagctttatgcttggattggtgaggctgtttttcagatgggaggtcacttttttttgaaaacggaggtgagttgtgtttctttgtattcaaatgccgcagctctgataaccactcttttctggaccaataaatggctgcttggttcctctataggagatgtgtcgctggctgttcttgctatggtacccgcaaaaataattaaaacaaggactgtggctgacgcactctcaaacaacagttgggtttcagatattaaaggaggactgtccatgattggtctgttcgaaattttcagctatgggacaccacacatggagtttctttaaccactgacaatgatcgccatatctggagattctctggttggggtgaattctcgtcgaaatcggcctacagagtcttcttccatggtttggtctcctttgatccttggaagcgtatttggaaaacttggactccacctaattgcaagattttcttttggatacctgtccgaaatcgctgttggactgcggaccgattggctcggagaggactggcacacctagtccattgaattctttgcgaccaggaagaggagaatattaatcacaatttgttttcctatgttttcttgagggaattctggtttagagttttctcctggctggtgtatgttgaccgtgtgccggggtcccaggagcaatcgcttgcagattggtggtgaaaggcttgcaaacatctcccaaaagaaaaaaagggaagggcatgaattcgatgattatgttgggagcttggatcctatggaagcatcgcaatgcctgcgtcttcgaaggtttgcagctgagtatgtggaatgttctgcatgctctcgaagatgaacagcatctctggtgtctcgccggagtgcaaggactgcagagtttaggcctgggctccctgagcggttaggtggcatttcctggtctggtctcaccatttctatttgctgtaagagttttgttcttgtaagcacagcccctcacggctcgggctcggtccggaatgaggggtaaaacttgtacgggaggccacttttctggtgcttagtattaaaaaggtttaagaagaaattgcaaagatgcggtttcaaactaggaaacggagtgaaggatgccccacacctttgagtggatgcgcgcaggaaccaatgcaagctgtagtaaggccttgaagtataaggcaacccaagtctgccatcatctctttctcgttgaactgaagcctgtccatgcctccatggcccagtccagcatcatcgccaatcagagctgagggcagccgcagagccagcggtagctagtcggctagtccattgactggccggtgcaggggtcacggactcacggttctgcatttcatattttcgtttaggtgtcgtttggatccgtttattttggaggaattagaatctatttaatagagtaggctatttagcttggaatttgacattccaccactttacaatgttaaaaaataagttatctcaaatttatagaatggaattgactttatgtatcttcaaactacgtttctactctacaatttataacatgtttttttggctcgctc

SEQ ID NO: 22431 - DNA, 1523 bp, Zea Mays
ggccgcatcctctccccccgcggccgagctccacccccacccacccacacgcacacactttgccggcggcgagcaccaccaggacagcaggttacgcagatgtttctttttagagttattgcatctcctcagttgtagtttatctcggttgtgtatccacgagtgctgtgtacaccaattcctgtagaaaagatgggtgaacatgttttcattgttcaagaatgttgttatatgtttttaaatcatgtaagacatgttttagttttaccatggggtctcgagaacaatattgtttatttcctcattctgttttgaagccgtcggaattatgcttgtaatcattgctgaagtttttgtgaacatatattttttttcaatcgattttgctcgagccagtatcttttattgcaacaccatgaactcccatggtgctggttcgcattcacggcttttggacctcaactatccccctgctgaaggggctggtgagggggcttcacgtttcagcagtatccctgtctctcatagagagggttcaagcagcatgcctgtacaacacatccaggcttcgagtagtacaccaccggctactggtgagcctcgcattggtatgcgtagttgccccatcgatgtggaagccatcgatgatgatgccgttatctattcttcaagaccactgcctcgagcaagacagcagttgaccacgacagaaagtattactatcataatagatgatgattccgaaacaaacctagaaacagcaggcgatgctcttgacgagcatgtgaacttactgctatctctgggcatagaacgctcgcatgagcctacaagtgcaaccaacaccttccctggaataagcatggtggacacaccaaaagtaaacaccttcaagtggatccaggtgcctcctgaacctgtgaaggaggttccgaaggaaccgaagctcagctgcccgatctgtatgaacgagataaccgaagcggcgtcgaccgtatgcggtcacattttctgccagccgtgcatcaaggctgccattaaggcccagaagaagtgccctacctgccggaggaagctcactccaagacagcaacaccgggtgtacctcccatcgccttagtagcccagtgcagagtcattttgctacaagttctgccgtgccgggggctgtatgttggaggcaactggggggggggggggggggagcatagaggtcctgtttggttcgttcatttagtgtcataatcagttaacagggtaatctattaccattgctttatgtttggttagactatactgtaaacgattgcagtgggatgcaataccagccaatacaaaattattgccgctgctttttgactgttagccaactccgatccgtctttttggatcccacgttgcaaccaaacatagactggtaaccgttcacagcaaaggatagcaggtgcaataagttccattctcattaccactacctgttgccgaaccaaatagcacgtcttagtgttacgggaaaaaattgc

SEQ ID NO: 22432 - DNA, 1077 bp, Zea Mays
tcaaaattgaggggaaacgagaagcagaaaggcaacaatagcaatatgaaggcttcttcgaaagtcaagaaagaaccaacggcgcagaagaaaagtgcaggtgctgctggaagtaatgccaagacatccaaggttaaaaaaattaaagatgaagatttggaagatctcaaggaggacaagaaaaggaagaaacgagtgggtgtcaaagaagaggcaaagttggccttggccattgtaaagggagagaaggttaagaaagagaggaaagtgtatggtttgccagggcagaagcatgatcctcctgaagaaagggatccattgaggatattctatgaatcactctatgagcaggtccccaccagtgacatggctgcaacctggttgatggaatggggtttgctcccggtggatgtggctagaaaatgttttgagaagaaacaaggtcagaaggttaagtcaccagtcaaagcaattgtggcgaagagaattccttcttctccagccaagacactgccttcatctgcaaagaagttagttatgccttcaaacagtgctggaaagctgaagtctcagaagaaaaggaaggcaagtgatgacacagatgatgacgacgacgacgatgattttgtagcttctaaagcaaagaccaagaggcacaaggcctagttaggtcctagcatctcattatcctagtaatgagacgtgttcttcagacaatttctagctcggatgaccttggatgattgttccttccattggtttgctcatttggggcgcgcaactaaattatgtgaagtagcgtgttgtgttgtgtcaagaagtaccacttgtcgatggccttttcagatctggaatgaaggtaagttcctgcaaactttcacttggttagcatttgactccagtgaaacatctggttggttagcatttgactccagtgaaacatctggttggatgactgtatttgcacggggtaacatatttcgccgagctcgacgtaggcgcatccccaagcaaaacagaatttagaataattattaggttgccgtcgatgatacgtaattctgaaaagcttgaacg

SEQ ID NO: 22433 - DNA, 631 bp, Zea Mays
atggggagttccgccccggtttctggacgttttccatggggggagcaggatgtcgctgtctgcagcgccagtcgctctcaccccgcgcaaccagctgctgagcggagcagtgtgacgctgccgctgagcaccacctctgtcaatctgacacagagacaggaggcccgaggccagccagccagccagccaagttggactacgggaggacgggacgagtggagaggcctctttggaggggagtcggggagacaattaatatcactacatcaatttggcgaaagcgacggcgacgccctcccggtcccggatctaggccagcgagcgagggctggccggccggctgcctggctggtggctgctgctactcgagatgttgaggcccggctgccgtgggccgtcccgtatgctgaatcagatgccagcgtatagcctagcctagcctaggtagccccgagtgcgaatgtgcgatactgctactatcatatcatgctgctggtatctcgtcttcgaagctcaacctaaacttcatttctcttgcctgtgctacagagatatcttgttgttcccaaagacagaaaaaaaaagagggaactcatatgtagcaacggtgtttcagtcaccccaaggatcc

SEQ ID NO: 22434 - DNA, 1802 bp, Zea Mays
attccgcctcctccaagcattttcaaattctctttcttctttctcctcccaataaacacacccacccggtcgctccgctccaccgttccgccctcgaccgcgcgcggagcctcctcaacccttcagacctccgcctcccaccgcttccgtagcctcgcctcgcctcgcctcgcctcgtccttctcctccgtcccaaccatgagggagatcctgcacatccagggcgggcagtgcgggaaccagatcggtgccaagttctgggaggtgatctgcgacgagcacggcatcgaccacacgggcaagtacgccggcgactccgacctccagctcgagcgcatcaacgtctactacaatgaggccggcgggggccggttcgtcccgcgcgccgtgctcatggacctcgagcccggcaccatggactccgtgcgctccggcccctacggccagatcttccgccccgacaacttcgtcttcggccagtccggcgccggcaacaactgggccaagggccactacaccgagggcgccgagctcatcgactccgtgcttgacgtcgtccgcaaggaggccgagaactgcgactgcctccaaggatttcaggtttgccattcattgggtggaggtactggctcagggatgggcaccctgctcatctccaaaatcagggaagagtacccagataggatgatgctgacgttctcagtttttccatcacccaaggtgtctgatactgtggtagaaccttacaatgccacgctctcagttcatcaacttgttgagaatgctgatgagtgtatggtcctcgacaacgaagctctctacgacatctgcttccgcactctgaagcttgctacacccacttgcacatgcatctcacaagcattttgtcaccatactatctgttctaagtcggtgacctgaaccatctcatctctgcaaccatgagtggtgttacctgctgcctgcggttcccaggccagctgaactcggacctccggaagcttgcggtcaacctgatccccttcccccgcctccatttcttcatggtcggcttcgcgccgctgacgtcaagggggtcccagcagtaccgcgccctgaccgtcccggagctgacccagcagatgtgggacgcgaagaacatgatgtgcgcggctgacccgcggcacgggcgctacctgacggcgtcggccatgttccgcgggaagatgagcaccaaggaggtggacgagcagatgctgaacgtgcagaacaagaactcgtcctacttcgtggagtggatcccgaacaacgtgaagtcgagcgtgtgcgacatcccccccacgggcctggcgatggcgtccacgttcgtcggcaactccacctcgatccaggagatgttccggcgcgtcagcgagcagttcacggccatgttccggcgcaaggccttcctgcactggtacaccggggagggcatggacgagatggagttcaccgaggccgagagcaacatgaacgacctggtggccgagtaccagcagtaccaggacgcgacggcggaagaggaggaggagtacaaggagggagatgaggtggctgcctgatccaccggcacattgtggggttgtgcacattgtggggttgtgttattattgttgctcttcatctggtgtttaaaatgttactgtgatgctgctgcgaaactgacgtaagttttaactgtggaattgattacttctagatcgtggatttgtcgatctgatattagatgtattctatatcttggtatcttttttttagagttcaggggcacatgagtcatcgtc

SEQ ID NO: 22435 - DNA, 4406 bp, Zea Mays
ccaatttcttcgaccgaacgaaaacacagccgtcgtcgccgtcccgcccgcccacggccgccgccgccgccagctgccgtttcccaaaagcgagcgaacggcaaaccaaataaaaactcctcgaactaccggcttctactaaaaccctcgacgtcggcagcgcggcgtcggcgagatgaagaacctgcgccttgtgacgaggctcccgcagcagctccagctccagatagacggcgaaaccctcgtcgcctccgccatcgacgcagagagccgccgcgctttcttcgcttcctccgccaacttcatctacaccgtctcactgccctcgtcctccacccaggaacagcaactactgcaatggagcaaaactgctactcaacactctgacatggaggaggttgttcttgatcctggagatcgcattgttgccatggattatcttatggagagggagtctctactccttgggtcgtcagatggttgtcttctcttatataacgtggaggagaaaacaactgaagttgtcggaagactggaaggtggtgtcaacaccattgcctctagccccgatggggcccttctctctgtcaccactggactcggccaactgcttgtcatcacacaggactgggaagtgctgtttgagacttcacttgaccctcaagacgagaccattgacaacacagacagtaccggtggtcagagtcgaagtgcaatttcttggcgaggggatgggaagtatttcgctacacttgtagcccctgagagcttttctagccctacaaaacttaatgtctgggaacgtgaatcgggaaaactgcattcttcttcagatgccaaaacttttatgggagcatcgctagattggatgcctagtggagcgaaggttgctacagcccttgataggaggacagagggaaagtgtcctcttattattttctatgagaagaatggcttagagaggagtcacttttctattgatgagccaggagaggttgccattcaagctttaaagtggaactgcaattctgagatccttgctgctctggtttcttctggtcagcatgatgttatcaagatatggacctgcaggaacaatcactggtacttgaaacatgaactgcggtacacaaaggaagagggggtgaagttcttttgggatccaacgaaaccaatgcatctgatttgctggacactgagtggccaggtcattattcacaagtttgcttggactacggcagtcagtgagagttcaattgcacttgtgattgatggttctcatgttcttgttactcctcttattttgggcctcatgccacctcccatgtctctgttccaccttgcatttccttgtgcagtgaatgaggtttcttttgtgaccaataactcgaagagccatttggctgcttatctctcaaatggcagcctgtctgttgtggaacttccagcacctgatacctgggaagaatttgaaggcaatgggataagtgttgatccttgctgttctgacttcactttgaataactgtatgcacctcacttggatagatacacgcaccttgatcggtatctgttgctatagtgaacacctctcttcaacaaaaatcaggtccagtgaagccagtaaccttgtagataaacatgattcgctgtttttcatccatgagattgaacttaaatgttcagagagttctgtgccaggttcagtgtgttcatctggttggcatgctagagtatcaaagaaagtgcagttggagagttcagtcattggagtctctccaaacccagcaaaaagaggttcagccttcattcaagttagtggtggaaagattattgagtactgctcaagtttaaatctgttgaatatgtgtccaccagcacaattcagtggcattggttctgacctttgttttccagcatcatgtccttggatgactgcagttctgtgctatgaaaatggtatgacagaaccgcttctctttggacttgatgaaagcggcaagctttatatgggcaaaaggttattgagcaacaactgcagcagcttcacattatactccagtgtttatggagccactgagccagttatgagccacttgcttgtgactactaagcaagatcttctattcattgtggatgtcaatgaggtcttacttaaagacatcgaggtcacaattgatggccttgtcagtagtcctgctcgcggtaagcaaaacaaagagtacatcactgtgtgggaaaagggagcgaagttggttggtgttctccatggtgatgaagcagctgtcataatgcaaacaacacgtggtaacttagagtgtacctaccccaggaagctagtccttgtttcaattgttcaggcactggttcagaagcgtttcaaagatgcaataggcatggtgaggaggcatcggatagattttaatatcattgttgactattgtggtttgaatgcttttatggattcagctgcagacttcgttaaacaagttaataaccttacccatgtcactgaatttgtttgctcaatgaagaatagcaatgtcagcagcaaattgtatgaagcctatatatcatttcctgatcagtgtgcaatcccaatggcggataatgaaagttcacctggtttatttttgggtaacaaagtcacttctgtacttatggccattcgaaaagcccttgaggaacaaatagaagagagctcatcaagagaactttgtatattgaccactttggcccgtagtgaacctccattgttggagcaggcactgaatagaataaagctccttcgagaatcagaacttcttgggcttgacgatgccaagcgaaagctctacccttctgctgaagagtcactgaagcatttgctttggttaacggacactgaagctgtttttagtgctgccttgggattgtatgatctgaatcttgctgctattgttgctttgaattcccaaaaagatccaaaagagttccttcctttccttaagagtcttgaatgccttcctcctgctatcatgaggtatacgattgatttaagacttggaagatacgagagtgctctcagaaacattgtttctgctggcgacgcgtaccatgaggattgcatgaaactcctcaatgataatcctcagctgttcccactgggcctccagttatttaatgaaccagataaaaggaatcaaattcttgaggcatggggtgaccatctctctggagagaaatgctttgaagacgccgctttgacttatcagtgctgttcatcatatcagaagtcactgagagcttaccgtgcctgtggagactggagaggtgtttttaccgttgcaggtcttctggagttaaaaagggaagaaatcgttcaactcgcacacgagttatgtgatgagttccaggcacttggcaagccaggagatgctgctagagtagcactggagtactgttcagatgctgaaagaggtgtaagctactatatcatggcaagggaatgggaagaggctcttagagtcgcttacatgcttagcacgcatgatctggttgaagctgtcagagacgcagcttcagaatgcgccgcatcactgatagccgagtaccaggaaggactgttgaagatcggtaaatatgcagcacgctatttggccgtacggcagaggagattgtcgctcgctgccaaactccggtcggaagatcggtttatggatgttgaagatgacagcgtttcagaaacgagcactagcttcagtgaaatgagcgcatataccacaagggagtcgagcgcttcggtcatgtccagcaacgccagcaaatcacgggcggcaaggcggcaaaagaagggcggcaaaatacgagctggaagccccggggaggaaatggccctcgtggagcatctcagggggatggcgttgacaggcggtgcccaaaacgagctgaagagcctgctcgtggctctaatacagctggggaaagcggagacggcccgtcgggtgcaggaggctgcagacagcttcgaagtgtcccagagggccgcagtgaagctggccgaggacacggtgtccagcgaccgcgtagaggagagagcgcacaccctcgagcgttacgtgaggatgctgagggatcgggagtctggccatggcgaggctggtggtacgtggcggatcaatgcgttgtctccccccgtgacagggtgagagggttttttttttactggttagcagtttagcattgtttaaatcgggacgaagagtgctgtgttctttcttgtgggtggcatcgtggcgtgcgtcaggctttgaccttgtcgattaactgctgtagcatcagttggaattcttggtgcctggtggggctgttgtattggatctatgtttgccaataccagatttgtccggttttttttctgacaggaac

SEQ ID NO: 22436 - DNA, 2160 bp, Zea Mays
tcgagagcgagccaaaaactcgaactgttcaaaccccgccagcccttccgctcccacgacccaaccccactgcccggagcccccgagccttctcgaatcttgcgagaaccccaggggcgaggagcagatgtcggcgaggctacgggtggcggagctccgcgcggagcttcagcgccgcggcctcgatgtatccggcaccaagcctgctctcggattggccaaggcacgtggagttgcggcaaatgggggcaagaaagatgttatccagaggttgctctcggcgactgctgatcctgctgcagttgcagatggtggtcctcagggcgaaaaggaagtcataaaaggtggtgatgaggaggttgaggtgaaaaaggagaagatggttactgccacgaagaagggagctgcagtgctggatcagcacattcccgatcacataaaagtgaactatcatgtcttgcaagtgggcgatgaaatctatgatgccaccttgaaccagactaatgttggagacaacaacaataagttctatatcattcaagttttagaatctgatgctggtggaagctttatggtttacaatagatggggaagagttggggtacgaggtcaagataaactacatggtcccttcccaacacgagaccaagcaatatatgaatttgaggggaagttccacaacaaaaccaataatcattggtctgatcgcaagaacttcaaatgttatgcaaagaaatacacttggcttgaaatggattatggtgaaactgagaaagaaatagagaaaggttccattactgatcagataaaagagacaaaacttgaaactagaattgcgcagttcatatccctgatctgcaatattagcatgatgaagcaaagaatggtggaaataggttataatgctgaaaagcttccccttggaaagctaaggaaagctacaatacttaagggttatcatgttttgaaaaggatatccgatgttatttcaaaggcggacaggagacatcttgagcaattgactggggaattctacaccgtgattcctcatgactttggtttcagaaagatgcgtgaatttattatcgatactcctcagaaactaaaagctaagctggagatggttgaagcccttggtgagattgaaattgcaactaaacttttggaggatgattcaagtgaccaggatgatccgttgtatgctcgatacaagcaacttcattgtgatttcacacctcttgaagctgattcagatgagtactctatgataaaatcatatttgagaaatacacatggaaaaacacactctggttatacggtggacatagtgcaaatatttaaggtttcaaggcatggtgaaacagagcgatttcaaaaatttgctagtacaagaaataggatgcttttgtggcatggttctcggttgagcaactgggctgggatcctttctcagggtctgcgaatcgctcctcctgaagcacctgttactggttacatgtttggcaagggtgtttactttgctgacatgttttcaaagagtgcaaactattgctacgcctctgaagcatgtagatctggagtactgcttttatgtgaggttgcattgggcgatatgaatgagctactgaatgcagattacgatgctaataacctgcccaaaggaaaattaagtaccaagggagttggtcaaacagcacctaacatggtcgagtctaaggtcgctgacgatggtgttgttgttccccttggcgaacccaaacaggaaccttccaaaaggggtggcttgctttataatgagtacatagtgtacaacgtagaccagataagaatgcggtatgtcttacatgttaacttcaatttcaagagacggtagatgttgcaaagagctgaaactgttgctgagatcttagcagaacatatgtggacttatagcaccaggtgccctcagcctcattttctgagcaaatttggtagcctttgcatttcgattttggtttcaggcttctagccccattgatgattgatactgagtgtatatatgaaccattgatatccaccttccatgtacttaagtttttttaacatgtcccatgcatataaatctgatgaagcatatagcactaatacgattctaacttgagaatgtattttgtgcacaag

SEQ ID NO: 22437 - DNA, 1079 bp, Zea Mays
gtccctgtcagaataaatcagcgtgtcctcagatttcaggcggctggaggcatacgatggcacttacatcagagggaaagctttacggatggggatggaacaagttcggacaagtcggagtcggcaacaacgacgaccacagctcccccggacaagtcagttttccagaggatcagaaaatctcccaggttgcatgcggatggaggcatactctggccctctccgagaagaaaaatgtcttctcctgggggaggggcactagcggacagctcggcaacggtgaaatagtcgacaggaacacgcctgtgctgatcgatgccctgagctcagacggttctgcctgcaagaagctggagtcatccacggcagccccattcgcagccaaagtttgggtgtcgccgtcagaacgatacgccatagtccctgacgagaacgtgagttcgatcagttgacgcgcgtgttgtctgaactctgaagcgaatcgcttaaactgcagcactagtccgtaaagcaggcggaggcacggcacgaggcaacggcgccgacgcgaacgtgccggagaacgacgtgaagaggatgcgcgtgcagtcgtcgtagtaggtcttctactaccgtccactccaccacccccccgttaaccctactagtagtaagtactacgaagacgaaccggtgccccatctagcggcgcccgatttttgtgcgttacgttctgcctaaaagtgctttccgtcgacggacggacctcctggtgttgagatggtagcggtagcactgcctcgcggcgatggtgtgtgtcgtgacgtgattcacctcttagagtagagaggtggctagcccagtcgacctgtgttgtgtgtgttgttaagatgtgtcctggatcttttgtgacattgcatggagggtacaataagcgcttcgtttctcgtttcttcccacttgttgcatgatagccaactgaaaccaagtactccgtgagacgaaagcaacgagcacacaaagactattttgcctatcttcatcatcaatcttcgcatcgcatcgacggtcacaagatcagcaaccaattcattgatcga

SEQ ID NO: 22438 - DNA, 3099 bp, Zea Mays
gataccgtctccgacctcctcccttttgcgctagcttcagagcatcatcaccactccacaccaccgccccagctcgcttccctccccgctacacggtcgctcaccagtcaccacccaccactgcttccatgctcctcgcctcgtttccagctcgcgaaacttagctccagatcctctcccccccccccccccatccaccgcgccgcattaacctcagatccacccggcgagctcatttcagatccatccatgcgcttcccgttccttttcgccctccagctggtcgccttggcggcggcagcgtcggcggccgaggtcgcggtgacgcgctcttcgaggatggtgcaccgtctgtcagacgaggcccggctggaggtgggcccgcgtgtggggtggtggccgcagcgaggaagcggggagtactaccgcgcgctagtgaggagcgatatccagcggcagaagcggcggctcgcggtcctctcgctctcaaagggcggcagcaccttctccccgggcaacgacttaggctggctatattacgcttgggtggatgttgggacgcctgctacctcctttttggttgcattggatactggtagtgaccttttctgggttccctgtgactgtatccagtgtgctcccttgtctggctaccgtggaaatctggatagagatcttagaatatacaggcctgctgaatcgacaacaagtcggcatcttccttgcagccatgagctatgccaatcggttccaggctgcacaaacccaaagcagccttgcccatacaacattgactacttttcagaaaatactaccagctctggtttgctaattgaggatacactacacttgaactacagggaggaccatgtacccgtgaatgcttcagttattattggctgtggtcaaaagcaaagtggtgattatctggatggtattgcaccggatggactccttggccttggaatggcagatatttcagttcctagtttccttgctagagctggactagttcagaattccttctcgatgtgctttaaggaagatagttctgggagaattttctttggagaccaaggagtgccctctcaacagtctacaccgtttgttcctctgtatggcaaacttcaaacttatgctgttaatgtcgacaaatcttgtattggacataaatgtcttgagggtactagcttcaaggctttagtcgatagtggaacatcatttacttctcttcctttcgacgtttacaaggctttcacaatggagtttgacaaacaaatgaatgctacaagggtgccttatgaagacactacctggaaatattgctacagtgctagtcctcttgagatgcctgatgtgccaaccataaccctgacatttgctgcggacaagagcttgcaagctgttaatcctatcttgccatttaatgacaaacagggggcacttgccgggttctgcttagctgtgctgccatcaacagaacccattggaattattgcccagaatttcctggttggataccatgttgttttcgacagagaaagcatgaagctgggctggtaccgctccgaatgtcgctacgttgaggacagcacgacagtgccgttgggcccatcgcagcacgacagtccagaggacccgttgccgtcgaacgagcagcagacttccccggccgtgacgcctgcgacggcaggcacggctccgctctcctgtgcgacgacgaatctgcagatgctccttgctagctcttacccattgctgttgctgacgatgtcgagtgtgttcttcgtctcgtgaacaaccgatatactactaatcgatagccttgtatattgtatgtgctttatttatggtgtttttttctttatgtgttgctctagaggtttatagatcagctgtattttgcctccgttgttggtccctgggatagcctagcaatagcaatcccccgactcgaaatgcagaagtttcagaaatggtgcggaaacgagcatatgccctcgcagtctgctactctgcttgcacatcatctatcgtctttgacacgcatgggctgatgggcgtggccaaatccacttagcaaaagctgcagcgaagcaggcgatttttacccgtcccccggaacgccggtgcgtgctccgctactcagattaacctactgcaacgcacaacagcagcaccattccactgcgctgcacagcacaaccgtcacacgagacgagacctcgcaccagccacgactactcgcctcccctttttccccctcgtcgtgctctcttgtcaacccccaatgcagcacgcacaccctctcctctctcccgtcccctcacgcagtcacagtccatctcgccatcgcattgcctagttcaaaaggcctccgaaatcgaacagtccctgccgggtgccggcctcgtacaagcaaaagacagacagttcccgcatcaaccggctagctagctagcccttcaggacctcgctgcattccccatgggaggcgccatgaggcagctgcttagctttctgggagcgatcaatggccgccccaccccagggagaagacgaacgacgacgctgcggcggcgcctggtgcgggacggtggagctgagggtcaggatgaactgcgagcgcgaggtcaagaatgctttctccggcatgcatgagaggagtgcagcatgtggaggtgaaccggctgcagcagaaggtgacggtgacggtgacggtgactggcgaggtggacccggtcgtggtgctgcggcctgcggagggcccagcccacggggaagaaggcggcggagccgtggactggcccccataacactgccggctgctacgccccggcggccgtggccctctaccgcgtcgggccggcccagctgcaggcccacgacggcaggtgggcagacccgtacctggtctcggtgaggagcgtggaggcggacataggcgccgagcatatcagcaggttgttcagcgacggcaaccgcaacgcctgctcccagtgggtgagctccgtaaaaattgttgagaactacgttaccgcggatcaccagatccgctcccttttttcccgtcagcagtagagacgcgagaagttatag

SEQ ID NO: 22439 - DNA, 2671 bp, Zea Mays
aagattttgaaaacctgcggaacaaattaataaacgaaccagtagaagccaaacgaaatctttgtatttcatacacttagcttttcccctcctttttcaaaaaaaaaaaccctctcccccaactccacctgcttcgttcgcttcccttcatccccactccaccaaaccctcgcgtcgctgggactgggagcagagtagagcacagcggagcagattagcagaaggtgtcgagtggaagcaaatggccaatgagtggccgcggtggtggtagcatcctcctcgccttttctccccgtctcccgcgttctggttgttgcagcgagcgggagcgggaggacacgtgctacccccgtcgcttctcgggcacgcctccctcactcggatctgggccgcgcgcgcgagatcctgagctccgggttggagagctcccgtgctccagctcaggtgacgtcgatggagcccgcggtggctacagcgggtgaagggcagcggttcaagcggattccgcggcaggcgtggtcggggaacctcgaactgggtcctctgcttaatgaaagcttagatcactggccacatctaaatgagctggtacagtgctacaaggctgattttgtgaaggatgactgcaaatatggacactatgagagtgttgcatcaccgtctttccaaaatcaaatttttgagggacctgatactgacatagaaacagaattgcagctttgcaatgcaaggcattccaagtctgaggatgctactgaagatgatacaccaagcacctcagggaggcaaatatatgaaactgaatcatctggttcgtcttcaaaagtgcactgtagtttgtcaccattgccagcatatgaggctgcatttgattgggagaatgagaggtctttgatatttggccaaagggtgccagaaagtatacctgcaataagcaacagtggcttgaagataactgtcaaggtactatctttgtcattccaagctggattagtcgaacctttcagtggaacgatttgcttgtataacagagatagaagagagaggctgtcagaggacttctatttccatatgcttccaacagatatgcaggaccagggttccttggatcgtcgaggtgttttttcattggacgcaccttctccatcggtctgccttttgattcaattggaaaaggctgctactgaagaagggggagtaacaccttctgtttattctcgtaaagagcctgtgcacttagctgagaaagagaagcaaaagctgcaagtatggtctcgaatcatgccttataaagagtcatttgcatgggccatgattcctctgtttgaaagtaaccgtgcgggtggtcttagtgatgctgcttctcctagcagtcctctagcaccgagtttatcaggatcaagttctcaagatagtattgtggaccctatttcgaagcttgctttagatggaaaagtcaaccattactcaagtggaagctcagttattgtagagatatcaaacctaaacaaagtgaaggaaagctatatagaggactccctccaagacccaaaacggaaagtacataaaccagtgaaaggtgttttgagattagaagtggaaaaacttcatgatgaccataatgatgtggataacgcttctgaaggtggaagcatggccaatgatttgaatgatgctggtgacatcaataatggcagaagcaacagaagtagctttgatgggattcacagttctgtgaattctattgccattgccaaaaaagatgctcatcacaatggacacacttctaatgctgagaatgttgacaattttcaagcttttgactttcgggtgctgacccgaagtgagccattttcgcaactttttcattgcctctatgtgtacccattgactgttagcttgagccgcaaaagaaacctctttgttagagtggaactgagaaaggacgattctgacatcaggaagcctccattagaggctgttcatcctagggagcggaatacgatgctacagaagtggggccatacacagattgctgttggaacaagaatggcttcctaccatgatgaagttaaaatcagcctacctgctcttttgacaccccaacatcatcttgtgttcacatttttccatgtagatcttcaaatgaaacttgaagcaccgaaaccagtgatcattggatattctgtacttccactgtcgacacatattcagttactttcagatgtgtccttgccgattttgagagagctcgttccacattacctgcaggaaagtggaaaggagagaatggactatctggaagatgggaaaactgttttcaggttacgtttaaggctctgctcttcattgttcccaattaatgaaaggataagggacttttttgttgagtatgatcgccatactctacatacaagtcccccatggggttctgagcttcttgaggccataaatagtttgaaaaacgtcgaatctactgcattattacaatttctgcaaccaatacttaacatgttgcttcatcttattggtgatggcggtgagacccttcaggttgctgcatttcgagccatggttaacattttaacccgatccgtagcttttaccacatagcaaaaactatgtacctacaactgatttccaatttggaacggatggagtaccaggctac

SEQ ID NO: 22440 - DNA, 1412 bp, Zea Mays
ccgagtcaatgttggagtactgagtacctacttcctttgcaccgaagttctcgagacgactcgtctccctctttcaataagttcggcagggtaggacggcttcttcctctgcgccttcaccttcgcctgcgctgccggggctcgtcgcatggtttttaaatcgggtttgtaagttttagatctttatgtcaactaccaatctgaggcggcgactccatcatggagacgttgatggaaggaaaaacgagcatgttgacatatccagtgctgattccctcaatgaacctctattagggaagtccaatgatgacaactttggatcagaggtgtatgatcctagaaaacaggatctgtgggatgatgatatgaagaaagaacaactacactggtcatttcttttctcaaacttgattacacaatgggcacaatggttagcaagcattattgtgagctcaggatctatctttggtagattatcccccttctcttcagagaaccaaataaatccagtatatcttagccctttacaggaacaaaggttggatactttaagacacagattgcaaatctcttttgatggctcccgtattgaacatcaagatgccttgaggcaactctggcgtttagcttatcccgctcgtgagattccaccactcaaatctgaattatggaaggagatgggttggcaaggcaacgatccatctactgatttcaggggtggtggactcatatcgttggagaacctcatcttttttgctaggaactaccctaattcatttcagatgcttctgaacaaagtacaagggcagagatcagattgggagtacccttttgcagttgctggtatcaacgtttcattcatgctggtccagatgttggatctgaagtcaagtgttccatcttctaagtatggaattcgtttccttgaattgcttggacgtgatgagaacgcctttgaccacctgtactgtgtggcctttcggttgcttgatgctcagtggcttgtgaaacgtgcctcctatatggaattcaatgaggtcttgaaatcaacaagaactcagctggagcgggaactggttctagatgatgtgctggaggtgaaggacctgccgtcctacactatgctggatgagtaagctaaagccgagctgttgaacttggacgctggagaattgactaagctggtctgatggctaatagttatctagcgtatgctgatgtctgatcctaaatgcttaggcggcccacatgccattttacattgccgcatattttttttcttgttgtatactgaggtcttatgaggtgtttatatatgattcctttgtaaatattgtgtttgttatatgttatccttttggacatgctggttccaaggaaataaagcaatcgatctcgtattcattttcagc

SEQ ID NO: 22441 - DNA, 2967 bp, Zea Mays
tcatcatgcatagatgtggaggtgatccccatctcagatggcccagtggggggctggggcgagacatgcatttagggagtcatgatgaggcgagctcagcccccagggaatgacggcggcccagcagttgagttacgctggggcaaggtcagcctgattgagccccggcggtccatcatggagagacaatgccctagcagggtcattaatatcacatgcgcctgtagctgccttcataatattactctggtggatgtccacaccttcctcgggaatacacgaaatctgtgcatcagccacaagatactccacgcgctctgaggaataagccgtcgggtgacatgaatgcgccaagcgctccccacagttctcgtctaccgtgacgcacttaggcgtcgagtccagagccctaggcgcatgcttagcccgcgccccctcggaccctgtggacccaggcggagatgaacaggtcgccgcggatcctgggagcctcctggacgtcgaggctgctggtcaggcttattgcgatcttcattagcatcaggccctccgtcagaagccggagggaggggaggttgagaaaccatggatgatgactgcaaattcgccgggaaaaacctgatggaaatcttgtatgttaggcatctcttttgttgcatgtcaagatctggctcaataatatgaaggtccatgtcactatgcagcctttctggatcaaaacaccatgcccgcaccttgaaggatgagaaatccctcacactctcagtgtccggatgcaagtcagaaatccagcaagattcatgcaagatgtgctctgccgttgaacggaaccaagcatgctcaggaatacctctaatttcaacatctcagtgtccggatgttgatggcatgttgggaaggcgggagaaccctggagaacatgaagccatgcggaagatgaaaaatgagtttatggtgaactgggatggtctgagaacaagggagaaagaacgtgtattagtacttgctgcaactaacaggccatttgatcttgatgaggctgttgttaggcggcttccaaggaggttgatggtgaatttgccagatgcatcaaataggagaaaaattcttagtgtaatactagccaaggaagatttggcagacgacgttgatctagaaactatagctaacctgacagaagggtactcaggcagtgatctcaagaatctgtgtgttactgctgcacaccgtcctattagggagattcttgaaaaggaaaagaaggagagagcttcagcagaagcagaaaatagatcattgcctccgtcacacactagcaatgatgtccgtgcattaagaacaagtgatttcatacatgcgcatgaacaggtgtgtgcaagtgttccctcggattccagtaacatgagcgagcttgtgcaatggaatgatctctatggagaaggcggatcaaggaaaaagacaacgctaagctacttcatgtagcttaggttataaatatattgggagaagtgccctggcacaaagcagcaatagttggaggcggtgcagttggaaaaaaaaagctatgctcatctgccagacatccatatcaaagagaattgatggttcaggtggagcggaatagaatggaatggaatagtatacatacacatggttgctgcctctgctctgggccatgcatcatgcatctggacaggacggctatcctggcttgcagttgccctatgcagttttgagtgcaatggtcaccatctgtgaagcacggataccacagagatcctggccccaaccactcttttcacaaatggagctgaggacctttggagttctaccaaaagtgatcttaaatctttgttctttgactttccgttttgtgaacggaaggccccactctgctagtatggattgttgatcctccgtttctctggtactgactgaactgctcatacaaaactcgttcaacaggcagaaatgctgcctggtggccttctagagtgcttctttgacgccgcagagagcacatcaaaaaaaatgtgtttgtttcgaacgatttgtgctgcattccattcacggcgatatcaggtgccgttgtttgtgtttggttccgcaatcaagggagtgaaagccattagcacatccaatcaaacaaatagcgatatctctttcactgtaccagttagcgctggtctcggatgctattaacattgctgttgtctgtctcggaaccaaacaccgcctaactcgtcggctgttaaatatttctgaactgaattactgcacttggttggggtttcatgcttatcaagttggcttatatagccaacaatactttgtgcagttctgcatcctctgcctgcttatgcgcgatctcattggctgagcggtacgaagataaaacggtagctaatccgaagcgatggcttctctttttctttctacggtattttgtctctatgaattacagttacagcagtcagaacagctgatttaaaaccgcagcgaaaaggctgattgccttgcccatttttgggtgggtggaggttaatacagatttctgtaatttttttactttaatattgtttgacatattgtgcaaggcaaatgatttcctaatgatttgttctacttgatattgtaatccatattgacctatatgctatgctcagttccttagagcatctccagtacttgatattgtaatccatattgacctaggggaaaaaaaggagaatttaacctgatgacactggtggactatgctatgctcagttccttggaacatctctagtagttttgtaaaaaaatctctctaaagacagatgtaaggagttgctacataataatagggagtaaaaatatctgtactctcatgtagtctttatttttagttaccaaatattataaattatgcctgctgaaactcctctccctcacgttatagaaagttttatgtttttccaatcaaac

SEQ ID NO: 22442 - DNA, 637 bp, Zea Mays
tggtagtaatttagtttaatatcgtcaaccaccccattgaacattgagcaatactgcgagagtgcatgacgtgcaacatcctgcgtggctgcctcaacattgtccctctcagagatggcatagtgctctgagtaggcctctacacctcggaggtcatcctctggatggcgcaccaggtaggtagcctcccaacagtctgcgtacgtcctgcgactgtgctggtagacttcacaacagtactcgatcgaccaggtgtgtcggtcaaaagcccgacataacagggtatcgagagcatagtggaagtgacaaccgcaagcggcgtcacgagtgatgggtcgggcgacctatccttccggctcctgctcctccgaaagctccatgttgtggtctaagctgccactgtcgtcatctccgtcgggggctcctccagcagatggggtgccctgtggtggtgcagaggcgcctccagctagggcataaaggaaaggcgcctcatagactccaccttctgctgaggtggcgaggaagagtcctgctgctccctctcctgacatcgacattcatgttcctcgtgcaaggtgagagggcaggaaaggatcatcgacttatgtgtggtgtgcctaatgcgagccatcta

SEQ ID NO: 22443 - DNA, 166 bp, Zea Mays
tgccctccagccacaggaactcctagaatactcctcatcacctacaacaacatgggttcgaaaaccctgagtacgaagtgtactttcgcaagtcttacccgactaaagaaaaacgactctcaaggatatgctggttaaataggaatcaaggaaaaggctttagcaa

SEQ ID NO: 22444 - DNA, 1356 bp, Zea Mays
acctaaggaagtgcagcacacagatcaaggtatcgaacacccaaagatggcaatggcaaccttcacatcatccccagttctctgcagcttcaggaccatcgaacagaagaaggcccctctgctgaacaacagcacaaaacggccgcttcacttgggcttcccaaggagcgtgccgacgtcgccgagcttgagagagaggctagacctgcgcgtcgccgctgtctacaaggtgaagctcctcggccccgaagggcaggagagcgtgctcgacgtgccagaggacagctacatcctggacgctgccgaggaggccggtctcgacctgccctactcctgccgcgccggcgcgtgctccacgtgcgccggcaagctcctggagggctccgtcgaccaggcagaccagtcgttcctcgacgaggcgcaggtcggtgccgggtacgcgctcacctgcgtcgcgtacccgacgtccgactgcgtcatccagacgcacagggaggaagacttgtactagaccgggctggtccccgtgcatggatcaaccttgcacttccattcagattcgatctttgagttattgacactgtccttggcacacgctgttgcggttgcagcttgctagaactaatcgtcgtccagataatttggcatgatgaccaagtgcaggttcttgtgatatgattcttccccgtgctttgttacatctggtctctggatatcaaccaagccccgtcttgaaatcaacctgtcagtttcaggctttcagcttctccctggaaagagacagtcaaacagatgggagctttcagggatgttgctgcggccaatgcagacggcaagcgtttacgtcgccgaaaggccggctgggccggcgggcgcaatgatttggatgctactagacaggaacgtgtcacatgatgaaaactgaaaatacgaaaaaggtcctgcgatcctgataaaacaaggagatgccgcgcagtttgctgttggagacatgaggactcgcaccaagcgatgaaacagaagttgatggagtggatgtatggaatgggaggcgatttgtagcgtagatgcgtaattgtgccaaatgcaagaaagagatatgttattattcaggtgttgtccacttgtacctttgccagattgcctagtcccatgctcgtttggacattggagtactagaacatgaggcgttcatacggacgccctatcaagagaacacaagtgatagtatctccatttgtcgggtaccatataattaggggtaattgtcgggtaccataattagggatactcagatcacaatctaaagtgtctagatgcttgagtaagagaatgtcataagcaaatacgcttcca

SEQ ID NO: 22445 - DNA, 650 bp, Zea Mays
cagagggcacaactacaaatggggattatctccttccattcaaaacaggtgcttttcttgcaaaggcaccagttcaaccagtcattttgagatatccttacaaaagatttaatgcagcatgggattccatgtcaggggcacgtcatgtatttctgctgctctgtcaatttgtaaattacctagaggtggtccgcttaccagtttactatccttctgagcaagaaaaggatgatcctaagctctatgcaaacaatgtacggaaactgatggcagtggagggaaacttgattctttcagaccttgggctggcggagaagcgagtgtaccatgccgcactgaatggattgttgtgtcaaagctattttggataaaatttggaaatgaaagcagttagtttttcctagttgtccctgtaccattgcagtaggagaaaaaggaatcaaattttgttgtcactaatctttctcattaaagaccatctgtagataaccacaccgttttgctgcaaagatcaaatagacgttaatcaagctaggcatagcgtaaaaaatgctgttttcttactctcgtcaccgcagttcatgtgctgtgttttgagttgacatgatgtacttgatgtgtccgttgactaacatatggttgtctaacat

SEQ ID NO: 22446 - DNA, 1551 bp, Zea Mays
gtcctctctccactccttgcgattgcggcgacgagagacgagagagagggaggtgccgaaaaaaaaaacggacaagagagggcgaagttaacactaacagggagggcagacggagaaccaggagcggcgtcgagctaaaagccccggcggcggtcatggccaccgcagaccagagccgtattttcatgaaggacgtcaaacgcgtcatcatcaaggtgggcactgcagttgtcacgaggcatgatgggcgagtatccacaggcaattttggtgttctttgtgaacaggtgaaagagataaatgctctaggatacgaggtgatcattgtgtcctcaggtgctgttggtgtggggaagcagaggctcaattacaggaagcttgtcaatagcagctttgctgatatgcaaaagccacagacggagctggatggaaaggcttgcgctgccgttggacagagtggcctcatggctctctatgatatgctatttactcaacttgatgtatcctcttcccaacttcttgtgacagacagtgattttgagaatccaaacttcagggagaggcttcgtgaaactgttgagtcactattagatcttaaagttgtaccaatatttaatgaaaatgatgccatcagcaccagaaaggctccgtatgaggattcatcgggtatattttgggataatgacagtttagccggtcttttggctatagaacttaaagcagatcttcttgttctactcagtgacgtggatggcctctacagcggtccacctagtgaacctcaatcaaagatgatacatacatacatcaaagataaatatcataacgaaattacttttggggataagtcacgtgtaggtagaggaggaatgacagctaaagtgaaggctgctctcgtggcttcaaacagtggcacacctgttgttataacaagtggatctgcatctgggagcatcattagagttctccaaggagagaagattggtactctctttcataaggacgcgagtttgtgggaaccatccagtgatgttagtgcatgtgagatggctgttactgcaagagaatgttcaaggcgtctgcagaatttgtcgtcggatgagcgcaataaaatattgctagacgtggcggatgctttggagaaaaatgagaatctaattaggaccgagaatgaagccgatgtagctgcagcgcaagatgctggatatgagaaatttttggttgatagattgaccctaaagccaggaaagatatcagccctcgcgaaatccattcgcactcttgcacgtatggaagacccaatcaaccaaatactcaaaagaacagagattgctgaaaatttaattctcgagaaaacatcatgtcctttgggtgtcctattggttatttttgagtccaggcctgatgccttggtccagattgcatctttagcgattcgaagtggcaatggtcttctcttgaaaggtggaaaagaagccatgagatcaaacaaagtattgcataagcaacgtgggtgaaaaacttattggccttgttacaagtagagacgaa

SEQ ID NO: 22447 - DNA, 1364 bp, Zea Mays
tttttcagaacatgttagaagccagggaagatcggtgaaatgcttgcattgatataataagtccaggctgaagttattgagctgacagcactaagatataatagtttgagaatctcaatgggttgcttttctacattttgcaagaaaagaagggcaacgcggcaaccaagttcccaccataatgaagacgtacctggctgttcaaatataacaaaatacacttacaaggagctagtaagggcgacaaataactttaacccattgaacaaaattggtgagggtggttttggttccgtttacaagggacagctcaggaatggtacagttattgctgtcaaggtcctttcgtcggagtcaagacaaggagctccagccacagcaatatccagtttgattggaaaacacgagtaaatatttgccttggcattgcacggggattagcatacctccatcatggtgtcagtccccacattgttcatcgagacattaaagcaagcaatatacttcttgatagggaccttaccccaaaaatctctgattttggtctagcaaagcttcttccaccaaacgcaacacatgttagcacaagagttgcaggaacactgggttatttggctcctgagtatgctattcgaggacaggtgacacgcaaatcagatgtgtacagctttggcgtgctgcttctggaaattgtttgcgggagatcaaacagcgatacaagattagcatacggagatcagatactcctcgaaaagacatggatgcactacgagcaggggagtctggagaggatcatagacaggtccttgggcggcggcgacctggacgtggcgcaggcctgcaggttcctgaaggtcgggctgctgtgcacgcaggacgtgacgaggcaccggcccgacatgccgagggtcgtcgccatgctgacgggcgagtgggacgtcgagccggagacggtcagcaagcccgccataatcagcgacttcatggacctcaaggtcaggagcacgaggaaagcgagcgacaacgtggccacgccgcctacgtcctcctcgacgttcctgtcctccctcatggcgcactcctcgcccttgctgtcgaacgagtccacgcaggcctccatggcgttcaccggggtgtcggatcgcgagtgatccttgatcccttcgtcaaagactggtcaggctggctggtagtgacctgagttggttggaggtgtggaagacatgtgtagtgtaggcaggcaggcacagatggatttaattgcttcgtttgtaggcgcaacatcattgttgagtcaaaaggttcaagtacatgtgaggaaactgctttgtgtgcaattttggattgaagacgcgattcttttt

SEQ ID NO: 22448 - DNA, 1559 bp, Zea Mays
acaggaaggcggcaggcggggtgcttcatttggcccattgaatctggtgtacaggtatcattgcagtagcaatatggaaaagaaaacaggtcactggatgtccgtcataaaggtccaaatctgacgtactttgggcacaacaatctgtctcagaatttgcttttggagggcctagggagaacccaatgcaatgctttatcatgcggaataagaactctacattctacctctaccttggcttcacaagttcacctgtgtataaagggaagtttctcatggctgctagaagattaaggcgtggtccccatactgagtacattatatctcttgatgcagaggacttatcacaagggagcaattcatacatgggaaaactgagatctgatttctgggggacaaacttcaaaatatatgatagcaagccaccatatgacggcgctaaagcatcaagtagtcgatctagtcgtcgtttcggaagcagaaggattagtccccaagtatcgtctggtaactatgaagttggacaggtttcatacaaatacaacttgctcaaatccagaggccccaggagaatgaattgcactcttgaatgcccttcagcgcaagagacctgggaaaactcactcaagacaaagttcaggaggcccttgggtcccacaactttacgaaacaaagcgccccgctggcatgagcagctgcagtgctggtgcttaaacttccatgggcgggtaacagttgcatcggtcaagaatttccagcttgtgactgctgccggccccagtgaccctactagcaacgtggacgaggaaacggttctgctgcagtttggtaaggtcgacgatgatattttcacaatggattaccggcaaccgctctctgcgttccaagcttttgccatcagccttagcagctttgggaacaagctagcctgtgaatagcgatacggttcgatgctcgtcgcgtggctatatggtttgcggtggtgggtgcttgctcgccgttgttacaatgtgatctgttctttttttttagttgagtatcgacgtactatttgtaccatgctgttgtacaagagatgcactatactgcattactgctgtcttgtcaaaaggacttgttcaagaaggaaatactgtgtcataaactttttgctctgattccatgcaaaaggcattccggtgctcatatatgctcatggtgaagtgatattttccccttcttgataaatattatttttgttttgtttgggtaactactgctactagtgctgggatgctgagcgcatcttagggaaatcttcttatgatttcactagtatagtgaccgtgcgttgctacggcatgtcaattatttgataaaatgttagttcacaacgattacaatgttttgtgacaatatgttaggatgaaaacagacaatttacattgacaatactttcttaaacatggagttggataggtagagggagactggtattgcagccaagaagcaagaaaataagaaaagagaggcaaaagtagccacctactgtttgtcccccaacaaatacaagcgtgaag

SEQ ID NO: 22449 - DNA, 1884 bp, Zea Mays
tagcaatttatgaactaaagtgaaataaaatggagggactagtaaccaaacactccctaagttcactattgcctctaaaggcatgtctggtttgaatcatgccctatgtaacgaagaaaggatattaggtggattgggtgcaagcacgactggtgacgaaatgagcgatttaccttactgccttagaatgcacagatcagagatcagtcgtgctcagtatgttgatgttagagaactcaggatttatgtagggacatggaatgttggaggcagatttccacccagtgacttggacattgaagaatggctggctacggaggagccagctgaaatttatgttatcggctttcaagagattgttccactcaatgctgggaatatatttggtgctgaagacaatcgtccagttgcagtatgggagcacatcatccgtgaaactttgaataagaattgttcagataaatcagggtttaagtgccatagtgatcctctttcaccatcaaggtttaatccatcagatgttgttctttccatggaacatggattgcttagtgagtctgacaaggatagtgatggggagcttcatccattgattgaacgagaccataattgtggacttcaagctaaaacaaatgaaaatcttgaagctttcccagaagataatttagcctgtgatgccatcattgataatagaacaaaaaggaaaaggccagagtttgtacgtataataagcaagcaaatggtcgggatatttctttcgatttgggttcggagaagcctgcggaagcacattaagaatttgagagtatcaacagttggtgtaggcgcaataggttatattggtaacaagggatcaatatcggtcagcatgtctgtacatgagactcctttctgctttgtttgttgccacctgactgctggtgaaaaagatggagatgacctaaaaaggaattcaaatgccgaagaaatacttcgaagaacagtgtttaacccagagaatgttgtaggcatgcctatgagaatatatgaccataagcggattatatggttaggagacctcaactatcggatcaacttatcctatgaaagggcacatgaactaatctccaaacaggactgggatggattgttcgagagggatcagctgaaaagagaattgaggaaaggatgcacatttgacggttggttcgaaggagttatcagctttgccccaacatacaaatatgagtttgactcagaaaactatgtaagcgatgagagtgaatctgggagaagaactcctgcatggtgtgaccgcattctctcatacgggaagggaatcaggctactttcgtacaagaggggggagcttacactttctgatcaccgccctgtggctgcagtctacgtggcagagattgaagttttccactgatgcagagagcaggaccatctatcatcagagaaggatggatggactggttgaacaaagaggtcgccgaaccacgagatatgcaatttcctagcacaagttccaagtgaggtggtgccatgccaatgacagtttttagaattcagtcagacattgttgatttgcattattgtatcatccttcacaagcagcatatttgccatggattattttttctgcacgcttgtttgatgaagagcatctcaagcactatgctccatgacatagtatcctttgaaaaaaatgtcaaatttgttcatataatgttcttttcttgttttgaactaggaagggatggttcaacatgcttcgtgtgtcgtgcttgccaaataaccatgtttgcacgataatatgattgtctgctgctcaaaccaagacaccatccaaaattgtcatttctggcctcctgtcaaaagcgccattaccctacacgc

SEQ ID NO: 22450 - DNA, 4071 bp, Zea Mays
ttcgctttccctgctcccctcttctcctctctcccctccgcggccaagccagagccatgcctcgttctactacttcccccaccacgtcacaacagggcatccacaccaccccccaccgcctccctccacctccgcctccttccccaccccccttccgcttccgcccacaaccctaaccttaatcccgtcgccgccgtagccgcggaccgactgggccgactcccgcaccgcgccttcggcgttatattcggtccctgcgttctctctctccggttccccacctcccgcggcgagccggggcgctagggttttctacatggatccgcgccgcgcacccccgcggggcggcggcgggctctcttactccacgctgttcaacctcgagcctttgcagaacttaagggttcctgtaccagaaaatctcgcccgctacgggaacagcagctcaaatgggagtccaagcagtgagggtcaaggatccttgttggatcagtacaatggtgtacatgatgcttcccatggcttgcatcggaagcgaaaaaagcaccctgatggtgccggcgatgatgatcatgcagatgcctatagtaacaaaatgatggaggatcactaccgtgcgatgctcagtgaacatgtccagaagtaccgaagccatggtggattatctgaacccctgccacaatttgaatctctcaaggaaagggtaaaggtgcagaaattttctcttcaagttaccgaggacccctttgcaattccggaaggagcagctgggaggatacgaaggtctattatatcagaaactggcaatttgcaggtccattacgtcaaagtcttggaaaaaggagatacatatgagattattgagcgcagcttaccaaagaagcaaatagtaaagaaggaaccttttgtaatcgtgaaagaagagtctgaaaagacttacaaactctggcagtatcttgctactaaaagcattccaaagcatcacaggaattttacttctttgatgaagaaacgacaagtagatgcgaagcgcttctctgatagttgtcaacgagaggtaaaattcaaagtaaggaggtcactgaaactgatgagatgtgctgcaatacgtacaaggcagttggctagggatatgctgatattttggaaacgagtagacaaagagcagtatgagttgagaaaaaaagaggaaagagaagctgctgaagctttaaaacgtgaggaggagcttcgtgaagccaaaagacaacaacagaggctaaactttctgctgtcacaaacggagctttatagtcatttcatgcagaacaaggctggtggctcagcgccacctgatgaggaagatgtccctgatgaagatgaggaagaagatcctgaagaagctcaattgaaaagagaggccttgagggcagctcagcatgccgtttctcaacaaaagatgaggactaatgcatttgatagtgaaactgtgaggcttcgtcaaacttctgagtctgttcttccaactgatgattcatctagcatggatcctagtaagattgatctattacacccttcaacaatgcctgagaagtcatctgtgcaaacaccagagttgtttaagggtgtattaaaagaatatcagttaaaaggcttacaatggctggttaattgttatgaacaggggttgaatggcattcttgctgatgagatgggtcttggcaaaactgttcaggctatggcattcctgtctcatttggctgaggacaaaaacatatggggcccctttctagtggtggctcctgcatctgttgtgaataactgggctgaggagttgattagattctgccctgacctaaagatacttccttactggggcccagagaggatgattcttcgaaagaacatcaaccccaagcgtttgtatcgcagagatgctagcttccacattcttattacaaactatcagatacttgtgaatgaagagaagcttttgagacgtgttaagtggcaatacatggtactggatgaggcccaggctatcaaaagttcaagcagccagcgctggaagacattactgagctttagctgtagaaatcgtctacttcttactgggacaccaatacagaacaatatggctgagttatgggcacttcttcatttcatcatgcccactctatttgacagccatgaacagttcaacgagtggttctcaaagggtattgagggtcatgctgagcatggaggagctttgaatgaacatcagcttagtagattgcatgctattttgaagcccttcatgctccgccgggttaagattgatgtcattgctgaaatgaccaaaaagaaagaagaaattgttccctgcaaattgagttctcgtcaacaaattttctatcaagctataaaaaataagatctcgcttaacgagttgcttgatggaagtcgtggcaatctaaatgacaagaagttacttagcctgatgaatattgtcatgcagctacggaaggtctgcaatcacccggagctgtttgagcgcaatgagggaagctcttacttttactttgctgatatcccaaactcacttctttctcccccgtttggggcattacaagatgtacattatgcaggcaagagaaatcctataatctttgagatcccaaagttagtttatgatggaatcatctgcaacacagaaaattctggaagcatctgtggatttcagaatggatatttgaacaggttgtttaatatatttttgccaagcaatatccatcgctcagccattccagaagttaattcatcaaatgagtctgttttatcatctggtgcatttggctttacacgtttgtcaaacctgtgcccagttgaagctttcttcctggccacttcatcattctttgagggactagcattttcagtaatgcgatggaataggaactacactgatgaaattatggatgcattccttgattcagaagatactgacatccagttcagtcagaatgattccacaagagttcgtgcagttgcccggttgttgctttcttctacaaaggccaagcccagcttacttaggacaaagattggaactggcccaagtgaaggcccatatgaagcactggtgctttctcatcatgacaggcttgcttcgaacataagggttcttcgttcagcatacacttatattccgccagctagagcaccacctataaatgtttcatgtgctgatcgaaattttgcctataagttcactgatgagatgtatgatccttgggtcatgaaactgttcctgggatttgctcgtacttccgagttcaatggtcctagacaaccagttgctcttcatcctttgatacaagaactcaatactgatttgcctatccttgagccgatgctgcagctaccctataggatatttgggtcttctccaccgatgagtaattttgatccagctaaaatgctcactgattctgggaagctccacaccttggatatgctactacggcgccttcgagctgaaggtcaccgtgtgcttctttttgctcagatgactaaaatgctggacattcttgaggattacatgaattttagaaaattcaagtatttcagacttgatgggtcttctgcaatctcagaccgccgtgacatggtccgagctttccagaacaggaatgatgtatttgttttcttgttaagcacaagagctggggggcttggtattaatttgactgctgctgatactgttattttttatgaaattgactggaatccaacacaagaccagcaggcaatggatagaacacacagacttggtcaaacaaaggaggtaactgtgtacaggcttatatgcaaagatactatcgaggagaaaatattgcaaagagcaaagcagaaaaatgcagtgcaagagttggttatgaaggggaaacatgttcaggacgatcatttgttgagacaagaggatgttgtttcattacttattgatgacacacaaattgcacataagttgaaagaaatatccatgcagccttagaggattgcccatgcagagaggattggacttacaatggcaactgggagtctctggat

SEQ ID NO: 22451 - DNA, 1895 bp, Zea Mays
gctcttggtccacggcgacctcctctggccgagcaaaggaagcagacctgttcccacttcctcgcatctaaacccacgtcaccaaccccgaccgaacctcctcctctctctctctctgctccacctccgttcgtccgactccgaccgcagcccaactcctgctgacttcaacatccattcccccgccattcgcgccaggattactccatctctacttctactacttgttgctgatccctcctccccctcccaccaccaccctccgccgccggaccctcatcagccaacaacaataatggcgtcgatccgccggccgcactcgcccgccaagcagcacctgctgcgccaccaccaccccttcgccacgtcctccccgccctcctcgccgctccgccactcctcgacatcctcctccccacgcacccaccaccacctccaccacccgcaccccttcctcttcttcacgcgccgcccgctcccgcgcttcgccgccttcttcctcctcggctccttcctcggcctcctccacttcctctcccacctcccccaccagaccccgcacctccgcccggcgtcctccagccccgccgtcatcccacgccaccagctccccatcgaccgccttaacaaccaccaccaccaccaccacgacgacgacgacgacgaaagcaacagcaagctgctcgtcgtcgtcacgcccacgcgcgcgcgcgccgcgcaggcgtactacctcagccggctgggccacacgctgcgcctcgtccacccgcccctgctctggctcgtcgtcgaggccggcgaccccacgcccgaggccgccgccgcgctgcgggggaccaccgtcatgcaccgctacgtcggctgctgcgacaagctcaacgcatccgcctccgcctccgacgacgcgctccgcttccgcccgcaccagatgaacgccgcgctcgagctcctcgagaaccaccgcatcgacgccattgtctatttcgccgacgaggagggcgtctactccctcgacctcttcaaacgtctgcgccaagtcaggaggttcggcacatggcctgtgccagtgatctccgagaacagaaaggatggtgttggtgtggtgctggaaggccctgtgtgcaaacagaaccaagtcgtgggatggcacacaagcgagcatgccagcaagctccgtagattccatgttgcaatgtcgggtttcgcattcaacagcaccatgctctgggaccccaggctccgctcccatttggcatggaattcaatccggcatccagacacagcgaaacaaggcctccaagcaacaaccacgttcgtggagcagctagtggaggatgagagccagatggaaggcatacccgctgactgctcccaaataatgaactggcatgtgccggctggatctgagaatctcgcctatcccagaggatggcgagttgcggcgaatctggatgtgatcattcctcttaaatagtattcaacagctatgttcatcaaagcaactgactcctttgacaggcatatactatagaaattaagccatgaagttttggcttatatagcgcagaggaatcccaggttgactacattggagaagcagctcttcagaaggggaggaggctttcaggttctgcgcaacctcatgcagaatttctgttgttatagtccaacttttgggaaatattttgtaggatgaaaattatatgaagccagtcatcttgctgcaaagccgtgcattgtatatgttcatgttgtttgtattctttcttcttctttttagttcgcaggccaaaaggcaatatgtaggattttttttttaaaaaaaacttatgtttagctacacattgtttcaggagttttagtaaaagcatgtcaccttatcttcaaaaaaaata

SEQ ID NO: 22452 - DNA, 1234 bp, Zea Mays
gcttttctcctatccgcaagtatctctcgactcttgctgcagttgccctgttcttcagcgttcaagtcaggaattctggtcaatgagtgccaactgtctgcaaaaatgtgcactccttggcagcactctccagcctcctggtagaaggcatgcaggtccatgcgaatgagggtggcgttactcaaactcggggtggcatatattggataatcttgcccgctggatatctgggttcatcattttggggaatggtgttcatacttgcatccacaaatctcctcactacaagaattgcagcgggttgtttcatacttgcactgtttattgtcctttttgttgcagacaattggtttcttcgctggctctgccttggattcattgtattcattgctgttgtttgggtcatacaagaatttacatctttccatattctgaaatatgtgatcttattcataggtgtgatgaacagcttattttcagtttatgatatttatgacgacttgatatcccgaagagttaatacaagtgatgctgagaagtttgctgaaatatgcccttgcccttgcaatggttttgcatggggtgttatatggggattcatctcgtttatcttcctctgcgcttcaatataccttggactggtcatattgtcttgagggttccaacctcgcgcacgccgttttgatctgacaaccaactctggttggctttttccagagttctccttgctctagattttgggttcaaacttacattgttctggcggctgtacagtatacatgtagggtaaacatgtacatccatcgtggagttaattcggcggggattgttcatgtgattcttcgattttagcggttctatagataccattgctcatttatggtctgtagcctcattgctcatttgaccaatttgaaatcgtattcagaaacgccatattcttcgatttacaggtacatgtacaccatattacctttgccccattgctcatttgaccaattgattgaaatcgtattcagaaacgcaacgctgtggcattttatctggcaccgtttttgcaacgggatgattttgctaccgctagcaggagttgagttagtgcccgctgcggtttagtttatcctggtactttgagaggccctctaatccactgcttttgacggatggaactgtctcgtggttaactaactgtagatcttgtcgccatgttggttcgaagcaaaaaaaaaaaaaa

SEQ ID NO: 22453 - DNA, 490 bp, Zea Mays
gggaggtagctcaatggtcttcctgtgtccttccgggcgacgattggttcatggatgtctcccaagaagttgtcagcatgatcagtggaaggggtagagttgctaatggtgacagggaagtaaacagcccaacggcctcagtttcagcgcactccatttcttcgttcaaatcccatggcagctcctagtttgcaagtcggtattctttgtaggcaggtcattgtataataatcattagtatattctttcaacctattcctccactcatttgttttttcttttctttttcagaacttttgtgatagtatagtatagatggataattgtttgacctaggaaaataaatcttttttagtaattttgttttagggtgtgtttggttgaggagtggttccattccattttttggttgttcggttttcaataaaaataatagcggagtggctcttgtatctttatatgaaaatttactataaatagttggaacgct

SEQ ID NO: 22454 - DNA, 1844 bp, Zea Mays
acacgtttctttaccctaaccttttcgctgctccagcgaggcatacagccgccgccgtttcttcattcttccttgcagcgccgacgctccatcttccgctccctcccttgctcgcgctcggcacgtaggcgacggtggcagcgctcagcctcgggctctcagcgacggcgtcagcggcttcccctctcgccagtcgcctcgtcctccgcacaccggccggtggccctgccaaagaggcaacggagagggtttccagaacagagtatacagagggcaaggctgttatgagcaacaaggaggagaaagaatgccaaatgaccaaagaagagaagaggcggaagaagagggagaaacataaggacatgggtcagagcggcgattatgagggtaaggctgttatgagcaacaaggaggagaaagactgccaagtaaccgaagaagagaagaaacggaagaaggggaagaagcataaggacaagggtcagggcagcaattctgatagctcatgtgccaggaaccatagcattgagatggagcaagctgatgtgtcagccaagatggctgaagactcctgcttggagcatgcagaggctgttacgagcaaaagctctgcgaagaaacacaggaagaaaaagaggaaagataaagaggttgaaactattggccagaagcagatactcgatgctgatgaaaatgttgggtcagaagatacgaagaggaacagcagagaaagggaacatgataggaagtcaaagaagcacaaacgaaagcatcaggatgacgagactgcctcaaatggttcttctggtaatcaaattgttttaggggaagataagaggacggaaaaagagtatttagttaccttggatttggaagaggacaataaatctgatatgtcaaagattgggaagaagacagatagcaagaagaagaggagaaaagagagaaatgatggtgttgacctaagacaaaatacactagttggagagggcaagaatggtaagaataacaaagagaaaaaaatgtgtgaggatgagaatggtggcggtgaaagagagaaagaaaacatgggaaagcagaaggataagtgtagacgagtgagcttcactgatcatgtggaggtgtttaatataggtggtagtgatgatgtagagggtgatgggagtggtgaaactgaacttgtgcatggacgacggtttagccctgaggaagatgcaaagctaatggaagcgatattgaaatatgcagagttgaagcaattaggagagaaagggttacagatgattggggaaagtaataagcatccagagaccaggggttgttgggctgaaataggaaaagcattacctcatagacccaagaaagccaaatacgcgcgtggaaaggttttacttcaaaggagtgctgaacgtaaatggaccgctgaggagtatgagataattcgacggtttgttgaaaagaacggccgaaattggaaggtattagcaaaagaacttggaaagagtgaaatccatgtaaaagatacttggagacgaataaagttcaaaaatttgaaaagagggacttggagtcaggatgagtaccaaaacttgtttgatttggtaaatctggacatgcgtgtgaaagcccatcaaaacatcaatactggtcaccgtcatataagagataacatttcttgggaggctatcagtgaaaaattaaccactcgtagagccgaagaatgctgcacgaaatggtacgggcaattggcatcgccgctggttaaacaaggaatctgggcagatacagatgactacattcagaacgaatagaatgaaatgcaagttcttttagatggagggagg

SEQ ID NO: 22455 - DNA, 1351 bp, Zea Mays
cccaaaacactattttgcactgtagactgaactgttcgcagagtggagtttgaatatgagtatggggatgggtaagctctaagctgctggagatagcctaacaaacaaatgaaatgagatggtacagtaacagtgtagaggtgtgaggtgtctgacaagaatgatctgttttttttacctaagacatgcttgaaaagtccgctgcttttgtaagtatgttcccttaggtttactttatctgctacatgcaaaaacaagggcaggcaccattcgattcatctgcagtggacaatatgaggaggcttctggagcatgctggtgttcctgggcacatatatccactatcattgctgtgctatgaggttatgcctccaccacaacaggttgagaaggagattggtgagcagagggtgatatccttccatggagcaggcttgtcagtaactgaagaaataaactatggagacattactgctcataccaagaatgctgatgagggaagggagctattcacaaataccttgtacaactcagttgttaaccagtacaatgtgctcaaatctgctatctttagagatcgtggagcagctgtatcaaacaatgtcatctcactgtcacaaccatggcgatgaatttgcgcatagcatagtagcatgtaatcccatctatgtagattccatgaggttatgcttatggtaattgattcatttatatagtaagtaattttgctactatatgttaatctgtttatgttacatttgttcattgacactaactatttagatgggtgtgctaacagacgaattttgctactgcattcaggtccagtttcgttactgaagttaccttttcaaaagagcaggtgaactatcattgtgcaattttgctgggagaaactcttgaacttaaatctttttgatatcactagacttcatcaatcatggtggagcctgttattgtcatgcagatgctcgctaagaagtctgcaactgttggttggtcaagggtgattggcgattttgcacatacggatccgcagttactgctgcctcaggttgctcagcaatgtgctgctggttgggcaccgaggaatccatcaggttgcatcctttttgcccggacgtcgatttgtgcagttgaagtggtaaacgtttttttatcttgtttcgtcatcatgtatatacgtaggcttgagtcattgttggctccacattttttggagatataaatgcggtaggagttatgagatgtccacagtcggccctcccttgttgaattcctttggatgtatcctctctctttcgtacatgcactcactgaaagtcaatgcaaatatctcgtgtttctagta

SEQ ID NO: 22456 - DNA, 163 bp, Zea Mays
tatatccccggagagtggagacttgatctccgacctacaacctaagtcaggatgtaaacattatgagtaaaaatgatgttgtattgatgagatggtgaaattagactaggtgcaaacagagtctattaatattaatctggcgttaaaatattgaaagtaagga

SEQ ID NO: 22457 - DNA, 772 bp, Zea Mays
ctctcctctggctgccgctctccacagtcctcgggctccaagccttgcgtaaaccccgacccccacgcgcatagatgaagactaggtcgcagacgtcgccgaagcctctcaagacggtggcgatggctcccaggccgagcagcaccaagcggaagccgaggcccaagccggcggggaagggcgacccccgcgcacccaagaagccacccaccgccttcttctacttcatggaggattttcgcaagatctataagcaagaaaaaccaagtgtaaaatcaatgcaggaaatagggaaggcatgtggcgaaaaatggaatacaatgacatttgagcttcttcggcccgtgcacagctggacctcctggagcaactgacgtccgccacacctgatgacactgcggctggcctggagaacggcatgcctccaccagaaccgcgtcggcgtgctaccatccgcgagcagctgtcagcgctagccaacggtaaggtcgacgagttcaccctcccactgggcaagaggctgaaggaaggtctgaagaggctcaactccctcaccgtgtcgcagaggaggaacatcaagaggcaggccctgctcacccaggtcagcgggcggaacgactcggtgttcttcgcgaccgttggcgcgttcgtgctcgtcccgcctctcgccattctagctatcggtgtcctcactgggtatatccagctcttcccatgaccaccaagatgctgcatgctatttaactagctatctccacactgccatatatat

SEQ ID NO: 22458 - DNA, 2911 bp, Zea Mays
cacaactggtgcttcgttagagtccttagccagaggagctgtatgtttttcccgtaaattcactcttcatgaaatacaggaccgctggaattcattgctatatgacccagatatctcaacacaagcagcttctcggatggctgagtatgagaatgaactttctacttccgatccagccaaggcacataaacttttcaactcaaaagcaaaggatttttcatttcagaaacggaaaatagacagtgtaaagaatctatattatgcgatgagaaaaagagtacgcaatgatccacgcaacagtggcgaccttggatttcttgtcccctgttcgtgtacggcaattggtagtgagtgtatctgtggaggcctacctaacaatattgaaccagagctgaattcagtaagccgctatgggcaagtaggttcaaggtacaccattggacattcatattctgaaatgaacgaacatgcttttcatacgaagcatactgaaagcatgacaagagatggggatggcaccagtaatgttgtgtatggctactcagatgtaggccaactatatgaacatcatgcgtacacagcgaataatcatgggaatagagaagggaacaatctttctctaaagagtatcacaaattttcaggattctatgcagtttcagcagttggacaacaatcaatgtggtaatggggtggtagactcaaaggctttggtgatccctaaccatttcagtggaagtgtgcaggaacctatgcctctccaaatgattggtcaacctgagggttctgaagcaccaggtggtgcaatcttgagtcttcagcgaagcgacaggctcgctcttgctgatgataaggatgtaaaatcagaagacagggaccctctcacatttgaagcgcatttagatggtgggatatctggtttagatcacgctactgagtttatggacttcccatatttcactaatagtgaagaccttgatatcctgaatagtgaaaatcttttgaattctccaagtgagggaatccaggaggatttagacgatactgcattagttgttcatggggttagatcaaccatgcaaaatctggttcatgctgatgaagccaatatgtcctgtgatcaaatagatcttggtgatgtgaaaaataatgtagatgcttctggtataatcttatttcctacttcattagtagtgccctgtcctggcctgtatgttgagtgcaaattgaacacagaagatactgaaattccttgcaacgacgatgtttctacaccaacagagtatcctcttgaatgctgtacttctacctttgggcagaaatctgagaatactatctattccgtctcccctgcaatcagccctccatcaattgctgaacagcccaacccatccacttcagaacaaaaagaagattcagtggctcatgacgaaggtggtgtcctaggagctaaaccatcagaaggtgctttaacagttggaggccttttgcctggtaacattgacacaaatgatgcaaacacatgcatgctagctttgccttcttttagcactgctggatttggtgaaggatcaccttgtagtttaggaccacacgagagctttgataactctcatggtttgactttgcaaaattcagttcaagctcctgatcagatgcaacacaactcacttgatggtaaaccagaattaggtgacaaggctgctctacagaactgtatgccatcaaatgcactgcccgatttggatattcagaacactattgcaaatgcgccaacaccagctcaagcagaagaatgccctgactatgaaaaagatgttccaaattactatgatctagaagctttgattcttgaccaggatcttatcccgtgggaccaagactccgattttatgcatcctgaagttaccggatttcctcacccggaaagcaggaaggcattgattagattggagcaaggtgctcggtcttgtatgaacagagctatcatgtcgcatggtgcctttgcagttatctatggattgcacttgagatgctacataaaggatcctgaggttactcttggaagagagacagaagacattaaagttgacattgatttaggaaaagaagggagggcaaataagatatctcgccgacaggcggttatcaagatggatgaatctgggtattttcatattaagaacactggaaaatgtccaatctttgttaatagcaaggaaataccaagctgcaaacgcatcaacctaagctcagactcattaatcgagataaaggacatgaggtttattttccatgtaaaccaagaggctgtgaggcagtacattgatcgtgacctgaagccagaacgctaatttcccctggctttccagtcagcagcagcctgtgagtgactgcctcattaacagcaatagaagtagcatagcagtaaatttgagtaagcattgctcgtttaggatgttccttcatatgatgttaacaagttaggttcacttggctccggtctgtaaatggttgtagtttgttgcgttttctgtctgtttggcgggcataaatcatgcatataaccagcgcatttgcttccagtttgtacctacactcccaggaatgatttcatttgtaatactggcaccctagattgtggtgactgccgccaagagcaagaggcaaccaatgcaataaagtgcggaaaagaatcaatagaagggtagattctagggtagaacaggaggagggtgcacttgtgcaagaaaccattcggttcttgcgacgctataagcataaactttattggtttttatttatataccctgatgatcttgaagcacgaactctgaatcagctctcggggcttgacggtggtggcctggtgggttttacacatttgcagatgttggaaaagcaatgcgctg

SEQ ID NO: 22459 - DNA, 173 bp, Zea Mays
tagcagtgaggtcacgagtcacctgaagaccaatttggtgaattacctggaatcgcaagtataaggcaagttatgcccttgatcactcttctttacctaataatgttctctattcatcactgtgacatgctaaggataaattgatgggacctaataggtttccctagttttgt

SEQ ID NO: 22460 - DNA, 3258 bp, Zea Mays
cctcccgtaagctccacgaccggagagagagagagcgcgcgctatccaagccaagaaactccccccgtagtccgcggcccgggctcacgaccgatccggtccgggcccgatggagctcctgagcggcggcgcgctggcgtggcagcagtaccgcgcgctgctccgcaagaacgccacgctcacctggcgcaaccgccgctcggcggcgctgcagctcttctcctcgctcgtattcatcttcctcatcttctgcatcgaccgcgccgtccgctccaggttctccagtaccaccgcctaccgcaacgtgcccgacccggaggcgctcgtcgcgccgccgatcccgccctgcgaggacaagttcttcatcaagtccccatgctacgacttcctctggagcgacggcgggagcgcccgcatcaggggcctcgtcgacgccatccggaggaacaaccccggccgacccatagcacccgaaaagtgattctttcaggttttaggttttaggactccagatgatgttgatgcttggttgtttcaaaacccaatgcgttgccctggggctttacattttcaagatataaatgccactcagataaagtatggtattcagacaaactctactccggtagcacggagaggaacatatgaagaccctaccttcaagttccagataccactccaagttgcagctgagagggaaatggcaaggcttctgattggagacccaaattttagctggactgttggatttaaagaatttgctcacccagccacggagaccttctctaccattgctcaagcagggccaactttttttcttgccattgctatgttcggatttgttttccaaatcagtgcattggtggcagagaaagaactaaagcttcgtcaggctatgtctaccatggggctctatgaatcggcttactggttatcgtggtttacctgggaggcctttcttacaacactttcagcactttttactgtgctctttgggatgatgttccagttcgatttcttccttcataataattttggaatcctattcctcctgttcttcctattccaactgaacatgcttagttttgctttcatgatatccacgttcgtagcgaaggcagcatcagctactactgttggatttgcaatattcattattgggttcttgactcagcttgttaccacctttgggttcccttattcgtctgactacaaaaagttgtaccggacattgtggtctttatttcctcctgatttatttgccaaagccctcaacattctaggcaaggcaacagccactcctgaggataaaggttttagctggaatcagcgtggggagtgcccatcttttgagactgactgtgtcattactattgatgatatatataagtggctcatatccacatttttcttgtggtttgtccttgcgatatactttgacaacatacttccaaatgtaaacggcgttcggaagtcagttttctactttcttatgccttcatactggacgggtaaaggaggcaagatggaagagggaggcctctttagcttttttggttcaagccgtcctgcagatgatgctacccctactgacgaggatgtccttgcggagcaaaacctagtaaaggaacaagctgcaaacaatgcggtagatcctaatgttgcagttcaaatacatggtctacgtaagacatatccaggaactttcagcattggatgttgttgcaaatgctctaaatctaagccgtttcattcggttaaaggcttatgggtgaaccttgagaaggaccagctattttgtcttcttggtcccaatggagctggaaaaacaactacaatcagttgtctgactggaatcacaccaattacaggaggtgatgcattcatttatggtcactctgttcgaagcactgtgggaatgtcaaacatccgtaggatgatcggagtctgcccacagtttgatatcctgtgggatgcattaacagctaaagagcacatggaattgtttgccagcatcaagggattgcatccagcagcaatcacatcagtagcagaagagtcattagccaaagtaaagctcagccaagtaactaatgctcgagcaggcagctacagcggaggaatgaagcgccggctaagtgttgcgatcgcactgattggtgacccaaaattggtttttctcgatgaacctactactggcatggatccaataacaaggaggcatgtctgggacatcatagaggaggccaagaaaggaagagctattgtcttgaccacccattccatggaggaggctgatattcttggtgaccggatagctataatggcaaaggggaaactgcggtgcatcgggacatcaataaggctgaagtcgaaatttggaacaggatacattgctaatgttaatttctctggaaatggccacatgcagagccccaacatcaacagcaacactgaggctccggttaatccgaacatagaagctgtcaaatggttcttcaaggaacggcttgatgttaatccaaaagaggagagcaggacattcttgacatttgtcatccctcatcacaaagaaccacttctgacgagattctttggagagttgcaagacagggaaggggagtttggaatatcagacattcaactcggtctgacaacacttgaagaggtgttcctgaacattgcaaagcaggcagagctggagacctctactgctgaaggtaccctggtgactctcaacctgtcatcaggaacaacaattcagattcccaagggggctcgtttcgttggtattcctggaactgagacagaggagcatccaagaggcatcatggttgaggtgtactgggatcaggatgaaaatggatcgctctgcatttctgggcactctgacgagatgcccgtgccagttcatgctgagctgaggaggcctccgtcactttctcgtagggcctcaatggaccgtggacgtccagttgggtatatgattgacctgaaccaggtcccatgaaaaaaaggatgagtccaggtgcaacgtttagattggttttgatgcagattatctggtacatatagtatataggaatcttgtattcgtgtctttgtattagaagtcgtaaccttgtattgcagtagtaattggtaaagacatgctttgtaaaatatcctatagtgtaacacagtattttctgttgtatggcaaacaaaggctcgaaatatgacgcaatagaattacatggtaactacaccctgcgtctc

SEQ ID NO: 22461 - DNA, 2941 bp, Zea Mays
gggcgccgcgaagctattagccccgtgggcgcggcggcggcggctccggctgccacaccaacagacaggcaagggctaggcaaggcgcaagaagaggaggggaagtcgaaaataatttagcagcggaagcggaagcagcagcacgaggttctggctaaattattttaatgtctttattatcagagattccagtaatgtgccttgcctcttttatgtgattgtacaaatcaatgaacggaactcatccctggacctccatgtccgggggtgcatgttctaaccttggatatgccagagacatgaatggtaatgttccaattagcactacaaattcctctggaccaagcattggagttagctcgttggtgactgacgccaactcgtcactttccggtggtgcccagttacagccaagtactagcatgaatggtgattcattgatgcgtgttcctgcatcaccaatgtcattttcatccaataacatctctggctcttcagtcattgatggttccatcatgcagcaaagtccaccccaagaacagatgcagaaaaggaggtcttcaagtgtaacatcacaacatgtgatcgatgctggtggtgcattgcatgctcagaagaaatcaaggactgatgttagtcagggtgatatcatgcaacatcagctgattcagcatctgatccatggtcagaattctcttcatttccaggggcaacagaacccacagcttcaagcttttatccagcagcataaactagcacaacttcagcaacggcagcagcagcatttgttgcaaccattttctcagatgcaacaaccccaagttggtattcctcggcagccgcaacttaggccgccattggcacagactggaatgcagttaggtggtcctgttaggactcctatcgagaggggtgtttgttctcgcaggatactgcagtatctatttcacaagcgtcatcgcccagagaataactctataacatactggaggaagattgttgaagagtactttgcacctcgagcaagagaaaggtggtgtgtctcttcttatgaaaacagagggaattcttcagctgctgctccacagaaagctctggatacatggcgatgtggcatttgcaatacacatgctgggaaaggatatgaagctacctatgaaatacttcctaggctctgccaaattagatttgaccatggtgttattgatgaatacttatactttgactcacccaacgaatttgggttgcctaatggacaaatggtgctggagcatgcaaaagttgttcaaaaaagtgtttatgaacatctacatgttatacacgagggacatctgagaatcattttcacaccagaactgaagataatatcgtgggaattttgttcaagacgtcatgaggaatacaccactcgtaagactatagcaccacaggttaataatcttctgcaagttgtccagaaataccaagctgttgtcactgaaagtggatcagccgggatatcaaataatgatgcacaaaccatctgcaacatgtttgtcactgcatcacaacaactggcaaaaaatctagagcatcacaccttaaatgaacatgggctctctaaaagatatgtacgctccctgcagatatcggaggtggtgaatcacatgaaggacttgattgagttcagccacaagaacggccttggtcctaaagagagcctgaacagctattctaaaaccatggcgaagtttcagaatatgcatgattcaagacagctcatggctgctgctaaccttgccaataaccagagcaacaccaaactaatggggaccaaagaagaagcaagtgcttctgcgaccaaccagactcctggtgtcggagccatcggcaataatgctcttcagcatgccacacctctaaacagctaccagaatatgctcagaagctccagtgcaaatccagtcttgctgcagcaggaggcatcgagtgtcttcaaaggtcctacagcaatgcacagtggcatacagctggaagcagccagatccttccgtggacctaaccaagtgcagttccaacaccctgcggcgattcagcagcagcagcctatgccgcagcagagcaatttccagggctttggtggtgttaacccacagtaccagcaccatgtgcttaatcagcttctgcaggaagttaagaacaataaccacgtgaaagcacagcaactgcctccagatgcacctaaagcgagcggcggtcttgcaccaggagttgctattcccaacgttgctgctgctggggagcagggacagcatatcaacagtaatacccgtgaccataacggcgcggtgaagggtgctgctccagctggtactggcccaagcaatgtgatcaacaacacagccagcatgccccccggcagaaacaacagcttcaagtcggtgagcagcagtccagctgctgctaccggtggcattgcggtgaactcgaaggtcgacgactccttccatcaactggaggacctcgacctcgacggcttgatcacaaacgaactgatggagagcgggttgttcggcgccggacaagggtggtgagcatgtcccaccacgcctcacactactatcgagttccttcaccgaaagcgccaagcaacaatataagctttgccacccttctctttctggagtttttgtgttgacagtttcagatgatcgtgccatatacaattatgtaaggtagcgagttggatttggcttgggagtcgggaacggcgcaatctatagagctgttagcgtgtgcgtatgacatgttgctgtggttatcattttcatgctatggaggagtgtcgattatagtctcctgttgtctggcacggcgtgagtgtgtgtttcccatggttctatgaaatcaaattatagaagaaacaagatctaatgtttaggaatcgattctctatggttca

SEQ ID NO: 22462 - DNA, 265 bp, Zea Mays
ctagagttgattggtgggatgctgttggttgtacacagagtgctgccgaagatggtatagtttcacttaacagtgtgatagcttttctggatgcggacttccattctcttccgactatgcaacagaggcagcagcactgtcctcgtgcgccttgcgctggcctgcaccttgtgctggctgctgggcgcctacacgctgctagctgctgcaggtgtgtcggccatgcacgctggtccgtggccgtgtcctgcgtggcggcgtgggt

SEQ ID NO: 22463 - DNA, 5851 bp, Zea Mays
aatcgccttcaatttcctactactagagagagacggcctcccttcctctcgcttcgcttacacttctcccctccccccaacccaaacccaacacaattcccccgtgttgcctacacgcactggccacgaccaaaccctaggcgccgccgcctccggggccctcagggctgtcatacggggaaggaggaggatatcggtgaggagagaaggggatttatgtcccagcgaggtgacaggggcgaggggcacgccaggagacccggccggtccagcagcttcggcggccaccgcggaggcggagtcggcggcgcgggcaagggcggcgcgggatcctcaggccagcctcctctttctaccaaccgcagctttaggaagcccggcaatggccacggcgggcagcagagggtggtgaaccagcccgacacaaccggtttccaacctgcccccgcgcctgccccccaccaaactcctgcgcgaccgccacctgcacctcagaatgcggctgtgcatgttcccatatccgcaccatggccgcaacctcaaggtccacaagtgtcatcttcatcagctgccagcgacaggccggctaatccgccattacctaaagctactcatgctgctccaagggctccaccaaaaagctctaacccaccccttcctcagggaggatcgaaaggggaaccaccaaaggggtttaactttcagtttggtagtataaatatgaatgggctgccgcaatttcctgccaggacaagctcagctcctccaaacttggatgaacaaaaacgtaatcaggtgcttgtggaggaacttaaggttacacctacccctgtgcaaccaactccaaaacagcagctgttgcagcagcatccgcatccgctgcagaagcaacagcatcagctgccgcagctgtcgcatcagccacagcagccacagcagcagtcaacaagaaaggaaactgttggttccagccaacctaactccatcaatccccatactacatcacaactgaaaagagatgtgcacccatctccgtcggtccccaatgttacatctgttagacctaccgttcaacaaatgcctggtgttcagatgccgatccccttccaccaccagccggcacaagtttccttgcagtttggtggccatggtgcacagctgcagccacaagttgtgcccagctcatttcaaatgtcaatgggattgacaggcagtagtacaccgcaagtcccacagcagctgtatgccccgactctgcagcatcatcaattgcaacagcaagcaatgatgcatcctggccagggtatgggttatgttccttcagttgctcaccaattcccacagttgggcagcattcctatgaacattgcatcgcaatatcctcagcaacagccaaacaaacctgctgctgcacgtaaggctattgtaaaaattactcatccagacacacatgaagagttgaagcttgataagaggatggactcttctgggcagagagctgcaccgagtattgcacaacaatctcagcctggtgttaattatgctcctcatttgggcttctttcatcagccaccgaattcctacaaccagtcaggaatgtattactctactacagctagtgtgaaccaggttgctactggatcatcgggtcctagatataattatcctgtcactcagtctgcgcaagcgatgacatatatcagtccatctgcagcgcctccggtatctggtcagtcacaatatacagttaagccgcaccctatggggttgctgtctgaaaaatcaggtactcatgtcacaataagtgctccaccagcaaaatctgatccacctaagttacatgctgctggggatgctgcgtcaagtctgaaaaaggataatgaagttgtttctgggatcactgttttaaataaaccaacccttgagagggagagtaacgatcctttagtcacagtgaagcattccactgtgataagcccgtccttgccaattcatggtgaaaaaccacaaactttggtgacatcgtcgcctgttgctaattcagtctcacctgtgactggagctgatgggaaaagcaaagaacccattcaaaggtctggatcatttaaagatagtaagaaaaatgtcactaaaaaggatgtcaggaattcatatgaaccaccaaatccaacttcatttgttgaggataaggttcaaactgtaaaggttggagatggcgatctccaggaaactaaaaagctgaacaatgagttggatttgaccaactcatcttcagctccaacggttccactggcagttagtacagagaatgccgacagcacagcagtaaccactgctgatgttcctgggacagatacaagctcaagaagaccatcttctgagggtactggtgagcctggagtggaaagcttcactgtttccgctgttgaatgtgacgaaagcaagaggactcacaaagttgtgaaagatcctagcaaggataatatttcttctgatgctaccaaacatgaattgcctaaggaatgtgcagtggactctactgaacaagcatcagcagtgacttctaacactgatgattcatatgcagcacctctagtaactaatcaggagcagttgctgaaagggtctgcttctgagaaacaagctgtgatgaataactcatccatgaattccgatacttcagcacatttttttgatggcaatgatgtgggcgtgacaacttctggaacttcagagcctactgctcaaacttccaatgatgaaggtgactcagatattagtccagaaacagacctagctgtttataatgtccctctaggttcatctgagctacaactgaaatctgagagtagggcaaatgatcaacagcctgctgcaccaacagtatcagttcgaccggtatccagggaaaagcctagtacaaagtccacagctgggaagaagaagaagaaaaaggaaatgcttgctaaggctgatgctgctgggtcttcagatctttataatgcatacaaaggaccagaagagaagtctgaagttgttggtaccgtggagggtgctgataattcttcaacagttgatacaactcatgtactgtctgacgaattagaaaaggatcctagtacatctgcagatgattgtaagaaaaaagttgagcttgatgattgggaagatgctgcagacatgtctactccaaagcagccatcagattctgggaaccaggctagcatcacccaagtgttggattcagacgtaactgaagcaaacagcaggaagaaatactcacgggattttctgttaactttgcaacatcactataccggtcttccttttggatttcagatgaatgaagctgtcaatgctataatgaataatttggcaggaaagtcttatgttgctgaccgggaacctcaccctagtcctggaaggggtttggaccgcccaacttctcgtgaccgccgtggtgctgccatggctgacgacaggtggactagggcgggtgttcctctcagtcctggtcgtgatgttcacatggacctgccaaatggaccatcagttatcaactaccgtggcggcccaggaggtaatcatggtgttttaaggaatccacgcagtcaatcatcaaatcagtatggcggtgggcttcttgcaggacccatgcagtccgttggaccgcaggtacctcgcagcggctctgatgctgatagatggcagcaaaagggtctcatgccttctcctggcacacctgtacaagcaatgcacaaagcagagaggaagtatgttattgggaaagtttctgatgaggaagaggcgaaacagaggcagttgaaagctattcttaacaagctgactccacagaacttcgaaaaactttttgaacaagttaaggaagtcaacattgacagtgtagcaacacttactggggtcatttcacagatatttgacaaagctttgatggaaccaactttctgtgaaatgtatgctaatttttgcttccatctggctggtgccttgcctgacttcagtgaagacaatgaaaaaatcacattcaaaagattacttttgaataaatgccaagaggagtttgagaggggtgaaagagaagaagctgaagctgataaaacagaagaggaaggcgagattaaacagaccaaagaagaaagggaggaaaagaggatccgtgctcgaaggcgcatgctgggaaacattaggttaattggagagttgtacaaaaagaggatgttgacggaaaggattatgcatgaatgcattaaaaaattgtttggaaatcatgatgatcctgatgaggagaacattgaagcattatgcaaattgatgagtacaattggtgatatgattgatcatgtaaaggcaaaggagcacatggatgcctattttagtatgatgcagataatgtcaacaaatcagaagttgtcttctcgtgtaaggtttatgttgagagattcaatcgacctcaggagaaataaatggcagcaaaggcgtaaagtcgaaggtcccaagaagattgaggaggttcacagagatgcagcacaagaaagacatgcccagtcgagtaggttgggacgtggtccagctgttagttctgttccaagaagagcacatcctatggattatggccctcgtggaccatctgcatcagcatcctcaagttcccaacaagggagcattcgaggaatgcctccacattcgcgtggttcacaagacatccgacatgacgaaaggcaccagtttgacaatagaactgttcttccgcagcgggtagtcaaagatgaagccatcactcttgggccacaaggtggccttgctaggggtatgtctataagagggcagccaccagtatcaaatactgaaattccttctgttattgaccaccggaggatagtatctagttctaatggctataactctgcggctgattggacatcatcatctggaagagaagattctaattcaagacttccagatcgaacctctggccgaattcctgcttctagtcaatctgctgtaacttcgcagaggcctgccagccaggaaggccgttcaagaagtaaatcatattctgaggatgagttgagagaaaaatctgttttgaccattcgagaatattacagtgcaaaagatgaaaaggaggttgttttgtgtattgaggagctgaatgctccaaatttctatccatttcttgtgtcactttgggtaaatgattcctttgagagaaaagacatggaaagagagttgttggctaaacttctcgtcagcctttgcagtggtcgacataatttgttgagcaagcaacaactcagtgatggcctttcaaatgttcttgcctcattagaagataatctaagtgatgctccaagagccaccgagtaccttggacgacttcttgcaaggtttgtggaggaaagcatattgctcttgcaagaggtaggtaaattgattcaagaaagtggagaagaaccagggtacctaatacaaggcggtattgcggctgacatcctaggtgcagtcctggattccataaaatcagacaaagggaattcattcttggatgagatcaagacaacttcaagtttaaagttggttgatttcagaccacaacatcttaagcgatcaaagttggacgccttcatgtaggcacataagttattgttacctgcttccaaacgatgcttttgctgagaatcttcatgcacgggcttttactgatcggtgaagtttcgcacggtggtaaagagctcttctagatcagttttagatagacgatttactgatcggtgaagtttcgcacggtggtaaagagctcttctagatcagttttagatagacgagaata

SEQ ID NO: 22464 - DNA, 3289 bp, Zea Mays
cgactgctctctgccatcgctgtggcgaccccgacggagccaagcgacggttcatcttcttgcggcggcggcgacctcgagctgattgcagcgagaaggcggggacaaatcgatctcccctagctggctacacccgatggagccgagggttccttgcgttgacggcggcggcgacggcctcgagctgagggccgcgagaaggcatcgacgggagggcgggcgaatccacgtcctcgatgcgcaaatcctggagcctcagcgacagagatcgaatccattcaggaacatctttcatctattaactcaacgagaggtcttacctcgaacgaaacaccatgctaaaaggatatggaataactctccaaaatatgatcctcatttaattgagttaaggttttcagatgcagatgctaaacttggtattttatcttgggcagaatcactgtccctgcatcgctggtctgccaagtattgccctcttttgccacctcctaggtcaactattgcagctgctttcagtccagatggaaaatcacttgcgtccacacatggtgaccatactgtgaaaataatggactgccatacagggaaatgtgtgaaggttttgagtggacatcgacgcactccttgggtggtcaggtaccatcctttacattctgacattctggctagtggaagtttggatcatgaggttcgtctgtgggatgctaatacttcagactgtattggatcacaagacttccatcggccaattgcgtccattgcatttcatggaagaggagagattctggcagttgcatcaggtcacaaattgtacatatggaactacaataagagagatgatgcttctgtcccaaccatcatactaaggacccgccgttcgttgagagctgtgcattttcacccgcatggcgctccatatcttctaacagcagaggttaataatatagagtctgcagactcaccgctgactctggcaagatcatctggatattcaaactacccttcggccctgctggtgtcaaacactaattctagattctgtccacttcctgagtccaatgtgacgtcaccgtgcttactgtggcctgcgtacctcagagatgatgggattttacatgtgcttggcaatgccagtagttcaaccattgtgcagcagagatcatcattagttcaaccttccacatcagatactgcaaatctacagcttgaacagtttgctacccctatggatgtatgtcctggagagccaacttcatttaataacatatcagatgcagtaactgtgcctacttcaaatgcaattgaaatgcatggtgctggcggccagtctaacccaagactgcagggcagcagctctattagtaatcttgagaggttcagtgctagagatgctttgcaagtgtcttccctgagcagcattgagccaatcccatcaacagctgggtcttcgggatccaattcacgccgtgctatgccactgaatatgctcctcactggtggattagatgttcaaatgttccaaagaaatgtaggaagtggacaacaggatcattttctcttcggcgactcaagtaactgggaagtgccatttgtgcagggttttttgatgacccaaaaccatacaggtttgcaccctgcacttgtgaacaataatgtccttgaagacctatctggtgctggtactgcagggattaacaactcaactagggaatcatcacacatgcataactttggacgtccaggtgcttcatcatcgattccccttacttctggcagttctaggagaccaaatcgacactatgcctcacgctctgtgcctggggttgggagtttgctcctagtaggtcctcaaattgacgaagctgaagctcatgctgcttcactaggtgctggttcagaaatcactgcgtcgatgcttgctcctggtactgaattgccttgtacagtgaagctcagaatatggcggcatgatatcaatgaaccatgtgttcctttagcacctgaggcatgccgtctgacgatttctcatgccgttctttgcagatttggggatattcttgcttctagagcaataagggcagcacattgcttaacttccattcagttctcacctacatccgaacacatacttttggcatatggtcgtcgtcatagctcgctgcttaggagcatagtcgtggagggagaaaatgggattcctgtatatactattttggaggtatatagagtttcagatatggagcttgtgagagtgcttcctagtgccgaagatgaagtcaatgttgcatgctttcatcctttaccaggaggtggccttgtttatgggactaaggaagggaagctcaggatccttcaacacaatggcgcaaacatgataaacatggggtcgggttgcttcattgaggaaaatatggttgagatccagaggtatgcattggaatgctgaataagcttgaccacatcatgtgaattttaggcttacttccatggcttcatctgtgtgatccgtccaagggaaaacattagatccatctccaactacattagaacagataattctcaatgggctctttcaagtgccttggggactggtctttgcaggggcggcaggagatgtaaatctacatggccaccgtcgtggctgccatcacgatgctgtaattataccttttgtacatgtattccaatcagcttaactcgattgctgttgtatttcagaacgttgacggtgctaatacttctgaagtctttttgttgtatacttcacctatcctaacaagcggtcgatgatgcaagaaattacaaaggcgaatgggattctctgggtttgattttacacgtgataatcatgtatttttttcctgttctcgtctgggttgattaatcattaaacgtttggagtttctatatctgtatgaaatagcatctgttgcaacataagaatatggttgacactagacgtctacaagggctggtctagaatgccgtgctattgtcattattttttaagtttaccaagagctatctgaacgcgttccatttggattgaggtgtattgaagtggatggatgaggattttgattagtagtggatttattccctcttaatccttgtagatttaggagaaaacgaacatggcctaaattatttttttcatttcttccctggtggaatattattagacgccagttacatttaatgctcggtcgacaaagttgtcatgaaaatcatggaatcatttggtttctttgggatttttatttttaaccctcaaaaaaataaaaaa

SEQ ID NO: 22465 - DNA, 2531 bp, Zea Mays
atccccatcctcctcgcaatctccctctactagtgctgctgctctcattcctccaacaatccaaggttcgagctcattcattacacgaatctgcggccgcgtgggtgccggagagcggcgagcaatggagggggtgtggaggaaggccaagagggcgctgggcgccagcctctgtgtgcgcctccccgccgtcgccggcgaccgcgaggacggcgccagcgagcgccgcgcctcggatgcgctctccctcgactctacagcggcggcgcacgcatcggcgcccaacacgccggccgcgccggggaccggcgcgctgcggaggtccaagtccggaggcaagtcctccaagagaatgtgtgcaatatgttttgattccatgaagccaggtcttggacaagccctattcactgctgaatgttctcatatgtttcacttccactgcatctcctctagtgtgaaacatggaaaccatgtatgcccagtatgccgggcaaaatggaaagagatccccttcaatcgctcattatcttctatagttcctcgtggaagaggtggactgaatgtaaaccaagctcgattgccccaacaaggtgcctacatggctcttctccgccaggttccaaaccgtcagcgagaaggtccagtattggttacttctgagccatcagacttcaatgatgatgaacctttgcataagatggagcctgctaatattggatctagtagaactgtggaaattaagacatattcagagttttcagccattcaacagtcatctcaagatgactttgctgttctgatccatctgaaagccccatatgctaacccagagcaggtcataggcagaccggtcaatgcaacctcagttggttatcctactgcccgcgccccagttgatcttgttaccgtgcttgatgttagtggaagtatggcaggcactaaactggcactcttgaagcgagccatgggttttgttatacagcatcttggcccatcggatcgcctttcagtcatcgctttctcttcaaccgccagaaggttgttccatctccaacggatgtcacactctggccggcagcaggccctgcagactgtcaactcgcttgttgctagtggtggcacaaacattgctgatgcactgaagaaagctgctaaggttattgaggaccgaagccatcaaaatccagtatgcagcatcattctcttgtctgatggccaagatacgtacaatattccctcaaatattaggggtgcccggccagaatacagttcactagttccatcctccattctaaaccgcacatttggcttagtgccggtgcatgggtttggttttggagtagaccatgattcggatgctttgcattcgattgcggaggcctctggcggtacattctcctttatcgaggatgaaggtgtgattcaggacgcatttgctcagtgcataggtgggctcctcagcgttgttgttcaaaacatgcaagtaaatgtggagtgtgtccatcctggtgtccagcttcgctccatcaaatctggtagttaccacagcaaggtggctgcacatgggcgaaatggttccattgatgttggccatctctacgccgacgaggaaagggacttcctactgtcggtgagcttaccacattgtcgtgaacagaccacacttctgaaagttgcctgtgcctacagagattcattgaccaacgaagagatcaagattcagggtggcgaggtagcaatcttgaggcctagatcacccgtatctgagccagtttgcatggaggttgaccgcgagaggaaccgtgtccgtgctgcggatgctatcgaggccgcaagggctgctgctgagagaggtgctctttctgatgctgtgtcaatcctcgaagactgccggaggatactttcagaaactttttcaagccggagcggggaccggctgtgcatggcccttgatgcagagctgagggagatgcaagagaggatggctaaccggcaacgctacgaggcttcagggcgggcatatctgctgtctggcctcagctcacattcttggcagagggccactgcgcgaggcgactccactgacagtgacacacttgtttattcctaccagacaccatccatggttcacatgctacagcgctcacagaaccactgcccttctcctcaaggcccttcacaacctagggtcttggtgaaaccccagccaagaggcggtgaggcgggcttggaggtaaatataatctggttgggtatactggggaacctaaggtgggggctttggtggtaaatacattgtggggggtatactcctgtggtgttaagaaataagtagggtagtagtagtagtagatgaggggctggagaaattgtgtaatagtttcaacgggttggagctaggtagtttagtggaggtcagttcttgtcaaagtctttatttgatctttggtgatgtagataagagggtatgatctcggggtggtatatcatggaatctctgtttttttgggtggtgatggtggtgttcaatg

SEQ ID NO: 22466 - DNA, 4025 bp, Zea Mays
  misc_feature (4024)..(4025): n is a, c, g, or t
gacttaattaatcgactaattcctctctctcctcgtctcagctcgcggccacgctagtcgctccccacctcgttccctgcctcgtccccacccttctcgctccgccccccgccccccgctcctcgctccaactcccacccacccaccaaagcgtcgccggccgacgcgtgcgaatccccaggacgggatcgataccccgcttgatcgccggactctctgcctcggtcctcctcttcgcacctctctctgcctgtgaatccaggtccaattcgcaacgcggcgtaggaatcccatcctagattcggtcgagctgcaatgccggcgtccgcatagctggaaatcgggcgctgacggacaccgggcgccgagatgggccgttccggccgccgccggcgggaccgcgtgcggtggagcaatctctacaccttctcctgcttccgtgcccagcaagagcacgccggcgatgcgggcccctcctccgatggggctggcgccgtcggcgggccgggcttctcgcgcgtcgtgtactgcaacaacgccgccctgcagaagccgctcaagtacatcaccaactacatcaccaccaccaagtacaacatcatcaccttcttccccaaggccatcttcgagcagttccgacgcgttgccaacctctacttcctcctcaccgccatcctctcgctcaccccagtgtgccccttctctcccgtcagcatgattgctccgctggcctttgttgttggcctcagcatgatgaaggaggggttggaggactggcgccgcttcatccaggacatgaaggtgaacaaccgctatgtcagcacgcacaagggtgatggcgaattcgactaccggcactgggaggacctttgtgtcggtgatgtggtcagagttgagaaggaccagttcttccctgctgatttactgctactgtcctcgagctatgaggatggtatttgctatgttgagacaatgaacctcgatggtgagacgaaccttaaggtgaagaggtcacttgaggtaacgctgccgctggaagaagacgagtcatttaaggatttccaggcagtgatacgctgcgaggatcccaacccgtccttgtacacatttactggtaactttgagtatgagaggcaggtgtacgcccttgatccgtctcagatacttctgagggactcaaaactaaggaatacagcctttatctatggagtggttatcttcactggccatgacagtaaagtcatgcagaactcaactgagtcgccatcaaagaggagcaggattgagaagaagatggatttgatcatatacatcctgtttactgtgcttgtgttgatatcgctcattagttcaattggattcgccgtgaggatcaagttagatttgccccgctggtggtacttgcagccagagaaaagcaataaattagatgatccatcacgcccagctctttctgggatattccatctaatcacagctctcattctttatgggtatctgattccaatctcgctgtatgtctcgattgaacttgtgaaggtattgcaagcacatttcattaaccaggacattcatatgtttgatgaggacactggcaatactgctcaggcacgtacatcaaatttgaatgaggaacttggccaggttcatactatcttatcggataaaactggcactctgacctgcaatcaaatggatttcctgaagtgttcaattgctggagtatcatatggcgtgggttcaagtgaagttgaacgtgctgctgcaaagcatatggcatcaggtgctgatgaccatgatatccctttacaagatatatgggaggagaacaatgatgatgaaatcgagttggtaggagtcaactttagtgttgggaccaacataaagccctccataaaaggcttcagttttgtggatgaccgtctcatgcaagggaactggaccaaggagccaaattcttccacaattctactcttcttcaggatacttgctctgtgtcacacagcgataccagagataaatgaagcaactggttctattgcctatgaagcagaatcacctgatgagggggcttttcttgtggcagccagggaatttggatttgaatttttcaagcgaacacaatcaagtgtctttgtcagggagaaacacacttcttcgaaagacacagttgagagggagttcaagattctcaatctattggaattcagtagcaaaagaaaacgaatgactgtaattctgcaggatgaagatggtcaaattcttcttttttgcaaaggagcagacagcatcatatttgatagactggcaaaaaatggaaggatgtatgaagttgatacgactaggcatctgaatgattatggtgaggcaggcttgcgaacattggcactatcatacagggtgcttgatgaatcagaatattctttgtggaatgcggagtttcttaaagcaaagacatatattggtcctgatagagagttgcaacttgaacgagtctctgagttgattgaaagagagctgatccttgttggtgcaactgctgtagaggacaaattacaaaagggggttcctcagtgcatagatcggttggcgcaagcaggtctcaaaatctgggttctgacaggtgataagatggaaactgcaattaacatcggatatgcatgcagtttactgaggcaaggcatgaaacaaatatgtttgtccatacccactggtgagcaggtagctcaggatgcaaagaaggttgcaaaggagagtctcctgtcgcaaatcgccaatgggtcacaaatggtcaaactcgagaaggatccagatgcagcatttgctctagttattgatggaaaagctctggcatttgctttggaggatgacatgaagcatatgttcttgaacctggcaatcgagtgtgcttctgtcatatgttgtcgtgtgtctccaaagcagaaagcactggtgactcggctcgttaaagaaggtataggacaaaccactttagcagtaggtgatggtgcaaacgatgtgggcatgattcaagaagctgatattggagttggaataagcggggtagagggcatgcaggcggtgatggctagtgatttttctatttctcaatttcggtttcttgagcgacttcttgtcgttcatggacattggtgctacaagagaatcgcccaaatgatttgctacttcttttataagaatatcgcatttgggcttacaatattttactttgaagcattcgctgggttttctggtcaatctgtatacgatgattggtttatgctgcttttcaatgttgttcttacctcacttcctgttatatcactcggagtatttgagcaagacgtttcatccgaaatctgcttacagttcccagcattataccagcaagggccaaagaatcttttctttgattggtaccggatccttggatggatggggaatggcctctactcctctctggccatattcttcctcaatctctgcatattctatgatcaggcaatccgtgttggggggcagactgcagacattgctgcggtgggaactaccatgttcacctgcatcatctgggctgtcaacatgcagattgccctaacaatgagccatttcacatggattcaacatctctttgtatggggcagcataacaacttggtatctcttcatcctcgcctatgggatgacattgaggtctggcgacaactaccagatcctattagaagtccttgggccagctcccatatactgggcagcgacgcttctggtgactgctgcctgcaacatcccctacctgatacacatatcctaccagagatcgtgcaatccacttgatcaccatgtgattcaagagatcaagtacctaaagaaagatgttgaagaccagacgatgtggaagagggagcggtcgaaggccaggcagaagacaaagattggtttcactgcgagggttgatgcaaagatcaagcagatcagggggaaattgcataagaaaggcccatctttaacaatccagacggtatcgnn

SEQ ID NO: 22467 - DNA, 2925 bp, Zea Mays
ataacctcgcgtctgcgacacaccaacccgaaccttaggtagcgtcccggtccgcggtgccagccaccgcgtgccgccgcctgggtcttccctcctcagctccttcctgagctcggcggtggaatcacgggaggaggcggaatagtaagctgaggcggggccatcgggctccgtggttgaggatgcctgtgctgcgtagcgcggcgcgaagggcccgagaggcgcaggggcatccggcggcagctgatgaaaaagctccggaggcggcggcagcagcattagcagcagccccggcaccaccgccggtggagaagaggcggagagtgacgagggcggaggagagggagcgggaggagatcaggcctagggaggtcgtcgcgggagaaggcggcgacgacgagggggagcgtgggatggacgaaccggacagcgcggcacgcagcgccgacaagctgacattcgatgatgaggacggccccactgtccctgaagcggtccaggtgggtagttcaccgaagtatagagtcgacaggaagcttgggaaaggtggttttggccaagtatatgttggccaccgcatgtcagctactggtccaggtgccgtcgaggtggcactgaagtttgagcataggaccagtaaaggatgtcactatggccctccttatgaatggacagcttacaacgccattggtggcattcatgggtttccccgagtccactacaaaggacgccaaggggattactttgttatggttatggatatgctcggacccagtctgtgggatgtctggaataataaatctcacataatgtcagttgagatggtttcttgtattgctattgaagcaatctgcatacttgagaaattacattcaaaagggtatgttcatggcgatgtcaaaccagagaatttcttgctagggactcctgggacacctgaagaaaagaaactcttccttgttgatcttggcttagctacgaagtggaaggatattgcaacagggcggcacgttaaatatgatcagcgttcagatgttttcaggggaacatttcgctatgctagtgttcatgcacatcttgggagaacaggtagcaggagggatgatttagaatctctagcatatacactagtctttcttctacgaggatgtctaccttggcaaggttatcagggtgacaacaaaagcttccttgtctgcaagaagaaaatggccacctttccagtatctctctgttgcttttgcccacatcctttcagaaagtttgtagagtatgttgtcaacttgaagtttgatgaagaacccgactatgcaaaatgtgcatcactttttcatagtgtactaagtgtagtaggttcaaatccagatgtcagaccaattaacactgatggtgctcagaagcttatacatcaatttggtcaaaagagaggccgattttttatagaggaagaagcagatgaacaaccaaagaagaagatcagggtgggaatgcctgcaacacagtggataagtgtctataatggcagagtacctatgaaacaaaggtaccactacaatgtttcagattcaagagttggacagcacatcgaaaaagggaatgccgatggactgtttatcagttgcataacatcttgttccgatctatgggctctaatcatggatgctggaactggtttcacatcccaaatttatgagctcattccacatttccttcacaaagaatgggtaatggaccaatgggagagggactactatataactgcggttgctggggcaaacaatggcagctcgttggtagtgatgtctaaaggcacaaagtacacacaacaatcctacaaagttagcaatagtttcccctacaaatggataaacaagaaatggcaagatggtttctatgtaacttccatggcaactgctggaagtaggtgggctgttgtcatgtctcataatgctgggttttctaatcaggtggttgaactggatttcttgtatcccagcgagggaattcataaaaggtgggacaggggttactggataaccgcagctcctgctacttgtgatcaggctgctttcgttttaagtgtaccaaggaggcgacttacagatgaaacccaagagacactgaggacaattaatttccctagtaaacatgtgaaggacaaatggtctaagaatctctacctagcatcggtatgctatggtcgtactatatcctagggatcttttcgagcggaatcctgccagcaccatcttttgacgtaggtagttcactgtagcagctcctatgtgcgggtatcctgagtcgtgttgcgaaggcgtctgctatcgttcttgattatagactagcatatcatgtacaacagtacatgttttgtactacctctgttctcgaatgtttgtcgcctgtgttgaatgcaatttttgtggagctgttagagcaggagatatccagagccacctgccagaagaaagcagaggaagaaaaaaacaaaacaaattattagtcggtgtatggatatacagtgatatacggccagaaaaagtggaagaagagcacccctacaagcatctacggatgaccaaattggcatggccacaagcacggaagtttattaggattattattcatttagattaaattagttcctattttctagagtaagtcagttttatgtttggtcagggataaactagaaagtgaagttgtttagatatttatggagtcggttcctattttctagggtgagtcggttgtagatggattataaagccttattgtaataatgcagagagggcaagacctacagttatcatttcatttaatctagtatctattatcttcattcctctttggtgctttgccgagaaaagcattcgagtttctctgcgaaagtgagatcaacgcctgctgctcaaccaatttctg

SEQ ID NO: 22468 - DNA, 256 bp, Zea Mays
cactacctctctttttaggaccaacattaacagaaatgccctgagacagataggttttaccgtcatgccacaggcgctgaacagtgcgaacatgaactccaaattgtgcagcaacttcttttgtgacattcttccatagtttcccattcgtgcttttagccaacaaggtttggtagatttgtttactttgttcttcagtaatatccctcctccttcgtctacctaaaaacagttagtaaaaaactataagtccacg

SEQ ID NO: 22469 - DNA, 3486 bp, Zea Mays
tagcctgctagtctctccttgggtgattgggtccttcagtccttgcaatttcctcccgcactcccggttctcccgcacgctcccctctgcctgtccgtgtcgcttgcttcgcttctgcaaacccctgcccggcggccggggcgagggggcgtgatggtgttcaaggggcgcttcttctcgtcgcgacacaagtcatcggagtcatcttccagcccagacggcagcaacagcccacgcacgcctacctcggccccggcctcggcatccgcggcgtcgccggcgtcgtcgtcgtcgtctagatccgacaagaagaagactaaatcggagactcctaagaagcgcgacaagctcttcggttccgcggccaccgcacccaagagcgccgcatcgtcggcctcgtcaagcccggcgggtgatgggaggaaggggtccgtgccgcatcatagggatgcgggcgtcgggggcgggggtggcgcgtcggcggccgcgctgtcgccgatcctggcgtcctcgctggggctcaaccggatcaagacgagatccgggccgctgccgcaggagggccaacgcatggctgccgtgatcgggagcagcaacctctcgcgcgggcagggccaagcggaaccgtcggctgcctcagccggcgtcggcggtagaaagggcgtcacctcctgggcggatactagtagtagcagccgcggaaaagggaagacgaccgagctgccgatgcgaagtacagctgggacgagcttgggaccagtagggaagagcgctgtaaaagctaaacctagtgcacagcggaaccattctggagatttgaggacacctactcacatacctgaggctgcgtgtgcatatgatccgtgtgagacaccaaaggaatccgagtccccacgctttaaagccattatgcaggctactagtgcaccgaggaagagactccctgcagatataaaaagtttttcacacgagctgaactccaaaggggtgcgcccatttccttttttgaaacctcggggcatttacaacttaaaggaggtaataaaagttatccatgtgagatttgagaaggcaaaggaagaggtaaattcagatttggcagtttttgcaggagacttggttagcgtaatggaaaagtatgcagactctcatcctgagtggaaagatgccctggaggacttgctaatacttgcacgtacctgctgtgtcatgacacctggggaattctggcttcagtgtgaaggtatagtgcaagatttggatgaccatcgtcaggaactctcaatgggtgtgctgaagaaactatacacccggatgctttttatccttacaagatgcacaaggctgctccagttccacaaagaaagtggttttgctgaggatgaagttgttattgatcagcgtgataagattatacaatctgcagataggcagattttaactcaatcaggtgtgggtgacacaacatccagagccagtaaaagtgaggcaagaaaatcatacagtcaggagcagcataatttgaaatggaagcgtagccaggagataaagcctgttaaccttcttccaccacttgatacggatgttaagaaagtggctgattctccaaccaaagaacgaatatcttcctggaaaccttttccatctcctgttacgaaggtcccaaaagaatctactcctactaaattggaatcacctaataagaaaacagatgcacactctacagttagtagccatgttgaattaagcagtccagttgaatctttaccacaacaacagcttcctgtcaagcatcaacataaaacttcatggggccactggtctgaccagccaaatatttctgaagagggttcaataatgtgtcgcatatgtgaagagtatgttccaacacagtatgtagaagaccattcaagggtctgtgcaattgctgacaggtgcgataaaaaaggtgttagtgttgatgaacgcttaatcagagttgcggaaatgctagaaaagatggtagaatcttattcaccgaaagacctgccaaatgctgcagtcagcccagatgttgcaaaagtttcaagttcaagcatcaatgaagaatctgatggtccctctcctaaactctctgattggtctagaagaggatctgctgatatgcttgactatctccaagagactgataacactatttcattggatgacattaaaaatcttccttcaatgacatgtaagactcgttttggaccaaaatctgatcatggaatggccacatcatccgctggaagtatgactcctaggtctccattaactccaagatcaaatcatatagacatgcttttagctggtaaaaatgcaattaatgagagtggtgatcttccgcagattgtcgaacttgctgatattgcacgatgcatagcaaatacccctctggatgaagaaagcgcattatcccaaatggttacctgcatagaagatcttcaagaaattgtcaaccgcaggaagcatgaggccctcacagtccagacatttggaacacgcatagaaaaactacacagggagaagtatctgcagctctgtgactcagttgatatggacaaggttgattcagcaagcaccataatggatgaagaagatgatgttgttcgtagcttgcgcgcaagtcctgtccatccagtcaaggatcgcacttcaattgatgactttgaaatcatgaaacctattagccgtggagcatttggacgtgttttcttggccaagaaaagaactacaggagatctttttgctataaaggttcttaggaaggcagatatgattcggaaaaatgctgtcgagagtatattggctgaacgtgatatcttgattacagtcaggaacccttttgtggtacgctttttctattcgtttacctcacgggagaatttgtatctggtcatggagtacctgaatggaggggacctttactcattactgaggaatttagggtgcctggatgaagacgttgctcgtgtatatcttgcagaagttgtactagctttggaatatttgcactctatgcacatagtccatagggatctaaagcctgacaacttgttgatagcccatgatggacatattaaggttggtttgatcaacagcacagatctgtctggtcctgctgttagtggggcttcactgtatggagatgatgagcctcagatgaatgagctcgaacaaatggatcaccgagcacggagacaaaatcgttctgctgttggaactcctgattatttagcaccagaaatccttttggggacaggacatggttgcagtgcagattggtggtctgttggtgtcattctgtttgagctcattgttggcatacctccattcaatgcagaacaccccgaggcaatttttgaaaatattatgaatcgcaaaataccttggccacatgtcccagaagagatgagttttgatgcacaagatttaattgacagtaacaggagcttcctatcgtta

SEQ ID NO: 22470 - DNA, 1892 bp, Zea Mays
agaagcatctgcaaccgtcattccaggctcacgaggaaactcatttactcgaatcatgtcggactttgtcaggagtagatatgataagcaagaagatttccaagttttgttgagcaagaaagatcctggagaacaacctcagcacaaggattacctgtggatggctcactggaccaaagcaagcagcgctgcagaaccccgaaacaatgacagcaatcctttggaggataccaacaatggcactactacgaaagatagcgagaccttgccttatgaattcatgaaatctacagttgctgaaaggctcatggtaggagtacgccatggaagtgcctccatgcagcatgtccgacaattcaagtctagtatgcggggaaacaaccacaatcgaattgttgcaagtgcgtcccacgatctgaagacaaaaagatctgctgtccataaacaacaaagtgctgcagaggcagtgttctgtgcaccagtacttgatagtgagtttcagaatgaacctataactatttccaacatcgacaagaaggatggtgaaaattttcatgatatgtataaatgtcttggcaaggctgtttcatgtcctttgttaccttatgagcatcgtcatctgaatacacagagaacggaatctgcagaaaatttgaaagtctgcacgcttcctgatcatcaaactgcaaataaattgacagaaaagagtcatggtgagctgctgacatatggaccaaagtcaaaggaaatgtatacaggttcttgtaaccaaagaaggaaaatctagcgactttggagtttgtatgtatggcaccaatattggcagtcagttattcagagcacagaatcaatcttcagctaagactgaaacattgcacagcgatactctcattgggtccaaatccccagcaggcatcgcttcattgtcggcacaaaaggactatggttgcacggacgaagcaaaaagtgagcagctcgtagctccgtccaggagaggagattcaggatacggtaaagaagatggatttcataatgtcaatgaaggtcatgatgtttggtccaaagcaactattggtagtaagcaatcatgcatgcccggaacgggaatcacgaacctagatctgatactttcccagatgagcagaatgagaaatcaaatttccattggtagaattcaaccaccaataggtgccgagccaagtgacagatggctcaagcgcctacagcctgacataccagatcctgacatccctggttccaggaggccaaacgttggaggcagccctccactcaggcaaagaaatcgttcgtttgacatggcacttccttgcaacaggactgacactggaacaactgactgtgttatggaggaccagagcttggataaagtggaaaaaacgcaagaaaagcaagaaagtaccccaattccagcgaagagcgtgaatagctggataggaagatggtgccagggaggcactcctgttttccatgaaggcccaggccagggaaggcaagcaacaaagcctggccggccatctgaagaactcgaaggtcggttcccaagcattgcagcgatggcgatgatggggcgagcgatgaacaagcttcggccgtgcgagcatcagaagatggggccacttgtggtgtggaagacagattgacctcatatatatatgtttttgggtgtaatatagtggtttctttccaaaaaaagaaaaaaaaatgaaaagcaacagtgaattttgcctggtttattgtttatggtgtaataaaccatatgatggctcatggtttattgttttctgaagtgaaagtagctaggtgtagtggatactggtgatgtaatggtctggtctcatataccaacaatataataatattttactgtttac

SEQ ID NO: 22471 - DNA, 3864 bp, Zea Mays
gtccaatactgctatagtagcttctccaagttatgacactgttaggaagatggttcaacttctctcgaaatgaagcttctgtcttcctatgtatagacaagttgttcagttaggaggtctagattctcttaaaatggtgctatctacgagttaggaggtctaggagcacactgaatgttttagaggttgatgaaatcgttgttttcctaaaaaagcattttttctgctttgtttgaaattgtttgggttttcctccccaactttcataattacctatttctattgtatgtttgatcatttggacttctactccatccacaattttggtttattcagtgaggaactatgtttttaaccactctatagtttgtatagacatgcaacattcatctcagggtcaagaaagaagctcaacttggcatgcttcctgtttaaagcaaggcaagaaacatccccgccagatctctgtcgccaaagcagggctggtgaagaagttgtgtttccctcccggattgtcactactttcatatttgttcatttatgtttgttccaatttatgttggttttttacagttacagaatatgtttgttccagttgagttccagtttgaaaactggaacaaccactagcagatgcaaagttcacaaagtagcttgtcaaataatgtgcatgaactggaacaagcaacttgtgcacgaatgagcattactggaacaagtagcttgtgcatgaacgagtaatactgtagatgattggacatgtatgtctattttagatttttaatatttaatgttatatattcagctcataccatacatgaatttgcatttctgtactatactcacttaatgtcctacctgttttgttagcttcaactatccgctttaaactgacaaaaccagaccaaacatatgcaaatctcatatacctgtgaaagcaacaactgatttgccagattggttaattaaacgtaacaataaatagccccgattaaatggcttataaatatacttggatctgttcatttttcacatatcagctattaatgaagccttcactgggttcattttgtactactccattacttatttacagttacaagtattctaagaaacttaatatttcatcatcaaagttgtattcagacagtttcatttacattgctctgattttttgtactaggagctactgacaatggaaagcaacgattagagtaacttgatgagtgaggactattcattcagttgcttcgatcaataagtgaactaatggatgcatgtttcttttgataagtgagctaactactttagtcacaaagttcgtgttgatttctaaacatggtatgatggttttgtcatcctattcgattgagtttgggaaaaagcctgcacattctgaaaacaaacagactgcacattgtgtggctgataaggttgagtgggtaaataagatcaaagctattatttagacatactgaaaatatagtgaaggaagcgtaagcaatttttctgctatatttatgcattgtatccttgtaaaattatcaatattgttctgacttgtggggaaaggtatgagagtattcatttttttgcctcttttctgtttgcattccttcttcagtataatgtttgttagaataaccaggtgaatttacaaatttcatatccatatactttcttcgatgacaaatataaatctacctaggtttgtcataactcataggtcaatcattctaacttcaattgacattttttataaaaagtatcataaggaaaataatatattatcataaaagtgacgtccatctatatcaaattttagatattgatggtggtcagagttaaaaaacagtttgccttaagacaaaccaagatgaacttgtatttacaatcgaaggaaatattgcacattgcctagacatttaatttattagataaattcttttgttagttgttcaactttgtacgtcttataagtcacaggaacaatgtttatctagaacttcggtctcaaattatacagtagtgttcagccatacctgccatgtcacaagaaagagagataaaaagtatttaatagtagacctaatgatgctcatttgtaattgtagatattcgtatatcctttttctgcaaccttgtgaaacatgtgatggtttgacttggaacaaactttgggtctgatatagtaaaatgcaatgtatgtggagggaagtagtagaacaagacagaacaagtgccaaataaggttatatagtagaatacaatgtgtggagggaaatagtagaacaacacaaaacaagtgccaaataaggttacaaggtttatagtagcgattgcttagctgctacaacgacactcatagattagcctggcatttgcaatgtcgctcttgtatttgccataacctcacttaaggtcacacattgcctctgggaccttgacctccgctactgttgtcgcctggccgcgtcgacttcaccaatgccggggtgtccaacctcatcagcttcaccgtcgtcgactgctcccacacaaccgagctgtgggtcctggtcacatatggaaagtgaagaacccaaatgatttcttcacaggaagcttggaccaatcttcaactcatggggcgcttcatcctcggcctcctacgcatgcacttctcctgcttctcctgctggtcatcgcccaaggatgaattgctgctcttgaccatagggattggagcagcatgtagtttatactttatcctggttttctctctcgagatgttgcatggtgtcagtgtgtcagatgtgccgtaacagatgactccaaaatggattgcatgctcttcaaatagctacagataactatcttcacataaaatggagagtacaatgtttataaaagaaggaatatggataaggatccagattctcctatagcatatgaagaggcaaaggaaatggcaagccaaagctgcacaatttctgatgatcactcgttgttactgttatccattatctcctcagaggcattgcttttaaattcaacagcagacatggcaggtgcaggtcctatcctatccattatctacccctgcatgtgtgccagctattctactctatgtttcaatagtttggaaataattcagagctaaggttttctgatacagcctttcaagatttggcacattgacataatgacatgggttggtcacggattggatgtcaattttgctccctgtaccttgtagattatcggttatgtcaattttcgaaatttctatcgtgatggataacatttgaataaaacatagttaaataaacatgactactgtttcagtctttcgaaattctgatgctatagtgtcagtatactatgtcattttagggaaaatatatgtcatgtttattttgataaaattatatgatttctcactcaattcttgtcggtggcttcaggatttgttattttgtatatcgatctgtgtcatttgacaaagtactttgacttggtataatatgagtgttacttcgaccaaaagagcttggtaaagtgtgagaaactccgcaaacttcttctgcagacgatgactagcaacagttatgacgagggtcaagatagccgccatacatgatacattgagtacaacatcaagataaacactccctccccacacacaacttttgccttccgttcactctgtatgttgtgtttattacggttgcatatgttgtgtttattatggcatcaacacgttccattagaaaatataactattgtttgtcaagtacaaaatcataatcacatcagcttgtaataatattgcatcactgttttgtaccaaattgtaagttgttgtagcaacgcacgggcacc

SEQ ID NO: 22472 - DNA, 2885 bp, Zea Mays
ggagacactaataacgttcaacaaatccggaaaaccgatgtgttcctagtttgcgataagcaaatttcgagagtaatacccggggcgacgcatggccggcccggcagtctcctatgcctcgcacgcaaggacggacgggcacgcgagaaggggatgggccgcgaccagtgaccgtgagcccattgaaacgtcacagccccggctctctgtccccgcttcgcatttcctttccacccaaagtctccctcacctgccagtctgccactcgctcgctctcttccacaacccgcttcccccaaaaaccagatctaccacctgctcggccttagggcgcttcttgggccgagccctagcagtccggaattccgatctcggccaccacctcctcttctctcctctcctctcctgaaagcaatctcaaaagttcagcgggtagcctatcaagatggccgaggaaactgccaatgacgctcaggtggcacaagataacgagattgctctcagcaatgaggcaatccaaggtgatgatttggttcaaggaaatgagctagttgtttctgaggtgacaactcctactattggaaccagacgcaggagaaagaagtctttggtatgggagcacttcactattgaagccgtcgcaggtggggccactagggcatgctgcaagctctgcaagcaaacctttgcttacagctctggttcaaagattgctgggactagccatctcaagaggcacatcaccttgggctcttgtcctaagataaagaatcaagagcagaggctggcgctgccttcaactggagggactgacaatgatggcgagggaactatagagcggcgaaccaagagacgctacagatacactggttatgcaaatgctgcttttgatcaggaccgcagttgctcatacttggcaaagttgatcattcagcatgactacccacttcacattgttcaacagccgtcatttgccatttttattgaaagtctgcagccacgtttcaagattgtggatgttgaaacgatggaaggagaggtatatgctgtttatcagaaagaaaaggagaacctgcttcaagcattcaacagtatgcctggaaggatcagcctcactataggattgtggacaactagtcagactcttgggtacgtttcacttgcagggcagtttattgactctgagtggaaagtgcaccgaagaatgcttaacttcatgatggtgtcatctcctcattcagagaatgcacttagtgaggcaattagcatgagcctttctgactggaatatgaaggacaggctattcaccatcacattggataatgaatgctcctcacatgatatctacagtgcaaatctgagggaccatctctccaacaagaacaatctcatgcttaagggacagctctttgttgtgaggtgctatgcccatatccttaatgctgttgccctagatgtcattgcttcaattcatggtgttgtatacagcattcgtgaaagcataaagttcataaaagcttcttctgcccgcgaagagaagtttgctgagattgctctgcagctggagattcccagtaccaagaccctctgtctggatgttacaacccagtggaacaccacctatctgatgctgctggctgctttggattataagcagactttcactacactagaaacatgtgatgataactacaatgaagctccatcagcagaggattggaagaaagttgaggctgcctgtaattacctgaaactgctatacgattctgcacatagtatcatggcggcagcaaacccaactgcaaacatctttttccatgaagcctggaaacttcagctagagctggcaaatggcacaggccacgaagatcccactttcagtagcatcgccaaggatatgcatgagaggttcgacaagtactggaaagattgcagcctcgtgttagccattgctgttgtcatggatccacgtttcaagatgaagctcgttgagttcagttactcgaaaatctatggggctggggctgcaaagtatgttaaggtggtcgatgatgctgtacatgagctgtataaggagtatgtggctcagccactcccactgaccccagcctatgttgaccaaggcgaagggaataatggaccagccaatgcgaatagcagtcaaggggctcctgcttccactggtgatgggcttctagacttcgatatgtacctttctgagatccaaagtagccagccctcgaaatctgagctggagcagtacctagatgaatccctcactccacgtatccaggagtttgatatcctgaactggtggaagctaaacacggtcaagtttccaaccctctctaaaatggcccgtgatatcttggccattccagtgtccatggtaagcagtggcagctctatattctgtgctggaacaggaagtcacatgctcgatgactacagaagctctctgcggcctgagattgtggaagcacttgtttgcgcgaaagactggctccagtattcaccacctgccaccgaggcaccgagttctgcactggtgaaggctcaaggatcgtaggtttgtcgtggtcactgcctgccttgtggaagcaaagcaagaatccatttacccatctgtcgtatctctgagtgtagttaactgtaggtgtattgtaggctgagattgtgaaccgattttgatatattctggtatctatcacgtaaaggtgtaacatgtgttgaactctgctgaactcgtggctgttctgatgtcgtctgactttgcagtttgcacacttccctatgtgcttgtacaagccgtgggatgtatcttgtttttgtattaaatttgttttataccgtggattgatgtctcagtctatatataagcagga

SEQ ID NO: 22473 - DNA, 2020 bp, Zea Mays
gcaaacgtcggagcacgagcacgcgttcttcgcctctcaccccacgggagggacgggaggcgagggcgcggcgagccggcgggcgcaatcggatttggggaggcaaaaggaaaattccggagagcagttcctttccgcctccccatttcctccggatagatttgggtttggcctgcgtcgattagtccggcgctcgaacccgcaccaatccattcgccgagggatcgagcaagcgaggcgtggatcgcaggcggtattccctgcctgcctcttcttctcctccgcctgttcttgccgcggtctccccctccggccgatctggactcgacagatcattaattttttgttggcatacattcccaaccttgatgtaaagacctccttcattcagaaccctgtgttttggaagggtatttcacaatgaagcccaatcagttgattacatcccatgttgatatacatagggtatacccatacgagttccaaccagagttttcaatgtctcatgatcttggattgaatttgttttcacaagccggtacagtgctgggtacttctttaagacatcataggaagatctcttcttctggaaatgcaatggtccatggagctttcaatcgcctcaacaagctttcccgagctctctatttctggctctctagaccatctgatcctaagattttgcgttgggtggcatctgtagcagcgaccagttctagatcttgtcagttgcgtttcaaccaaatgggctctcacatgcaaaatctgactaaactgcagttcagctttccaatgagggaagagcaagcagtacaactaattttagcgaggcttgcaagtgcaacgattgggcgactgttaaatgagcagcaacgtgcatgcaatcttcttactctagctggcgctgttgctattgtacctccacttgaaaatatatcatcaatgatgcttgccgagtcaatcacatcacgaaatattgacagtgatatcagaagactggtggatcagccttatgtagaaggaaagtgcctaagttgtgcttgcccttctgtgcctagtactatatttcaagaagatccaattgaaccaaaaactggaataaaatttccaacatttctggaagacgactccagtccatctgcagcggtccttgttgggataggtttcaaaggcatgagagtgatgagggtcaaaaatctgaacctctacgcttttggtttatatatgcaaccgacttctatccgtgagaagctgggtcctaagtatgcttcatttccaactgacaagctgatggagaaccctgatttctatagtgatcttctcagggaaaaccttgatataagggtcaggttggtggttaactacaatggccttagcgttggtgcagtgcgagatgtgtttgagaagtcccttggcctgcggctgcagaagactttcactgcttgaagacctttggttctcacttcacagaagatatcgctataccttcgggtacgaagattgacttctgtcaaacatcagatgggaagcttataacagaaattgatgggaaacaaattggtgctgttcggagcaaagatctttgcaaggctttcttcgacatgtatattggtgattcaccggtttcactggaggccaaaaaagtcgttgcccagaacgtggctgggctcattggaagacgctgaggatagcgagaggatggttatttcattcttctgtacagttagagaggattcatatgagcgggaaaataggccaagtatgtagagtgatctgtcttgtatagaaagcaggcaaaaaggtccaatgtatatgtggaaggtagcatcttcagttgtgctaggcctccattcttttttttttcttgtttggatgggccttttgcctcttcgtagctgctgtatcatgtatgctcccattgagccaggagttgtaaaatattaaattgaaggtgcttcttccataaaatgatgcatacctgtaaatctttgttgcatattgggatgttcctggtttggcg

SEQ ID NO: 22474 - DNA, 1278 bp, Zea Mays
tgcagggattataataatccgtatcttccaatcaattattctgccatggatggtacattacagcctgctgttggagctgacggaaggcaagtggaggctcaaggcaatgttcttcttgcatcaattgagaatatgcaatatgctgttactgtagatgttcttcatactgtgttctcatcatttggttcagtccaaaaaattgctatttttgagaagaatggggggacacaagctttgattcagtaccctgatgtatctacagctgctgtagcgaaggaatcattggaagggcattgcatctacgatggtggctactgtaagcttcacctgtcatactctcgtcatactgatctgaatgtgaaggtataataggcacatggtgacaagagcagagactatacaattccagctggcgtaatccaaggggtgccacctggtgtacaagctacatcctctgggtggcaaggtaacgttcaagcagctggggcatatgctgccccacccggtgccccttcgcaaagccacggtgccaatggacatgtgcagaactggaatcccggcaactcagtctatcccccagccccaggaccaggaatatatccaggccagatgtactcatctccctcacagtatgcagcgtcagggggcttccctaataccccatccactgctccgccacactatgcagcatcagggggcttccctaacaccccactcccagctcttcctggtgctcctacacaacagttgcacgcttcgcagcagatgctgcctcagcatggaaatcagtcgggaggcgcatccggaactagccaaccggcgccaccagcatcatactaccgttgagttgaaatcttcttttgctattgtacttaacctgttttgtcactgagtttgttattcatcatctaaaactgcaacactgttgtccgtagctgtgtttagatgatgttgggggagaacaacaacatagcaacatgattatattggtggttcttcctctcctaagattgggaaaggagaagatattgcgagtgtttcatattggtggagtttgaaacattgttgctggagatagttttacataagcaaacataatcttcagttataaaggaatataagagccattgctattcatgaacataagcttcagtgtcatcattgtatattcgggatctctctgatggcacgaatacaatagcaagcgcagactcaaatgattgatcctgccgtctatttataggatgtagcatttatataatagcaagcacagtttta

SEQ ID NO: 22475 - DNA, 1554 bp, Zea Mays
caaaatcctacagttttatccaacgagaacaaactactttgtgttgagagtggactaattaaacggaaactgctaaggtgttccgtgcttggttggtaacagactacaatctgcctttcaaagttgaggtgaagaagcagagttcatgttgtatccatcttgttaataagtcagatcaatatatcgcattcaaggttaaaacaacttctccaaaaaaatattgtgttcgaccaaatataggagttattcttccattggcatcacgtgattttacagttactatgcaagcgctaaagaatgttccacctgatttgcaaacaaaagacaagtttcttgtgcagaccacagttgttccatttggtacagctgacgaggacatcgttcctgcttttttctccaaagaaactgatcaatatattgaggagaagaagttgaaagttgtcactgtcagagtatcagagcctcaagtagagaagctcatcaatggagttccccatgccaaggaaacagctggagttactgtggcagagcagacactagatagtgtgaatgaagcacctaatgtggtgaatgaagttcgtcattctctgaaagcaagctttccgtctttaagtggaactcctgctactttcaatgaaaactcctcatctgtaaacgaatgccctactatcctgcaagaatttctagtcccatccaaacaagcttcatttgcattgtcagaatctgcttccaatttgcaagaatcctctgttgcctctatagaaactctgttttcttcaacagaagcaagtgtagacctgaaagaatctccaccgctggaatatactcctgctccaagtgaagttccatcattaagtgataaagaatctaccaatgctgataatgtttatatacctcaggtaaccaaagattttcaaaatttacagatgaaacttaacaatcttgaagtaaaacttgatgaggctaaaactttgattgtaaaattgagggaagcaaacagaactaccatcctagagcgggataaattgcagaaagagatggtattcttgaaaagggcggaagctgctgcaaggagtcagtccatcggttttcccctgcttttcgtcatctacgtggcagttgttggcattttgctcggttaccttctacacctatgaggacggtgaattttagaagaagcacctgcgccattgctgatctctcttggagtcgctgagttcctgaacctgggttactttgtcagagtgaacctactgtcacgtcatgattgtcacattagtcagatgaacttgcatacatcttaggaccgggggtgataattactggagtatatagaaatagagcagcttaattttttacttggtataagaatagagtagtggttgatatatgctttgatcgagaaggccctgtaaccaggagatcatatccttgatacttctcctttcatgacaaggaacctccccttgtccttgtcacaatacgaacagaaactataaagagtttgttgaccttgtcaattaggttagagatcggttgttgattagcataaaa

SEQ ID NO: 22476 - DNA, 1789 bp, Zea Mays
cgcatctaaccccttccgatgcgtgtcccgatccaacggtctccgtcgtcccgtccgcgtgataaagcgccggcgcctcttctcgcgtggcctcccgaaggttctaggctcgattgaacaaattggagcggcactacactcctccacgcctccacctccagcctcccactgatctggcctctctcgaggtgagcgcgcctgtaagtgatcctttctcgcagattatttttgtagttttcgatggaggcggattagctttgaactggtggatcgtgttgggcatcgtatcgtgattggttctgttctgtgaatttcgctagtttttttttctcccacagattactctgaatatgcgtgcccttaattgtgttactgttacgatttggcttcgtcgcggtagtctgttgtgatgcgcccattatttcgcgattaattgtatgtgattctgcgttcgattggttgagaataggcagtgaacccttccgtttcttatttcactgctaactgtatctaggaatctatggattcgatgtgaagtcccaaagggtagcttttagggagggggaatgatgagatgttggaagttcacaagttgtgtctttcttaaaggctggtaaccgtatgtgtagactgccccttgtcttttgtaatgtccttttcaggttcagatgttctctttgtgcatctactgtttcagcagggagttactgatgtttatatttaactataatgtctctgcttatattattagttaatcctagatcaatatgagaaggggctacagttacagtccttcaccaccaaggggctacaggagaagggcgcgcagtccaagtcctcatgatcattatggtggtcgtggtagggatctcccaaccagtcttctggtcaggaatctccgtcgggactgcaggccagaagacctccgtcgcccatttggacagtttggtcgagttaaagatatatatcttccaagagattattacactggggatccccgagggtttgggtttgtccagtattatgatcctgctgatgctgctgatgcgaagtactatatggatgggcaggtagttcttggtaggcaaataacagttgtttttgcagaagagaacagaaagaagcctcaagagatgagagctagggacagagtcaggggtcattcttatgatgacaggaggtattctcgctctaggtcgcctcgttattataggggccgctctccttcacgcagccaaagctactcgaggtctccacctcagaatccaagacacagacttagagagaggtcctactccggctcacctgtggacagcagatcaagaagtgggagcccttatgaggatggatatcgcaaatcatcacggagagagaggtctctttctgtcagcggatgaagcagttttacggtctagagctattgctgtgaatctgcgcatggtggcctacttgctatgtctttctgaaccatatatgttctgtctagattatcattcccagtaccagagaagtatcgtgagactgtttgctgtactttctagtcttgaggatacagaagggggtcaccgattctctcagtagatggactattgaccactagctacgccagttccactgctttgtgtatttacaggcagctttgcggtttgaataaaattgtttgcatcgtgaaagctaattggtaaaaagactgaatcatgaaacgaacgttttgcatccctgttccctgatggcatttggatacgattttttgttctttcgacgaacaatttggcaaatctgcatctta

SEQ ID NO: 22477 - DNA, 1525 bp, Zea Mays
gtgaaatactgtgtggagctcaccatctcagcttaaacataaagtggcatattggtatgtgttccgccattttttgtttccttggagtgtgggtagagggggggttgcaggattaggattgagaattattgtctcatgcgggaaggagacagatcttttacttgcagagagaaggaagaaaaagaagactagatcattgtttgaaagatgtataatttaaagcccatacataattgtaagttacgtatgggagattccacctacggttaggtggcccaagatgtagaaatataactaaaaagatctcttatactgattgctttatggagtagagcttaatagtgacgcttttgaagttacagtttggtgtaaagccactgttggatacttcattaagagggtgggaaggggagagttacttcatatgcactctgaatgctttcaggtagcttaacattttcaatgactctctctcgttttgttatctgcagctatagtaccttttgcagttatccaccagaggtggtaaaagagatgccaaaggaagttcttgtcaaagaggtacagagacttcaactggccttggaagagcaaactgaaatggcaaatcatagccaacagcagtgtgataggctaagaaatgaacggatcttgtgtcgaatttgctttgaaagagacatatgcattgttatgcttccctgccgccatcatgttctctgcgagccatgctctaacaagtgtcagtcatgcccaatttgccgattgaccgttgagggcaggctatttgtttatgatgcagtgatgtcatccaatccatcatgttacgcagtttaaaagtgcacatgttgacagtatttgtagggtacctacttctggtgttgacaaagatggcccacacctgtttcctggcagtgaatgacaggttgtgaaattcttggtatgaaattaggaagaaagctaagaaagtcttctattatcagattgcagcacaaacaaaacaaaagccacgatgcacatccgtctccaatgatatgacacagaggaagacgaagtatatggactcttgctcatatatatgcaagcgtgaataaccacttaaataactgagtttgttctctagccatatatgacatctggccagtttcgattagtttgcaaacgagttctggttaacagttggatggataaccttgcaaacatgtggagcttcaggttgtttagaagttatttggagttcagcaaattggcaatatcccactgttcaactttgatgattccatgaattcacacaactgaggtaccaccttttccagtgatgttcacctgtaacggcttataaatacatctgtacagatgcgataataatgtctatcaattttatctccaaggcataagagcattgagctttctcctagtcatgtgaaacactgagatagcttgagcatatctattgtatgcagtggcggaggatgggcaaaaaataaggtgttgctaatgcaaccacacatgaaaattcacaacataa

SEQ ID NO: 22478 - DNA, 374 bp, Zea Mays
gccccttttcttctcctttaaatcccccatgccccctctccaaccagccatttcctctccctccctctccccacgccactctccctactccctccctctctctctatctccctctctctagctccccatgcagcagcagcccctcctcccttggagctggcgaccagccctcccaagctccactctcaccttggcaagctctcccatggcgtctccccctcctctacggcagtaagatgaccgagagatgatgatcgagccagtgatgtggtgccaaccacaagacgcagttggtggacgacctgaagaatggacttaaccagtggatactcgccgagcgagtaccctccccagcaaacactacttaattgtta

SEQ ID NO: 22479 - DNA, 818 bp, Zea Mays
gggtcagcaaagaatttgccgccttcatgcacttcgacgttacctccaggaacgtgctttttcccccagaacgaggtgaaacagatacagacacctctgttcatcctcaacgcagcatatgattcatggtaaggaacattttggtgccaggagtagctgaccctcatggaaaatggcatagctgtaagcatgatatagaccagtgctctgcatcgcagctacgggtattgcagggattcaggggtgattttctgaaggaagtggcagaactagggaactccgactcgagagggttgttcataaactcatgcttcgtgcactgccagtctgagatacaggagctatggttctcatctgactcccccgtgctcggaaacacaacagtagcaaacgctgttggcgactggttcttcgaccgcagctccttccagaagatagactgcccatacccttgtgactcgacctgtcacaatcggatctacgatgactcatcacaagcatagcaattacagtggcctcacttcgtactgccattcaccatgttattacatttgacgcttccagcattgctaacagtagggcaatgcgttgatagccattgattttttttttctttttacgaataagatcaggtgccggcggctttaactcggttgctaccggaaagtgagcgtgcatcttccgacggtacatggcatggtttatctggatggatgaatcgataatcataaattcttaaaaacacaataaatattctagaatttttatgttgtgcaaccgtgacttattttctctttgtattagtcatctatttatat

SEQ ID NO: 22480 - DNA, 171 bp, Zea Mays
gtggtggagaggagagatcgagaatggcgtatgtgcatgcacgtgccctgcttctccagcgtggtccttctcactcatatatatacacatatatctcgacctctcgtcacctcatctcatactcgctcgtcgtcgggaactcggaacggtgtggcagtagtggagggagga

SEQ ID NO: 22481 - DNA, 2290 bp, Zea Mays
attaatcctaggcaggcaaagctcgttttttcttgtgcgccggttgattgggctctctgtttgcggagtcttgctctccctctggtcggttttcgttgatccctcctgcattggtttgctccggctcagatccgattctctaggaagagagaccaaagtatcaagtggaacaacagaattttaggtactgccgtgccgctcaacaagggaagagcaagagctccagtctctgtctcacttattatgatcctctatgaaccataccctgcaacagatttcattccaaacggggcataatcattgaagaccagttaaggggggcagtgagaagggatggcggtggagttggccaagcaattgcttgcggttattggaagctatacaccacctctctgggctaccctcatcgccggggtttttgttatcatctccgtctcgctgtccctgtacttgctgttcaatcatctgtcagcctacaaaaacccagaggaacagaagtttcttgtcggcgtcattctcatggtgccgtgctatgcagtcgagtcggtggtgaagataggacaattgaatttttgaatagggaaggtggttcaggttctgctgcaccacttttaggacaagcatctgaacaacgatacgtaaaccatccttttccaatgaactacgtgcttaaaccgtggccgctaggcgaatggttctacttggtcatcaaatttgggctagttcagtatatgataataaaatcaatatgtgctattcttgcggtgattcttgaatcctttggagtgtattgtgaaggagagtttaagttgaactgtgggtactcttacacggccgtggttctcaatttcagtcagtcatgggccttatactgtctcgtccagttctacaccgtgataaaggatgagttagctcatataaagcctcttgcgaagtttctgacattcaagtccattgtgttcttaacatggtggcaaggtatagcaatcgcattgctcttcaactggggtttgttgagaggtcctatcgctcaagaactgcagttcaagtcaagtatccaagacttcattatctgcatagagatgggtgttgctgccgttgcccacctgtatgtcttccctgcgaagccgtacgagctgatcggtgatcgtcttgttggagatgtttctgttcttggagactacgcttctgtcgactgccctctagatccagacgaggtcaaggatagcgagcgcccaaccaagttcaggcttccccagccagatgatcatgtccggtgttccactgccataaaagaaagcgttcgcgatgtcgtacttggaggcggtgaatatatcgtgaatgacttgaagttcactgtgaaccacgcggtggaacccatcaatgagaagctgcacatgatatccgagaacataaaaaagcgcgagaagggaaagaagaaaacaaatgacgatagctgcatcggttcacccacatccttgaccagggtcatcagtgggattgatgatcccctcctgaacgggagcctgagtgacaacagtggcccaaagaaagcgcgaaggcagcacaggaaatcaggctatgcaggcgcggagagcggcggagagagcagcgaccatggcctaggtgggtttgagatccgagggaacagatggattactagctagggagtgacaactaagagcaacctgtggagatgctatacaaatgtcacaggagttagcctagccagtgggttcaagtgtaggatgaggtatctggcatgatgttgtagcatgggcaaatcgagatgagtgagcaatcaggttgttgtctgttgattcttttagctgagcgcctgagctgctgaggccttgatcctgtatttaagatgtcaggccttgattctttcagcaagcgttggaaggaaggaagcaatgtgcctgttctgagctcccgtcagcatcacttgtaaagttcttataagtacagactagaactagtcatgcatacaagagaatagacagtcgatgtttctatctgtttttgtttcattctaaggcccttgtcacacgagcaccagaattttttttctttccttttggtaccatgatggtgatggacgtgagagttccttgagatgatcaaagcatctatctttccaattccatgtgtatcctgataactgaagatgatcgtttggttttccttttggtacgcaacatgccaagtgcaggatgaactctgccctgcaagaaaaaccacaggcaagtttgtccgattaacaactatctgcacaggtcataaaaag

SEQ ID NO: 22482 - DNA, 3461 bp, Zea Mays
atttcagtttggaactgaactgggaatgacgtggccgaggacaaaagcaaattgacaccttctccgttcccgacgactcccgtgagcgtggagaggcgactaggcgaggccatggcctccggcatcggctccggccagcagcaacccccaggtaccttccgcgtcctcctcttgctgctcgattggattccaatttttagaccgaccaaactagaattaggtaggttcagcagttagattggatgccctagcagcgccggcggcagatgctgacccgggagccgtcggcgacaagctcgtcttcgaagcgccgcctcagcccgtgagggaggactacgtccagaacgccgtcaagtttctctcccaccccaaggtcaggggctcccccgtcgtctacaggcgatccttcctcgagaagaagggccttagcaccgaggagatcgacgaggccttccgaagggttcctgatcctcaacccagcactacggctaccacttctccgcagcagcaggtcaacagccagaatcaatccgtcggggtgcaagcttatgcgccagcacaacctgtgcacccagcaaacgctggccctgtcgtccttccaacgcagcccaggtttagctggtaccaagcattcctggctgcagggctcttgcttggttttggtgctagcgctgctgtctttatcaaggtatttctcatctctgaatgttcgcaatccttcctgcacactaactggggtgtctttatttccatgttagaaactgttccttcctaggctcaagtcttggatccgcaatgttgtagcagaaggtaatggcactgaaggcaaccagcttaagcctaggattgatgatgaaacggctgatgctgtaaaggcttctgcttcggctgtttctgctattgccaaaacaaaccaacaactgcttgcttcaaaggatgaaggtttcaatctctaccgtccgtttcgctgcttctttcttgccaatggttcaactcactccaataatgtcattctgtttttgttagcagaaaagaagatactagtgacgttgacacaagctctagattcccaagccaaggagttaaaatccttgaccgattcaatcggtcataccagggaacccataaatattaccagggatgataggttttctcagtaccgcccactggaagaccatgcccctactgttataaggaatggggcaattaacagttcatggagagcctctcagcaaactaacatgtatggtgtgtcaaatggcgactttggttccggttcgtaccttttgtgaatatctttttccttgtttgccatacaagtctgctgttttctttttgctttacctatgttggactctgtttagcagtgaggtcttcatttgcgccagcacctgctgaacctacagctggatcattttcaagatcctatggcgaggtaagctgcttgactggtttatattgacatacccagcaaatcacaagacctgagattggtacccagtggatacctagttaaaagatgggaaactaattgacatcaatgtacatctgtcgagctagttggattcacttggtgcagtctgaattgcagtattgcacattcactttaactaaccttcgggcagctagtatttgctggcagccatccttctttcatgcttatgaacagcttacatctgaggaccagttatagaaaatatcgaatttcccaaaacagctagatatggttgtgtaccgaagggaattctttgcaaatctactataacaatccgtcgcttctgtatgtttttgtacatacattatctgaccaggatctgcaaactctggaatgattgtgtttttaatagtgtcactccttgtgtgagtgttgtagtgtggctagtggaagaagaggaactcttgtggtgtgctgcgggtgctcatcacctcgcttctctagaggccttcctgttcttgctcatggtcatgttgctagtgtcttgcatagtgtgtaatcttagtgaactgtgttgcttgtgtgtgtgtgtgtgttgtgtgcattggttcgtgtgcgtagttatgcagccgtgtcttttttctctcttcaatgaaaatgaaagctctcctgcatgtccgaggaacaactgaccattaactaataaggttataatagctgagctttaaaagatacggcattcctttcaaactaactacatagaggctcatattcttgacaaagctagttcttttagtatatattggttattacttcttctcagtatacatgttgctcaatctccaaatacatgtatttgtgatatgtacatattttgttctatggtgttctttattgatcagtcatcagttgaaaggtattcagctctaccatggtgtaaccgatttctataatcctgtggaacttctagctaaaatgctaaatatatgaacctgcattattgataaatatcttacatatttgagttcttgacaacacacgcatctataactgtaattcataacatcagctgttttgttgtcttccatttagcttataagttttcactgaaagcatgtggcctactataacttgaactactagcctgattgtatctgtgtgcttttagcagccgatgtccactgcacaacgaagcgataggtcttctggcagtaagccatgggagatgcattcgtattcacaacagaggcctggttatggatccaactcccagttgagtgatgatggatcatactctgatgcccaggacagctatgctccttcctatcaccagaatggaaaggcccctgattttcaagcggatgaacctaggcctttgacttacaacactggggttgaggaaagaccgccaccgcagcgccgctgggtgccccctcagcctccaggtgttgcgatgccagaagcagcagctgccatacgtcaaccaaaggcccttccaaagcagccctccagcgatgcctctgaggcagctggtgagatgcaggtgaatggttcaagtgcatcggatgctgtgactgaggttcctgttaatggtgctactgcaagcgatgctggacgcagtgagatccaagaacaatcagtggcggcctaagtgaaaccaagaccagctaagaactgggaagcaatctaagagagattcaggatctctagtacatctggggggtttgtcatacatctctgaataacgtctgtatcagaacagcggggcaaccacgccgatgggtacccgtaataatgcaataagtagcagatagtttctgcatttagattaatgctacttgtacacaggagaacatatcaataatatttttttggctgttcgattgagggtgcttaaaaagtgtgcttgtgaattgttgtattttgatcttgatcttgtgatgactagcaatcgcaatggaccaaatggagatggtcgtttgttttcttgttgctgtctcgctttattccattcaggtgttgtttt

SEQ ID NO: 22483 - DNA, 66 bp, Zea Mays
cactcccaacgctccagctcatatggtttccatagaatttattagactgccatgtcagttttttga

SEQ ID NO: 22484 - DNA, 1579 bp, Zea Mays
tctcccgccactacttctccatagctaagatctgtccggaccctgagacgccgccgtcgtcccgtggagcggagccacacgttgtccttccttcgccccgcccttctcggtcgcggctggttgcctgttccctctccgcgccatacggccatacccagagcaagtaggtcgtcaagtaagtccgacgacgagagaaacagccgccgctcggcctcatcatatggcggccgccgccccggttgcgtccgggagcggccgcctcagccgcccgcgcccgccccgtgtggggctgcgcggcgcgcgggtcgccgccgcggcgcaggggccgtcctgcctctacgtggggccaatcgagaccgccagccaggagaagctcgaggcgctctaccaccaggccagggattcttactacagtggtcagccattgatcatcgatgacatgttcgacaaagtcgagcttaagctccggctttatggctccaaatccgtcgtcaaatacccccgttgtagcctcataaggcattcaacctacgccgacgccgagggcaggaggaccaatcgatgttcatggcgttatcaagcatctggatgctgctcctcctgtttggtacctctgcagttcttgttcctactctgtacactctgagcatcgcgttcggggatgtgtttggggcaaggcaccttctgtacggtgaaaagtccctcgatgcggtaacaagagttaacgacttggctttggttggattggggtatctggttggttatcccatcgcatctgcgtccgttggcgcgctgcaaggcttattgtcaaacaatttggttgccctaaaagggtcctgcccaaattgtggcgagcaggtatttgcatttgtcaagattgaaaaaaccgtgagagcacctcatcgagcagaatgccatgtctgtcagtgccctttggagtaccgcacgaaaattgagaaatcttcgtcagggcctagaagaagttgggtctacggccgggtttatctagtgaagcaagggcatcctgaaacggaaatggataaatgaaaaattctaattgattgagactgctgagggaagtttagataatcccatgagatggcactcttctggtcgactgaaacatttttcagatgccacttattttgatcagaagggcttactgtgtacgaatcatttgaaagatttgatccagccaagtgctttgtaatacagatacatttctgagatgtccagacgctgcagatgaaccccatgctgcattgtattcttttctgttttctctttagatgaatccatgatacagtttggatgaagaactactgaagaggctacgaaggtgccattgctatcaggagggagggtcactgaaaggctcacaggagggagggtcactgaaaggctcacactctgcaccaaacatgtttaatcatttgatcaaagatgcccacactcagcatgtatacagacttgctcaaatgtgatgtgttatacaagtgtgtgtgtgtgtatatatgaagttttcagctttattgtatgtatgttttcagattaatttgcctgaatctggaacccgtct

SEQ ID NO: 22485 - DNA, 1873 bp, Zea Mays
taaaattcgctcccatgggcagtcgaactcaggacactgaggagtgctactcagaccacaaccaaaaccaaattatggtcgtatggctgaaatactcgttcggagggcaggctctactgatgaattcactcggttgacatctatcacatggatcaacgagtttgtgaagcttggtggggaacaacttgttccctactatgcagatatattgggcgctgtcttaccatgcatatctgacgaggaggagaaaatccgagtggttgcacgcgaaacaaatgaggaactccgtgctataaaagctgatccagctgagggatttgatatcggagcaattctttcaatcgcaaaaagagaattgaacagtgaacatgaggccactcgaatcgaagcattgcattggttcttcactttgctggatcgatattgtgctgagttcttggcttacctgaacgatatttttgatccactcctaaatgcactttctgatccttcggacgcggttgtcctattagtattggaggttcatgcacgcatagctgaagaatctcaccacttccatcatcttgtatcctacctgatccgcaccttccacaacaaccattttgtactggagaaacgtggtgctttgatagtccgtcggctctgtgttcttctaggtgctgaaaaagtatatcgagagttctccactattcttgagagtgaagttgatcttgatttcgcatccgtcatggttcaggttttgaatttgattttgctcacatcaactgaacttggtgagctccgctctcctcttaagaagtcgttagtggattcttgtggcaaggacttgtttcagtctttatatgcttcatggcgccactctccgatggctacgataagtttatgtttacttgctcaggcatacaatcacgcaagctgtgttattcagtcactgggagaagaagacataaatgtgaattttttggttcaattagataaattgatccgtctcttagagactccagtatttgcttacttgcgtttacagcttctcgagcctggaaaacacacttggcttctgaaaactctttacggtctcctgatgcttttgcctcagcaaagtgcggccttcaagatcttgaggactcgactgaagactgtgccattcagtgaaaatcttaagcgcacatcttcagcgaatccatactctcagattctgcaagtgacggaagatggcaatagaaaccaagatatgcagaactacagtgcaatcaatttcccattccttctccagcaatttgagaacatgcagctgcagcatcgtaaccatttgaaggatcaactgcaatcccgtaaatctgcttcgactttaacattatctcaggagatacaaagatacgaagaagcgcattcctcatcgctgtcagagattaacaggcccccttcaagaacatccaaaggcattttatgatgcatttgttcttgcgatgtatgatatatttgccggaagcatcaccacatatatgttggggctttggttagtctcctcgttttttttcaaaggaggttgcatagggtacatagtgtaatcttttctatttcgttcctagattttgtcaagagatggcaattatttgttggagaaagctcgttgccacattctagtcattcttttcttagtggtttcactgctcatctggtttctgtaatttttcaattgaaggccaaatgagcaaagtagtaattggagatagaaatatgttactactgtcctatctatcgatctccaataaattagcgttgcaatgtaaattcctgttggctcgtatgatatatttattatattatttatatgccttatctttacccccattttatattattacaatatcgc

SEQ ID NO: 22486 - DNA, 2220 bp, Zea Mays
gtcacccgcccccgccctagctcacacgccaagccccagtacaaacaaagcctacggaatttcccccagctccaattcgcgctgttcgttccctttcagccagtcagtcgccgcctccgctgaactgcaagtccaaactagctagctcactgggcaccgatttcccctaaaattttcgctgcttccaggaggccgcggcgaccatgggcaactgctgcgccgcgccgtcgacggagggaagcggcaagacccgccccaagaagcagaaggagaacccctacaacgtcgcctacaaccgcggcgcggcggcgccgccgccgcccccggcgcgcccgggcctggtggtgctgcgggacccgacggggcgggacctcggcgcggagtacgagctgggcggcgagctggggcgcggcgagttcggcgtcacgtacctgtgcacggagcccgccacgggggcgcgctacgcgtgcaagtccatatccaagcgcaagctgcgcacgcccgtggacgtggaggacgtgcgccgggaggtggacatcatgcgccacatgccgccgcaccccaacatcgtcagcctccgcgccgcctacgaggaccgagacgccgtgcacctcgtcatggagctctgcgagggaggggagctcttcgacaggatcgtcgcccgcgggcactacaccgagcgcgccgccgccgccgtcatgcgaaccatcgttgaggtcgtccagaagtgccacaggcatggcgtcatgcaccgggatcttaaaccagagaactttttatatgcaagcaaggacagttcccctctaaaagcaattgattttggcctgtctgtgttcttcaggcctggcagtccatactacatggccccagaggttctgaagcgaaactatggccctgaagttgatgtctggagtgctggagtgatactttacatacttctttgtggtgtaccaccattttgggcagaaaccgaacagggagtagcgcaggcaatcatacgatctgtggtagatttcaaaagagaaccatggcccagagtatctgagcctgctaaagatcttgtcaggcgcatgcttgacccaaatccattgacacggtttactgcagcacaagtacttgagcatccatggctacatgactctaaaaacacgccagacgtttctcttggcgatactgtccgagcaagactgcagcaatttgctgcgatgaacaagttaaagaagaaagcactaagggtgattgctgagcatctgtctgcggaggaagtagctgacataaagcaaatgttcgataagatggacgtgaacaagaacggcaagctaacattcgaggaattcaaggccggcctccgtaagctgggaaaccaaatgcatgattcagaccttcagatactgatggatgctgccgacgtcgacagaaacgggaccttagattacgaggaattcgtcacggtgtctgtccacgtgaggaagataggcaacgacgaacacatccagaaggccttcgcatacttcgaccggaataagagtgggtacatagagatcgaggagcttagagaggcactggctgatgaactggatggcagtgatgaagacatcatcggtggcatcatccgggacgtggacacagataaggacgggaagataggctacgacgagttcgcggcgatgatgaaggccggcactgactggaggaaggcctcccggcagtactcgcggcagcggttcagcaacctgagcctgaagctccagaaggacgggtccctcggcgccgacacacggtaggccgccgagtgtagtggtggtgctggtgttcgtccgtctctttgcttgcttgcttgttttgctgtgcggggtttttgttggttggtcagacagtcagtcaggtcattagattccacctccacgttctgtttccattacacggtgaaccctcagctggagctgtgattcttgggcttgtgattgtagaagaaagatgcacgtacaacgtacgtattgtagatgggtgcagcagcgtgtgctgacaaagaatgctggagtagcacaagacacgagtagtcttgctttgcttgtaacttgtaagtagaatttgttttgtgtgcttgcaatgcatgacgatggtgattgccctgcaaaaccgtgtgaatgcctgcacgcaagctgctcgcgtcgcgaccctcgctcttgctggctgtaaagaaggacggtgtggttttag

SEQ ID NO: 22487 - DNA, 883 bp, Zea Mays
cttgttccgagtggaacgaataggcctggtttggaatttggtacagcccattgaaattgttcgtttcggtccgaattgaaatcgtaaccggcctggattaaaatttcacttcaccccacggcccggaaccaacccttctgtcgtaccctctggatcgaagcctggacgacgcgaccgtgcggcggcgactcgacgcaaccagcacggcggcggcgcacagccccgacgacgactctccccactgccttctctccggtgtggccgccgccagtcgcctgcgtcgttgaagcagttgctgttgaggttgaggtcctcctgggggagacgcgcgacgcagccgaggcgcagcgcggtcaggttcgggtatggcctgcatagctactcccagaacttcgacgatggcgttgcctagtcagcccggcggccacggctagcttcttcagtacgtgtagctagctaggagtctaggatattcgtgtaactagctatggccaggatattagtgtggctttaattagtgctttttgtcctgatcactgagatttcagtccagtgtaaacttccgatgattatctgtgctctctagctggttcatccagttatattgtataaagaaattacttcatcttataattaggtttgcacaggaaagcaattattctatgcttgccatagatcaacgataagcagactgtgatttggtacgtcagctgttggaatggatggcttcgttgattttccagctgctcgatcgatctgcgtgttgacagatctgttgttgcaaaatgttgctttgttggaacagcagcctttcaacctatacatagtttgctttagtccgtagtaatttgctttagtccttattacttgtacttttcaatct

SEQ ID NO: 22488 - DNA, 1291 bp, Zea Mays
ggaagacccgacctgtatgagcagatacaaaataagtcattttgagactatttgggtgcatctaagcatacgacggaatctggcgtacccagtcggccaagctcctgcgagcgtggctcggcgtgctcaggcatccaatcaggattgttaactatatgttcactgattcacatgagcgacttgttttatgtgcatactggatatgtgtaatatatgtatcagttagaaggttctacagtatatcaaagcaaagcaagacagagaggattcttttgcgcaagtattatcatcttgtcgctgttctcattttctctcctgcagttatatttcagcctgctttcttggacttggcatttggtgcagcatttgcagttttcttgatattggagatgttacgaatttgggaaatataccctcttggacgtgttgtgcatcagtttatgaacgcctttactgatcatcgtgattctgagattcttattgtcagccatttttcactcttactgggctgtgcacttccgaaatggatgtcatctggattaaatgaccgaccacttgccccttttgccggaattctcagcttggggataggtgataccatggcatcaatgatagggtacaagtatggcgtgttaagatggagcaagacaggaaagaaaacaatcgagggcacggcagcgggcataacatcggtgctagcagcctgctcgatcctggtgtcactcttggcttccagtgggtacattctttcgcagaattggctatcgctcctgatagctgtcacattgagcgggttattggaggcatacactgcacagctggacaatgccttcatccccctcgtgttctatagtcttctgtgtctataagggtagcatcctgtacatctaactgaccttgatatcctctttttgtttacacgctattagtatatacgtagtgcaatatgttatttcgacattactcacttggtctcctcggcgcatcaactgcctggtgattcagttcaacagatcacattctgtgtaaccctgcctttcggaagttgagaggacgtgctcatggttgagacagtcggtacaggcatatgaccagaagtagaaaaataaaatgttctccagtcgttcagtagagggtgtttttggcggagctgggcagttggatgctgtacataaagttttttttatatgaacctgttgactgttgttgggacgaacagtattgaaacatgctgtgatgctgatcaatttgatcactctatttgctctttctatccatttttaaatacctc

SEQ ID NO: 22489 - DNA, 520 bp, Zea Mays
gggaagcctatggcactgggtgcgttatgttcagcgctataacgagcaacaatgcttaatgaggaagagttttgcaaacactgtgcctgttggatcgaatcggtattgggaaaattttgttttcttctgccatcttgtgtagtcctttggaggaggcttgtacgagccagttcatactgattactggatcggatatcttgtttttcttttccaaaggaaaggtcttgcatattttctttgcaaggccactacactagaatcatgagttctgacgaaaagccctctgcagattgtatcctgttccgcgtgccatttgtagatgccccaccctttaccattcttttttctgacagacactgccattgttggagtgacagaaatcaatagcaattcgggagattactttgctccagaatacatttatgcgtaatgcgtgtcttcagacctgttgccatggttgtgattttttgacacatacataatgatgccctcttgaagtcaagaatctgccatgtacact

SEQ ID NO: 22490 - DNA, 1090 bp, Zea Mays
ggaaaagtttccgtttccctgctcgagccgctcccccgtcctcttccttcctctcgagtagcctgccctcgcaaaaccctaaccctagctgcggacgccgtcgccgcctccgcgcccaaccgatgtctgattctgaggcgtccccaccgcccactccggccgccgcaacgcccgcagcgctggtggagacctccccgtcctcggcgaggaaggaagaactgctgcctgtggaggaaaagatctcggaattaagtgaatcacaatcagagcttctagggaggctccgtgggcttaaggaggatttgctgagttggaggagtaatttagactcccaagtgacgaaatacaaagtggaactctctgacatcaagagtgcactcaataatgaaatagagcagcttcgctcagatttccaagagctgaggaccacccttaagaagcagcaggaagatgtgtcacttagcttgaagaatttggggcttcaagatgctaccgaaaatgatgggaacaaaggaaatggagacggcacaaatgaggtcttgtcagctaacttggggaacttgaaactggatggttcttctgaaaactatgatgaaagcagagagtcaaaggaggacaaggaaaacaccgacactgctggtgatggcatcgtcgacaaagctactaaggagacgagctcaactgatgaacaattctaacacaggaaactgaactacactgttcgtgtctcagctgtagaaattctaggaacatcgatacatgagttcctgtaagagagcgagtccatgctttgctatggctcagtcgggttggttatggaactctattgggacctgtgagtcgtgaggatccaaatctcctctagaattgtgtaccaattgaaagttacgatatggtatcatggacatttgctcacctgaatgcatttcagctggtttgtcgtttgcaatatccaagcctccaaggccatgattttattagacctacttgaaatggcggtaggtgatgtactgatgtggattttgtacgaggaatagtggaataaggtattctggtgggtttgttgttggtcacaagatgccagtccggc

SEQ ID NO: 22491 - DNA, 1061 bp, Zea Mays
tggggatgggtaagctctaagctgctggagatagcctaacaaacaaatgaaatgagatggtacagtaacagtgtagaggtgtgaggtgtctgacaagaatgatctgttttttttacctaagacatgcttgaaaagtccgctgcttttgtaagtatgttcccttaggtttactttatctgctacatgcaaaaacaagggcaggcaccattcgattcatctgcagtggacaatatgaggaggcttctggagcatgctggtgttcctgggcacatatatccactatcattgctgtgctatgaggttatgcctccaccacaacaggttgagaaggagattggtgagcagagggtgatatccttccatggagcaggcttgtcagtaactgaagaaataaactatggagacattactgctcataccaagaatgctgatgagggaagggagctattcacaaataccttgtacaactcagttgttaaccagtacaatgtgctcaaatctgctatctttagagatcgtggagcagctgtatcaaacaatgtcatctcactgtcacaaccatggcgatgaatgtgaactatcattgtgcaattttgctgggagaaactcttgaacttaaatctttttgatatcactagacttcatcaatcatggtggagcctgttattgtcatgcagatgctcgctaagaagtctgcaactgttggttggtcaagggtgattggcgattttgcacatacggatccgcagttactgctgcctcaggttgctcagcaatgtgctgctggttgggcaccgaggaatccatcaggttgcatcctttttgcccggacgtcgatttgtgcagttgaagtggtaaacgtttttttatcttgtttcgtcatcatgtatatacgtaggcttgagtcattgttggctccacattttttggagatataaatgcggtaggagttatgagatgtccacagtcggccctcccttgttgaattcctttggatgtatcctctctctttcgtacatgcactcactgaaagtcaatgcaaatatctcgtgtttctagta

SEQ ID NO: 22492 - DNA, 902 bp, Zea Mays
tagcctgccactgaattattgtccttgcaatgctacgattggtattgatttcctgtcaaagacaatgtaccttgaagatagaactgtgagactccaactctgggatactgctggtcaggaaagattcaggagtttaattccaagctatattagagactcttcagttgctgtcattgtattcgatgttgcaagcaggcagtccttcttaaatacatctaagtggatagaggaagttcgcactgagaggggcagtgatgttatcattgtgcttgttgggaacaaaactgaccttgttgacaagaggcaagtctcaatagaggaaggggagggcaaggcgaaggaccttggagtcatgtttattgaaaccagtgctaaggctgggtttaacattaaggcgctgttccgtaaaattgctgctgcacttcctggaatggagacgctctcatcagcgaaacaggaagacatggttgatgtgaacttgagaaggcgttatcactgatgcttctctcgggaagaagagttgattgcctctcgccagtgaacacaccatagtctttacccggtgaatggaccgtttgcattggaacgatacgttttatgagttttctgttatttcctcagtggcctaagctagcaacagtgtatagttgggttgacacttcaaacttctaccattcgagttgggtattagaactagttattattggttcatgttgaacttatatatatttccatccttttgcagttagtttgagtcgtatttgctgtgtaccaaacatgtattgcaaatttggaatttttgtaagctataataaggccagcacggcaatatccccacatgataaccccgaaatttgtatcgttcaaagttcaaaccatggtatcctaattcaaaaattttg

SEQ ID NO: 22493 - DNA, 1933 bp, Zea Mays
cacgagtgacggcagcataggctgatccgcaacagatccgcatatccttcctcccttccgtatccgccgatcaaccggccacaaaaactctctcacttacatttgcgggcccattgaacgtgcggcccactttcattgagagacgaacacgcgagtagagaatttctcctgcctgctcacgaccgccctctcgccggtcgccggtcgccgctcgcaacgcaagtcggaagaggaatctctccaagctccaatcctccgatcctgccccaacccaagtcccctccaccaggccgcacacctccgccgcccggcgcgaccttgcatccaccagcctgccctctccttcgcgtgaggcggccccggcgaccgcgtcggcagtgcaagaccagaccgaggcttctcccgttggaaggttccagccatggcgagcgccgatctgctgcggaaggaggaggagttctactcctccctctttgattccgcaaaaggcgacggcgtcaagtcgcgctcgcaggtgattgagaggaagattgaatccctcgaggacatggccaccaaggtcagcaaccggagatcaagaagatggttgaacgaccgcttgctgattgagcttgtcccacgccttcatgttgaagaaatcaaaggcctctttgctcctccaccatggggtgaggagctgcccttgtcagcattctgcaggacaagtgttagtgactgggaggccttcaggagcatcgacatggatgctgaggcaagattgatgcaacacatgaaacgatcatccgaaaaacaaaggactcatgtcgacgaagatgaattgattgctctgaatgcttggcgtcgtataggtcgccaaacaagagaagctattaagaaaaaatttctacctgatctacttcaaatatatgaagtattgccttctttgctttagtttaaccccctctttttccataaaaaccaggctcattctcttcatctcctccacaattgattgaagtgataatatttgatgaaagctaatctgtttttcttgcaaacaagacatgagagttcttggttatgtatttatatatatctgaatctgctatctttctcgcacatgctaattcatcatgcataccacatctaatttgttatttgtagtttcaagcctcaatattatgcgaagtctatgagacaggataaattttattgaatagctttctaaatttacagtatcgacaatatcaatttagtgctatgcttataaaagcaaagatgtcgttgttatgacttatatctgtatgatgcctaggttttgtttggaaaataatgttcagaaaaggtgcattgtgggtctctttgtctgctgcccttgtttccaccttgtgtaaatatttttcctgtcttcaaaagttggcatcagttttgcagttttcttatgccactgctaacaacttctcttccagtctatttgacttggcgtgtcagttgtttatactatcagcttttgcgtttcatgtttgcaggaacaggttagggccttcattgaaggtactggtgacagcgacgtgcttgtgctgaatgtccaggacccgttccagaggctgcttctgcacggtgtttgtgagttctataacgtaacctcaatgaccacaagcagtgtaagggacgggaagccatggaagagcaccaccatcaagaagaggcatgtcaccggtcttcctccgagaatcacattagttagcttcctgaggatgaggaagaattagtcgtcccagtaacatgtggatgtgagggtcctacactaattcgcctggatgtgtactaaaaagacaaatttgttgctttaggtcgcatctagcatgtaatcaaatgtaaaatatccatgtcaaatgtaaaatacattgcaagaccttgttccagatgaagaaactcaaaaaaaaaaaaaaag

SEQ ID NO: 22494 - DNA, 135 bp, Zea Mays
gggctgagctctgcgtcggttctgatggacatggacccatgatagctgagcctgaggaaaggatactgggccgtggaatggattcgggatagtagtgcgatgcaattttaatcgaaagtactggtgtctgtgtat

SEQ ID NO: 22495 - DNA, 2689 bp, Zea Mays
caggtcccaggcgcccctcacactctgctcatctctgcttcgaacgttcacggagacacgaggctggaggctgcagcgctaaccctagccggcgtcggcggtggcggccagcgggaggggagctgccaaacgcctaaccctaacggctgcaggcggctgggcgcaaggcatccgtggccagcgtgccgcgcgcacgagcggacagttgcggcggcaggggcgcagggcgcgacctcggcgcggtgggcgcgggcgcaccgctgagcaggctgtagggggaggtgggattggattttttttgacgtggaagttggaatactcaagttggaaattctgctcctccactgccgccgccgctcgccacgtgctcgggtctagactcgtcggtttattcgccaggtcttcgttgtgcccttcgccggcgaccagcacgcaccagggcaaaggaggaaagattgaaggagaaaaaggaaggagggatactggatggtaatgacggggcttctgagatactgtcttgggtgggaaagagtcgtaaacttgatgaaaaaagacaagctgaaaaggagaaagcattacgtcttgcacgagcactggaagaacaggataatatcttggcagaaaatggcgatgacgatgatgacgataaagaggaagatacacaagtgggagatcacttatctggtgtcaaggtgcttcatggccttgataaggttttggaaggtggtgcagttgtcatgactctcaaagatcagagtattcttgccaatggggatatcaatgaagacgctgacatgcttgagaacattgagattggtgagcagaaacaaagagatgaagcttataaggcttcaaagaagaaaggaacttatgatgacaagttcaacaatgattcatcgtcaaaaaagtcgatactgtcacattatgatgaccaaatggaagatgagggcgtgacccttgatgaaggtggacgtttcactggtgaagcagaaaagaagctggaagagcttcggaaaaggattgaaggtggttatgttcagaaaaagacagaagaccttacttccaccacaaagatatcaacagactattttacccctgatgaaatgcttaaatttaaaaaaccaaagaaaaagaaatccctgaggaagaaggagaagctggatctggatgcacttgaggcagaagcaattgcttctggattgggggccgctgatcgtgggtcgaggaatgatggaaagagacagtctgctagggaggaagaacaagcggctgatgctgaaaagagaagcagtggttatcaaactgccattgcaaaggctgaagaggcatcaagagcattgcgcggggagaaaactgcacctgctaaaccagctgaagaacttgttttcggtgatgattatgaagatctgcagaaatctctagagcaagcaagaaagttggccctaaggaagcaggaagaggcttcagcttctggtcctcgttccatagtcgaactggctactgcaaccaagagccaagaggaaacagaagccacagaaggagattcagaacagaataaggttgttatcacagagatggaggaatttgtgtggggactgcaattgaatcaaggaacacgcaagccagaagacgatgtgtttatggatgaagatgatgatgccatgccttcagataatgttgcaaaagatgacactaatgggttggcagagatggaagaggatgctctgacagaaataccagccaaggtcgaagaggatgaagtcaaaccagatgaggttatacatgaagttgcagtaggaaagggtttagctggtgctttaaagattcttaaggagcgaggaagcctcaacgagggaacagattggggaggcagaacaacagacaagaaaaagagcaagcttataggtgtcgaggatggacctaaagacattcgcattgaaagaatagatgaatttggcagagtgatgacacctaaggaggcattccgtcatctttcgcacaagtttcatggcaaggggcctggtaaaatgaaacaagaaaaacgccagaagaaatatcatgatgagctgaaaaccaagcatatgaaatcttctgacacaccattattggccgcggaaaagatgagagaggctcaatctcgtaatcaaacaccatacctcattttaagtggcaatgcaaaaacaggtcaaacaagtgatagcggcggctatgctaccttggagacagagcaacctgggagcctaacgcccatgcttggggacaaaaaggtcgagcattttttgggcatcaaacgaagtgccaagcctggaagcttacctcctccagtcccaaagaaaccgaagaactgaacctggtggtagcactcagccaacgaagcaggctacaacgcatttactgtgagcagcaatcagcccacaagcttccacggctcaaccccccgccgccgcactagaaatgcaatatcctctgtatttcttctaagctgattacactaacattctggcatgttcgatggggttttgtaattcagtgatatacgtgtgcatccttgatctgccttgaacatgtaagtgatggaactaaatattgttctaacgacacaccgtttccgtttgaataaagtgtagttatgatgtgacggtttaaggttaaagcagctgtgttcaagagctacattcgttctgaaaat

SEQ ID NO: 22496 - DNA, 4579 bp, Zea Mays
cggcgtcttccacctcctgacgtcccggcgctgaaaaattaaagccgacacgaggaaaaaggcaggcaggcaggcacgctcccgcacgaacttccgtcctactcccaacacctcctcgccgtctccaccggggcacggccccgctctgctcctcgctgtccccgatcccttctcttcagatctgccgcccatgccggctccccgctccggaccctagccgctagccgcccgggcccacccgccgcgcccccaaaatgggccgccccaggatgctcaccgccgccggtggcatcgaccccatcgccgaggagccccaccacgcgcgctcccccgccgatggcgggctcgggcccgacccggcggccctcgcctgcgcgatctctgccgaggccagcaccgtgctcgccgtcatgcgccggggcctccggcacccgcgtgccacggccgcggacgacgccgcggccgaacacccgctcgttgcctccctccgcgggctccgccgcctcgccttctcgccgtccccctcggccgccgccgcgctccccgccgccgcgctgcggcccttcctcgatgccgtccgctccgaggacgccggcgccgccgccacctccgcctcgctcgccgcgctccacgaggtcatgtccctcacgggccccgcgctcccgggcgccgcgctccgggaggtcgtcgacgccgtcgccagctgccggttcgaggccgggaccgagcccgccgccgaggaggccgtgctcatgaggatgctgcaggcgctcctcgcctgcctccgcgcgcccgccgcgcccgcgctcggggaccagcatgtctgcaccgccgtcaacacctgcttccgtgtcgtccaccaggccgcggccaagggcgagctcctgcagcgattctcgcgccacgtgatgcacgaactcatccgatgcatcttcgcacgcctcccgcagataggcggtgctgacggagttgacggtgctgtcaagccagagatgggtggcatggatatgaatcatccttttggtatcaaacaaatggaaaatggtaatggaagctatgtgtccgagacagattggcttagatgaagatcttcctttgtttgctcttaaattgatcaattcagcgatagagcttggtgggtcttcaattcagaaacatccaaagctgttgtccttggtgcaagatgagcttttcagaaacttaatgcagtttgggttgtcaatgagtccactcatcctttcaatagtatgcagtattgcattgaacctttaccatcatctccggactgagctgaagctgcagcttgaggcttttttttcttgtataattataaggcttgcacaacctcgttttggagcaacatatcatcagcaggaggttgcaatggaagctcttgtagacttctgtcgacagaaaaattttatggtggagatgtatgccaatcttgactgtgatataacctgcaggaatgtttttgaggagcttgcaaatcttctatcaaagagtgcttttcctatcaactgccccttatcttccatgcacattcttgctctagaaggtttgattgctgtgattcaggggatggctgatcgtatcgggaatgcagtctcacgccctgagctcctgcctgtggagcttgatgaatacactcctttctggactgttaagtggacccaaagaaaggtctggagtttcttcaaggcactcatctgttgcctgagaagcttgatccccagagtgtggcttgttttttccgctatacagctggtttggataagaatcttgttggagatttcctaggcaatcatgatgagttttgtgttcaggtgcttcatgagttcgctcagacctttgatttccaggagatgaacctggatacagctctgcgtctatttttggagactttccggcttcctggtgaatctcagaagatacagagggttcttgaggccttctcagacagatactatgagcagtcccctcagtctttcgcaaacaaggacactgctctactgctgtcatattccattataatgctgaacactgatcagcataacatgcaagtgaagaagaagatgactgaggacgacttcatcaagaacaatagaaacataaatgggggcagtgatctcccacgtgagatgttgtctgagctatatcactcaatctgccgaaatgagattaagacaacacctgagcagggtttgggatattttgaaatgtctcctagtcgttggatagatctaatgcggaagtcaaaatctacgtccccatatatcatcggtgactctcagcctttcctggaccatgatatgtttgctgttatgtctggccctactattgctgccattgcagtggtattcgatcattcggagcatgaagaagttcttttgacttgtatagaaggctttttgggtgttgcaaagatatctgcatttcatcatctcgaggatgttctggacgatcttgttgtttctctatgcaaattcacgactctcttgaatacttctttggttgaggagccagttactgcctttggagatgaccttaaagctaggttggcaactgagacattatttactatagctaacagatatggggattatatacgcaccggctggaggaatgtattggattgcatcctgaggctgcataaacttgggcttctccctgcccgtgttgctagtgatgcagctgatgattccgaacttcctgctgaagcagtccaacgaaaggctgctcctagttcagttcccccatctcatattccagtgatgggcacacctcgcaaatcatccggactcatgggaagatttagtcagctgctctctcttgacagtgaagaaccaagatcacaaccaactgagcagcaacttgccgctcaccagaggactcttcaaacaattcagaaatgccgcatcgatagtatatttacagagagcaaattcttgcagcctgattcactactgcaacttgccaaggctctgatttgggctgcaggccggcctcaaaaggttgccagttcgcctgatgacgaggatacagcagttttctgcttggagctgctgattgccataacccttaataatcgagacaggatcgtgctcctctggcaaggtgtatacgagcatattgccagcatagttcagtccacagttatgccgtgtgctctcgtggagaaagctatttttggactcctgaggatatgccagaggttgctaccatacaaggagaatcttgctgatgaattactgaggtcgttgcagttagttctcaagctcgacgcacgggtagcagatgcgtattgtgagaacatcacacaggaggttgcacggctcgtcaaagcaaatgcggcacatataaagtcacagatgggctggagaacagtaatattgctgctctccattacagcacgccatccagatgcttccgaagtcggttttgaggctatcgtgttcatcatgacagagggggctcacctttcactagcgaactatggcttctgcatcgatgcggcacggcagtttgccgagtctagagttggtttagctgataggtctgtccgtgccctggacttgatgtccgactccgtcagaaaccttgccttgtggtcccaagagataaaagcgacgacatttgaagaaggcgagaaagggccggaggcgataagggagatgtggctcaggctgctgcaagcactgaagaaactgagcctggatcagagggaggaggtgcgaaaccatgcgctggcttctctccagcgatgcctaacatccacgggagaactctgcctccagtccgcgacgtggtcccatgcctttgacctcgtcatattctccttgctcgatgatttgctggagatcagccagaaccactcccagaaggactacagaaacatggaagggtcacttgtgctcgccatgaagctggttgcgaaggtatacctccagctcttgccggaccttttcggcctaagcagtttctgcaagctgtggctgggggtcctgagccggatggagaagtacgtcaaggtcaaggtccgaggcaagcggagcgaccggctgcaggaggtggtcccggacctgctcaagaacatcctgctcgtgatgaagagcaagggcatccttgcgaagaggagcacgatcgggggcgacagcctgtgggagctgacgtggcttcacgcgaacaacatctcgaccagtctgctgcctgatgtttttccaagccaggagtacgagcaacagagcagcaccggtagcccaagagggcccagtcctgttgaggcgtagcggtcaatgttttaacttgtgtgcgaccgtgtgtgtatgttttatttgttttactaggtttactactgctcgtgccctaatccattgaaagtgtaaggtttcgatattgtgattgcgtttcgcctccacggcaagtactatagcatgtgccctaatccattgaaaaacatgcttatgtttctgtgaattatttagttactagtccataatcctatcagaatgctcatttttgctaggaagatgtcatgatgtacatctgaatataatataagaacagaacttcaacgggt

SEQ ID NO: 22497 - DNA, 610 bp, Zea Mays
ttttgactaattaacctgcctggaccgtcaaataaagagcatcagctggatcgataacatggaccccttcgtgatccttacctgccgcacccaagagcagaaaagcagcgtcgcaaatggagcaggaagcgagcccgaatggaacgagaccttcgtcttcaccgtctccgacgacaccccgcagctgcacctcaagatcatggacagcgacctcaccaacgacgatttcgtcggcgaagcaaccatccccctggaggccgtgtttcaggaaggcagccttcccccggcggttcacccggtcgtcaaggaggagaagtactgcggagaggtcaagctcgcgctcaccttcactccagcagcggaaactcgccgccctgatgacaacgaggaggggccgccttacagcagctggagttgatctatctgccatgggatgcatgcatcatatatatccaccaagagaagagaggataattaattaatctactcaagagaagaatcagtgttgctgttatgcgaccctctatctatctatatatatgtgcttaatttgtcatgaacgactgccaatataaaataaactattcagagttgtttgcacgtaactccg

SEQ ID NO: 22498 - DNA, 1341 bp, Zea Mays
attctgaagctgatcgccagaaacagaaaccgaataaaggattattaaaagcaacaacgatcaggaaaaggaaaatccagagtgaagaagctggtatcgtttcttcagcattaaaacttaagacgcaggccttatgatccctgctggaaacaaacgctcatccagcaactatctttcagatttctatacttcgttcgtggaagtccccttatttaagtaacttatgtcaaatggctgagctttcccttacagttgcccagttatcctaaccattttaacgagccatagatagccagtaaccacttcagcacagaagacatgcaggtaccccaaggcatgtatgcatatgctcagttcaattgttggtagagtggttgggctcaatttggctgtgcaaaagctagcgcaatgaaccccagccaacctggcctttctgcttttgaatagcaagtatattggagcggctgtgcttttggaaagaaacccattcgttaaagcttttgttggctctcctgacatagacatgttaatgatcaattgccccgcattttgcaaaaaactgtctcattgtgctaaaactggctcgtttggtaagacatgttaatgatcaattgcctatccccaacttgctgttgtacactgtacatgaacctggttttctttcaaacatatatatgtttttttgtttttgagaaacttcttgcatataaagctacacttttactgaagagacgagacatgcttctcactggcaagtgtggaacttccatcgcaggttaaacatgaagacaatgatctcttcccaaagaatggtaccggcgctgttatcagggaaggcaacattctgaagatgcagcgcaagcagaagccatgcactcccctcccctccaacaagcagagtcggtactaccggcctcgggtcaaggggaggtttgtcagcaaggcttgtttcctccagcgacagcaagcgttagagaaggagagctagagaaagatggatcctgctccaaggcgcatttctggggctctcttggagaagcagcagagcttctccgttttcatctctgcggcggtacagtgcggcagatgtagagatgcctgtagagtggtgcttgtgaacctcaattctcagtttcttctatccattccaggttcccatattgtggagggttcgaacgtgcctaaagtgaagacagaaaacaacaacagactcctagttcacacacaatacgttttcagagcccaggtcacgtacccagcactcgaaaagaaaaaaaacagtaacctccagcttcgttcgtcttcccgctgaccaccacccatcagctggttctcatcacc

SEQ ID NO: 22499 - DNA, 453 bp, Zea Mays
atatctctcgctcgccctttccccttcgatgcaactggtgtggcggcggcggctgcgggcggcgtgatacggcaccccctcctcccgcccccttatgcaagcgggcaatcagaactccgatcacccgcacgccggcacgccagtgtcgtcttcgcaaccatgaactccatcgagcctttcaaccggctggtgaggctggcggcccgcgccttctacgacgacgtctccatgaagggcgacaaccagcccaagacttcccgcggggacaaccgcggcatggccgtcgtcgtcctggacgcgctcaccagtcagcaaaaaacgcaaaagcacataatgctgcagctgctaatgatggtcaaccaattgctaaggagggagaagagaaagtaaagctgcacacacattcatactgttgcttggattatgctcagtagtgccaaagccacatctcat

SEQ ID NO: 22500 - DNA, 317 bp, Zea Mays
gaccccggataaaccacttacaaccaagatcgcaagattaagtaacacaaatcacacacaccaatagtttgcagcggaaatcttattaccaaattttacaagttacaaaaattttactttgtacatggtcggagtgattacaaaagtgattcaaagaaataactttgaactgatataaattatttatagttttgaaatatatgctagctcaagtgaccatcctcaataagaagataaagacggggtatacttatataagaaggccgagcccaccggcacttaacaccatcaacagcagcacaaaactataacctgaa

SEQ ID NO: 22501 - DNA, 1371 bp, Zea Mays
aaaatcttagtctgcaggagcaagcactagatgagcgtataagtgctttgtatcccattcagtgacatgcgtgaaaaactaagggggttaactgaagatgaaaataataaaaggtggctctatgtgactgaagacgacatcaagggattacccagctttcagaatgaaacactaattgctattaaagcacctcatggtactacacttgaagtacctgatccagatgaggcgggtgattatctccaaaggagatatagaattgtattaagaagtacgatgggaccaatagatgtttacttagttagtcaatttgatgagaaatttgaggaactgggtggtgttgcgacacccgtcaagcattccagtgtgcccagacatcaacccgcggaagatttcaatacttatgctggacaaagtagcacaccaatggacgtggcacatgatgtacagcatggccagaagattccccaggatcctagtgctttgcatgactttggagggatgacaaggattagtccttccgacgtccatacggattctgattactggctcctaacagagggggatgttagcatgactgatatgtggaaaacaggacgtatccttgatgatcatgcattaagatgcttgaatttcttaacatggaaaatagaagaagtgcagtgggaccagatggatttcctgtcagaagatgttgtcacccctcgagcccataatcagcagccggtcacagttgacgggccacatatggaggttccaagcatggacccataagacattaatggctcaacaaaactgacatctggagcggtgagttctcgtgtgacagcaaatgtttattgcaacagaagggccagacggtttcatgagcgtatgtcatctggagtgtagtcagggcagagcagtccacaacttcagattggtgcacgcccggcacctctgttgtgaagactgacgagctcaactgactaagttaacagtctactgcctgattagtaagcgcagcactttagcttagcagacactgaagcgccagtttcttcgtgactggtgctgtgcacttgctctcatattcaccaccgctccattcgcttaccaagctaacattatcataccagatcagtggacctccactgaaaaatgctgcaaaatgtataaaacatcaggacaaaacagtgcacagtgcaaggggtgttggcgttacaggatgagctatcgattgaaggcaggaaattctttgtacaattgtttgatgccccaaaacagaacaaagcagagctgttcgcttgtaaacaaatgtttctatgcatgtatttaagaggagactccatttttttacatcaatttgatccatacagtcaaacgtataca

SEQ ID NO: 22502 - DNA, 203 bp, Zea Mays
cgcgagcacgccgtgatttctccacgcgcagcccccgcaatccgccgcgccaaatccgccgccacaaccctgcgcccaaaaacgcccgcccgccgcgatttctccacccgcagcccccgcaatctgccgcctttccatccgcggccgcaatcatttccatccgcgaccgcaatccaccgcgccaaatccgccgccacacccct

SEQ ID NO: 22503 - DNA, 1946 bp, Zea Mays
tgacggcctgcctgccacggttcacggttgaaacggagcaacgcttgcgaacgcgccattccgctccacgctgccctgctctgctcccccagtcccccaccacaactggcgtcgccttccccggggaatgcgaccgcgcgccagagcatgccccgcccggagcccgcgctagggttccccgcccgcgcgtccaagccgccgccccagcgccgccgcaagaggcagccgccgacgaggcggaggcgaccggccggtgccgcaccggtggggccacgcggcgcggccgatccagatccggcgcactcctccgcgctgctgcccctcccaagcggcggcagtggcttcgcctcgcggggcacggttgcgccagacgaggaagaggggagagacggagcaagctccgcagaatcggaggaagtggcaaaagcaacaaatcattcgttctcccactcagtgagagagtgccagaagcagcgtcgactcaagtcagagaggtctgcactggcgcgcccgacggccttgcatgagctcaacagcgctggaggtgttgagctgctagtgctctcgccgagatgcttgattggtaacccgggaggaatgagcaagagctcgacgacatcatcccggagcagatcaggcacaggcacaggcacgttcccgagccctgggaccccgaactacaaccggcattgtgcaggcagcatgcagtactccaagggttggagttcagagcgcgtgccgctgggcactggtagcaatagacggtatgggggcagtggggttgtgcttccgtttaacaatgggaggaagctgccgtcgaaatgggaggacgcggagaagtggatcctaagtccggtttcctgtgatggtatgggaaggatgtctgcaccggctccgcatcatagacggcccaagtcgaagagcgggccccttggccacccagctggcattccaggggcttatgccgctgtctcaccgcttgttccttgctttgatggtgttctggcagaagctaattttgcagtgcattcacctttctctgctggggttctcataccagagcacgggcgcattggtgacttcagcagtggaagaggtagatgtggtgacgatggtagcagcagatcctactctgcagagaaggagccatatatattaagatctgcaagcatacatgcctggacagaaacgcttatggaggcatctgcttttgctaacatctccgaagaaaccgtacaagatgataaactgcaaggccagacagaagcaacttccaatatttcgagtccaatcataaagaaagatgtcggcacacaaatgagtcctgaggataatatagcatctcctccaaaagcaaggcattcctgctccagtctgccttcaaggcatctgatacaagaagcaaatagtcatatacctaaacctgaaattagggacgtgcaggttgatgaccaagtaactgtgacccggtggtccaggcgacatgtaacacgaggctctgataagaggtcaacaaatattgtcgaatggaggaagaagaccgttgaaacccgagctccatcttttgatgaaaaagaaagagaaggatgcatgtcaaagtgcaaaagggaggaggcaaagatcactgcttgggaaaatctacagaaagcaaaagcagaggctgccattcgaaagctggagatgaaacttgaaaagaaaagatcatcgtcaatggacagaattctaggcaaactccgctctgctcagaagaaagcacatgacatgcgaagtgtagtttcttatagtgaagatcattgtggtgcgaggacaaccaagaagacatctttccttgtcaaaactggcaagcctttcagctgctgctttacctaccgtgcttgctagttgtggcacagctggtgccactggattcagcaatggatatagttctatgcgaagtgtatatcttt

SEQ ID NO: 22504 - DNA, 1572 bp, Zea Mays
cctgccttggccttcctcacacagttcgatccagcccaaccgaaccaaatctctagcagacgggaacctgggaacctgaaccctcaaaccccgccccttggcctcccatacctttcgcgccgaacacccgccgtcaccaaaactgacggctcctccccctctcccctctccccttttgtgattggactgaagtgggattcatatatcaggtgtttggattcttctctttcctctgctggtgaggacgtcggtttcttctttttgtgctgtttcccccctttatcttctcattcagcgatcttcaaattcaatatgttgtccgtcggattggcgctctagtctggtgggtttgctttcagatttgccgagtatcaatccgggtctccattcggtggtggctgaagcttgatttctccatgtcgctccgtgcagcttcatgaatccatgttctcaagtgtatttgatcatgattctataaacaaccatcttatattactaatctgtaggagtttttttacatgttggtggtccaagctgaaaaaaataatttaggacaaagctagattgtcttttacatttgtgattggaaggagtaggctttttcattatccagtggcagttatagacagttgttgcgctcgtgcagcttcaaatattttgggatgttgccatgttaaggtattagccttttgttgtttcagtatactagcttcctaaaggatcgatgtcggctatctccaatcagaagaaacgcaccttggaagcccttcagcaacagtatactgctgcaaaagctaagaaattgcaagatgaacaggttaagagtcagaagaagagcaattttaatacccctaagcctaaatttgatgcaccaaggggaagcaaaggtctagtaatcactcctcgacgaacatatgcccagccttctcctcataaagatgtagcattttctagttctaattgtcaacaaaagccttccacgtcctcaggtgaagaaatcaatcctgtgtatgctgaactttcttgtgcttttcatgacactttgtccaaaggatttggatggcacagaggttgttcacaatgttatatatgacataattcagaaaggtggagatgctgggaaaattacaaagggagccaaaaagttgaaactggaaaagggatccttttggatgagggaaatttggatccataccattaaaagatcaccactttggatccataccattactatctcacttacatgtgggtccacatgagtcaatgacatgtggggtccatggtatatatctaaagtttggatcttttaatggtatagatccaattgttcctttggataattatgttcaaaggggttctagattagtggatgaccaagcaagatctttgctaattcattcaaagtgataaaaaggcacatgtctctgaaacaacataagaaatgtggttcatttgatttagatggtacattccacaagtactacctctataagctaatgcatgagatgtggaaggactatatcaaagagcttatggatatgagcccatacgactccacagtatccttttgaa

SEQ ID NO: 22505 - DNA, 1513 bp, Zea Mays
catctctagactagggtacccaaacccgagccgtcgtccccagtgtggcagtgtgccgctcgacgcgcagccaaacccaaacccttcctccctcccgacgggcgacggcgatggccgccgcgacagagaagacggctgaggacatccgccgcgagctccaggagctccagcgccagcaccgcgagatcaccgagcgcctgcgcgacccccgtggccttcgccgcggcgcccccggccctggtcctggacctggccccccccgcccgctccgcggcttcgtgagaccccatgtgggtgcggaagtggcggatcaggctccgcagaagcgtcggctgctatcggccgtagttaaggttgatggcgctgaaaataatgaagaaggcacaaaggatgccaatggggaggggcaagaggcgggttcaggtgccactgaaggcagtgacaggaggactttcaacactggcgggttcagaagggacgggagcctgtggatgcagaggagggtggactataattcgctgccagagccagctccaagggagcttcccaggaatgaggacccgagtttgatcagagactcagcgaaaggctgagcaaaaggttcgtgaagaaagtgaaaggctgcgacagcaggaacgtgagcaaattgcagagaagcgtaagcgtgatatgacgctccgcgctcgtgtagctgctaaggcagaagaaaagaggttggagctgttgtacattcagtggactgagcatcataaaaggctgtccaatttcttaaggacaaaagctgagccacctatttattacatgccaactaaaccaattattgatgatccagccattgttgagcagaacaaggaaaaggtattcgaagaatggaaatctatgcgcagggctgagctgactcggtttcaaaagcaagttgaggagcaatatctctcaaatgtggagaggcaattggagaggatccagaatgcccggaacgctcggaaggcgaatgggcctggtaacatgcaagaaatggacaaggagctggacacccacagggcggagcatggtccaaagcctcggcgagttcccgaggagggcggcaatgatgatgacgaagatgcagaggacatggctgcggaagacgagctgatggatgaagttttgggcatcaacgatgcaatcaatgaggacccatccaagccgtccgaagaagctactactgaaggtcagccagcaaccgaggaagcacaataggattctttgttcacacaaggtaggcgtaccattccggcattccgtatgcttagttgccgtcttgttgggtgctgtctgtgcgtgtatttttgttagacgtcccccaatggttagactgtgttttaatattgttgttttggccttttgatgttgaggccatacaactgtcaattattatcttataattgttgtaagcatactataattgttaccatgatttggtcgttttttttgtcgtcagacgtttattgccagcaggttatgttctttcact

SEQ ID NO: 22506 - DNA, 1116 bp, Zea Mays
ctaacccttgctgttcgctcgctgttcgccccccagccgccaccgccagttcttccattcctccgcgctctttgagccttcgtctcccagtctcctcaactcagcaacccgcgctcccgccgcatctattcatggcggagccgacccccaagtcgaagcgcaccaagaaagcgaagaagccctcggcccgggaaggtgatggagaggacatggatacgctcaagtctgacgtcgccacattcgcctcctccctcggcctcctccctggcgctggcgactccaacggcggcttcgatgactccgacttccgcaagtccggccccatgtataaatcctcaaaatttccttccaaacaaccccatcaaaaacctgataacacggcaaacccccatctaaaccctagacctaccaagaagccacaccctctcgagctacgtgactcctatgctgccaccaaacctggtgctgtcaacactaattaccccctgatgaaggcggcagcactctcagggcagtggtacactgatgctgatgagctggaggcgagggtcctaggcggtcgtaagcaggtgcctccagctgtggggcttcaggagatgcagggaatagtggagagaaaacgagagctggcagagaagctcatgttgcagtatgcgagggaatacgatgccgtgaggcgagggcatggtgacctgaagctcctggacatatcagcaaagtctggtacatcagctgacaaggtgtcagcatttacatgtcttgtcgaggacaatccaattgcaaacatgaaggcactcgattccctccttggtatgataacatcaaaagttggtaagaggtatgcgttcacaggattcgatgcaattaaggagttatttctcatgaggttattgcctgaccgtaagctgaaaagtcttatccaacgcccgctagacattttacctgaaacaaaagatgggtactcacttctgctcttctggcattgggaggactgcttaaaacagagatacgaaaggtttgttatggcattggaggatgcggtaaaagatatgctgccaaatcttaaggacaaagcaatgaagagaggtgtactttgtctccgaagcatccaggggg

SEQ ID NO: 22507 - DNA, 1745 bp, Zea Mays
gaccttgtagataaggctacactcactgatcacacgttcctgcaggaactggcacgccatggcgggcttctgcactcctgctgccactgcagctgcccatgccgccctaacccctctgacgagctcaaggaagcacatcgccatgtgcctgtcccccaggccaagcggcggcggcggcatcggcggcggccagagggcgcggcttgcgagtacaggcgcagctcctcaggttcgcgcgctggcgccgacgaccgcggcagaagaagcagcgggtccctcccccgcccctctcaacgtggagtacctggccgctgagttcgccggccacggcgtcagcttcgagcccgtgggcgtcagctgcgccgtcaagatgtcgctgcgcaacggcagcgtggcgcacgtgctgctccccagcgggctcgtcacgtcttacaagcccgccatgtggcacggcacggtcacggaggttctccacacgaacgtcgccgaggtcccaggcgggcgggccgtcatccgcggcggcgtgttcgtggacctccgttgcgatggctgcgacggcgtatggtcgccgagcgcgagcggggcgtggtcgctccgcgacgtccggggaagcccagccacctccatagaggtcgagctcgcgtcagcggcgccggggaacgcggccgcggcgaggtgcgtggtgacgctgcacccggaagcgctggccacggagctcacggtgacgaacaatgcgtcggcggcctcgtcgccgccgatggctctgacgtgctccgtgcccagtcacctgcgcgtgagcaccccggacgccacctacgctctggggctccagggctccgactaccgcagcgtggagcccgcgctgtcggagttcagcatcatccctcctggctacggggccgcgcggcaggccgcagcagggacgacagcccgaaaccagtgggcaaacaaaggcttggacatgatcctgtcgggcgggcagcaggaccgtggcgccgcggacgagcccgacggcgaggaggacgacgactacaagcacatgacggacgcgatgtgccgtgtgtacagcaacgcgcccagggaattcaccatcatcgacagggaggaactccgtttgcttgcacaggaaggggttcgaggagctgtacgtcttcagccccggatcccagtaccagtggtacggcaagtatgcctacgtggtcgtagggcctgccatgctggagcctgtgatgctggagcccggagacacgtggcggggggctcagtacctgcgcaaccccaatctttaggcatgctagcagctgggagaattgatgaccctggacacatcaaatgttcccgtacgtgtatccagatcatcagatgaggtcaggcgagatgcaaaattggcaaccacaatggtctacagatgttggaaatgctgtccatatatagcgaattgctgatgacaaggttcaatattagaatgatgagatttactatatctcaaatatcttaaatatacttctgttcagatgatagttactaggcatcaaatctccaactaacggtcgaccttaaacttataataactcagtttgttctacgcacatttcctaagattatctcgtcgaagttgagttatatacttagtagcactaggttcacttactcatgaacaggttatttactatcacctgaaacaattaggcataaaaacaatattgatagaatgtaaactataaatttatcttgcttgcaatgaa

SEQ ID NO: 22508 - DNA, 1520 bp, Zea Mays
caggtgtccagttccaggttacgcctccacagtccacactccctagttccaattccaatccaatccccattactccagctatcagtacggcagtaccaccccacctgaccgccccaacgacggtggttcttttcgcctcatctcctaccccgtgtgctcaccggcgttggctatgcaccatcgcatgggtcgcttcctgctcttgccggctctaaccttggtagttgcgtccgcgtgggtcccgatcaccttcgccgacccgcaggccacgctgctcaaccaggggtgcagccagtacaacgccacgcccgcgtccgccttcatcgccgccctcaactccacgttcgccagcctccgcgctaacctctccgctgcaagcagcgtcggtttcgccaccgcggcggaaccgcgcgctgccgccccggcgttcgcgatggcgcagtgccgcccgtacgtcgcgggccgtgactgtgtcgcctgcttcgacgcggccgccgcgggactccgcgccacctgcgtcgcgggccgcgcggccaacggcgggcgcgccatcctcgacggctgcatgctccggtacgagagcgcggccttcttcgaccagtctacgctcccgggcaacacgcagctctgcaacggctccgccgtccaagccggcggcttcgcggacgcagcgcgggcgctggtcgccgacttcgcggcggccgtgcctcgcgtccctgggctagccgccgcggccgcgagcggcggcgtgtacgcggcggcgcagtgcgtggagacggtcggggaagccggttgcgcgcagtgcctcaacgtggcggtggggaacatcgatgggtgcccacccaactccgacggccgtgccgtggacgccggctgcttcatgagatactctgataggtctttcttcccagcgaactcgacgactgtggacctcgcgatatacttgcggtccggggctacactgctccagagtatgcgattcatggccaactatcagaaaaggttgacacatacagctttggtgttgtcgtcttggaaatattaagtggtcggaagagcaatgatacaaggcttgagcctgaaacacagtacctgcttgaatgggcctggaagctatatgaaagtgacaacttaatggccttgctggatgagtcacttgatcctgaagaatatagaccggacgaggtaaaaaggataatggagatagcccttctctgcactcaatcagctgttgctgcaaggccaatgatgtcagaagtggttgtgttgttgttgacaagagatgatccagaggtccagcccacaaggcccacttttatcgatgcaacaagcagagtgcgaggcgaaacatcctcctccagttcgtcttctgcctcgaaggccaccatatcagtttctcagttttcggccaggcactctggatccaagcagcaactgtccgcggcgtactcgtgccaccaccgcagctatggagtacaccgacgccagtaaccgtcaggtgctcgaggaaatgcgcctga

SEQ ID NO: 22509 - DNA, 1468 bp, Zea Mays
ataatgtatgagatcaacttatgagattatggtagaagagtggaatgcccctaagccaatgcatccttctcttttgaatgaggccttgcgatggacagctacagacggacaaaagaaagatctatggtcacccttgccatatcaggggtggaaaccatgcttaacgccatcagtttctcacaaattacctctggaaccaagtggatacatccaagtatttcttgatggtggattgaaccaacaaagaatggggatatgtgatgccattgcagttgcaaagattcttaatgctactcttgtgatcccacatcttgaagtaaaccctgtttggaaggattcaagctcatttgaagaaatttttgatgtggatcactttatcaactccctaaaagatgaagtttccattatcaaagtgcttccaaaagaattttcttggagcacaagagagtactatggcacaggcatccgtgctacaagaataaaaactgcacctcttcatgcctcagcaaattggtatttggagaatgtcagtcctatcctgcaaagctatgggattgttgcgatcgctcccttttctcaccgccttgcatttgatgatttgcctgtggatcttcaacgcttgcgttgtaaagttaacttccaagctctggtcttccgttctcacattatctcacttggagaaacacttgtgaagcgcttgaggtctccggtccgggttcattccagtaaatctatccatcaagttgtaggagacacaaatcaagctgaaaaatatgcagttttgcatctccgttttgataaggatatggctgcacattctgcatgtgactttggaggtggcagagctgaacagctagctcttgctaagtacaggcaagttatatggcaaggaagggtattaaattcacagctaactgatgaggagcttcggaacacaggacgctgcccattgaccccagaagagattgggctgttactggtagcccttggctttgacaacagaactcgactctatcttgcatctcacaaggtatatggtggagaagccaggatctctagcttgcgcaaactatttccgttgatggaggacaagaggagccttgcatctgaagatgaacttgctaatgttgaagggaaggcttctgttctagcagctcttgactattatatcagcatgcatagcgacattttcatatctgcatctcctggaaacatgcacaatgctttggtggctcaccgaagctatgagaacttgaagaccataaggccaaacatggcactgcttgggcgcacctttgcgaataagagcatggagtggccagagtttcagcaggttgtacaggcaggacacaaaggaagatacgggcaaatccggttgagaaaggcaacgcaatccatctacacttatcctgcacctgacttgccgaactatgtgcttggagcgaaactgaccctgttcgaggtttag

SEQ ID NO: 22510 - DNA, 1958 bp, Zea Mays
agccaaatcattcacgtattcatcttcaagccagccgtctccttatcctgcgatgccgctcacctgggctcatcttccagccgccctctccgcccagcagcagagcacaccatcctctcaactcggatccccaagccctcgcctccagctcttgccacggcatccatcccctgctcggacctccacccggccgcgtcctcgccggtggccagcgccgctgcatcgcccttcctagcgtcggccttggcaccgcttccccgagcgccccagtcgagctcgcccatcctctgctctagccctttctccacgccgtcgctgagctcgcccctcccctcagccatggacacgacgacctgcagcccttcttggtggccaagcccatcttcctgctcgcgccccctcttttccacctctgcgcgtatcagctcgtccaacccccatggcaaatgttctttccctccctgcagcagcaccttggtggttgtcgagcagcacgtcgcgcttgcgcagcctcggtcacgacgttgttcaccccgctaaccattggtgtcatacctcacgtgtcatgtgttcgccgaaatgcctaaacatgtagtctgtcgtcgtcgtatccacagtcaattttagtcatggggaacttggtacagccatccatggtatcagaatatgacctgggaggagaaggggacctgttcaaagctccagaagccatcatcgaggaaccgctgctcctgaactgtctgtctgattctgttcatttgttgttgtgtaggctgggcttgtgccaagcttgaatcctcttgtgaaggagtttctcaatgctgctgatgacaagcggaaggaagtcctctctaaaatagaagaggatgttgctaagctcagcggttctgcagccaaatctcgcgtctagaattgccgctagatgggggaggtgagcggctcctggtctcttcgatccaatgtaatggtcagctaagaagctacaagtgaatgccgaggagagcagcgatgacttggctaacccaccgaaggtagaggagaagcttggtgctgtccctcatggcctgtccaccgactctgaggttgcccagagggaagccgagtctatctctaggaagactctcaggagctcagccgagaagtttgagttccaagctgaggtttccagactcatggacatcatcatcaactcactctacagcaacaaggatatcttcctgagggagctcatatctaatgcctctgatgctggataagattaggttcctttcccttactgataaggaagttctgggtgaaggggacactgcaaagcttgagattcagattaagttggacaaagagaagaaaatcctctccattcgggataggggtattggtatgaccaaggaagatcttattaagaaccttggaacgattgctaaatctggcacttcaggaacaggagctgctcgagtctcttgtcgaagctgatacgagaaggcaggaaagagctaaaaagatggaagaaaagaaagtgtatctgcaactatacgaagcaatggaggcgttggtcaagatcaatctggagacgaacaagatcatggacttcatcaagtttgacgtcggcaacgtggtcatggtgactggcgggaggaacaccgggcgtgtaggagtcatcaagaacagggagaagcacaagggcagctttgagaccatccacgtgctgcttggagctttttgctatgtctagttttctcctatttgttgtacaggaaaacatagaatagaattcaaatttggtggtcgcaaaagtgtggagactttaattcatataaagttaggcttaacattagtgcaaacagttgtattttagtttagatttagagtacacttatgtatgcattgtttgacaatgtttatttatgatatattaaatggtacttatttatattatattaattataatgttgttcaat

SEQ ID NO: 22511 - DNA, 4459 bp, Zea Mays
ctttcatcgagcactcgctgtcgcctcgtagcgtcgggagcatggcactggcaaattcggcacggccactttctctgcttgcaggcttgcagctgtgctttgcctggatggctggatcccaggtacacctacctctcatctgattgtcgtgcggggtgcgtattgaatgaaattcggcgtactataatttatccgggggtggttggagaaagtccgtggatttgttaggattctgccatttcaacatttctagcatagcacaaaaaaataatattcctctctaccgatttcagtcaagcggtagataaactagcagaggacgccaaagttgaggcggtgtgcaactcgcacacagcattgcggcaatggatttattattattatttttgcaccgtgtctgaaaacatggggagtgaaattctacccctatggaattgaataataccactaattagaaaggcaacaagtaaggtagcttctgcaatacaacatcgtcaataggatctttaagcaagcgccacgctttatttctttggattttaattaagagaacatggtgcatgagaggcgacgtgaggccaaacgatcgtataaagtagtgttctgcactttatattgcacaatttacaaggtacaatttaaaatgatcgtataaagtactgttgcataatttagattttatttaagaaaagatagtgcatatcaacggacgtataaaatactgttatgcattttagattacaatgttttaaaagtgaaatttaaaatagttagtgagatagaaattagagatagcataatgttcccctccccgactccgccttccccgcctcgtccttctcggaccgccggctccgcgtccccagttctacgtcgccagcacctcatccataccgttagcccgcacagcagtttttactgctctgtagtagtaggctgtagactctgtactctctagtctctactcccccctctccgccttctctctctccgcaggcggtatcctcccttcctcggttcctctcctctcccccaccaccccaccccagcgccccaaatgccgctccaaccctagcctcccgccacgcctttcgatctcggccggccatgggcaactgctgccgctcgccggccgccgtcgcgcgggaggacgtcagctcctcgcacttccccgcatccaacgcgaagaagaagccgcaccaagcgcgcaacggcggcggcgccgggcagaagcggctctcggttctgggcgacgaggggtgcgaggtcgtcgggatcgacgacaagtacgtcctggacagggagctcggccgcggggagttcggggtgacgtacctgtgtatggatcggggcaccaaggagctgctcgcctgcaagtccatctccaagcgcaagctgcggacggccgtcgacgtggaggacgtgcgccgggaggtggccatcatgcgccacctgcccaagagccccagcgtcgtgtccctgcgggaggcgtgcgaggacgacggcgccgtccacctcgtcatggagctctgcgagggcggcgagctcttcgaccgcatcgtcgcgcggggccactacaccgagcgcgccgccgccagtgtcacccgcaccatcctcgaggtcgtccagctctgccaccgccacggcgtcatccaccgcgacctcaagccggagaacttcctcttcgccaataagaaggagaactcgccgctcaaggccatcgacttcggtctctccatcttcttcaagcctggtgaaaagttttcagaaattgtgggaagcccctattacatggctcctgaagtattgaagagaaactatgggccagaaatagacatatggagtgcgggagttatcctgtatattttattatgtggagtccctccattttgggctgagactgaacaaggggtggcgcaggctattcttcgtggaaatatcgattttaagcgggaaccctggcctaatgtttcggaaaatgcaaaagatttagttcgacacatgttggagcctgatccaaagctcaggctaactgcaaagcaggttcttgaacatcattggcttcaaaatgcaaagaaggctcctaatgtccctcttggagatattgtaaagtcaaggctcaaacaattttctaggatgaatagattcaaaagaagggctctaagggtcattgctgatcatttgtctgctgaggaagttgaggatataaaggatatgttcaagactatggatactgacaatgatggaattgtatcttatgaagaactgaagactggaatagcaaaacttggttctcatcttgcggaatcagaagtacagatgctcattgaagctgtaagtattcacagaattatcctagaaacagataaagtagacttctgtatttactatttactttgaacttagaagtcttaggtggttaacaaataccatttaatagaaatggtacaaggaagatgtgatgcattgaaggacaaaatggtaattttcatgagaagatacattgaaccaacttcataatcttcacactgtgttcagtgcatccatttttatgcctcaatggtattttccactttatattcacatcaaccaaatgttccaatcacctggggcatttaatgtggcgtagattttttcaagatgactattgttcatctttgatatgtgccccagttttattccattagtgtcaaatagccatctgacctgaccataccctagtgaggtataaagctgtctccagcatcattacctatcacacatcttttttttctctcgaacgtgcaggagtactgcacatcattatattaagaagatgaaggtaatacagcaatacaaggcgagctcacggcagccagaaacgaaaatacacaaaagcatccattagggacacaaggacaaaaacaacccctcataggctgcctcggttgagaatttcacgttagaacccaatctaaaaatatgagaatcatccacatctggttgtagctccaccaaattgagaatatcccatagggtatgaaaatccatgaggacccgaacagtgatggcaccctgaatatccaatacctaggaagtattagtaagggtatcctccaccgtcctattagctctttgtataggagctgaacctcaactagctgactgcttactggcagatgtaaggcaagttggggtgatttcatcaatgaaatacatgcccttggtattatgtgtagtgtagcagcaatgtaagggcctgtttggcagacctccgagaacagcttctaggctgaatcaaggaggagttctgccaagcagggttttttttacagagacctgattcaatgctgattccatgaagtgatcatctgaaatgaactaggaggctgggagctgaaaattgtagcttctcttgattcgctccacaagcagaatccttttgcatagaatttcaccaacataatcgcttctcttagagaatcacttctcagtcctcacagatccaggagtgcaggaggagctctagcgctctaccaaacaggcctaacaagagaacggaagttatgggagtagtgttgcctacttgtcttgctctctttatttaatttctccaacacttcttgatcactgtgtggcaggaggtagcaagagcaggctagattattgaactgcgactgatctggactgtaactcgctccacattttctaccgagctctgtgctctgcagctcgcacgcctttgatcagtgctgatcggcgtgcaggtggacacaaacgggaggggggcactagactacggggaatttctggccgtctcgctccacctgcagaggatggcgaacgacgagcatctccggcgggccttcctgttcttcgacaaggacggcaacggtttcatcgagcccgaggagcttcgagaggctctggtggacgacggggcggccgacagcatggaggaagtggtgaacgacatactgcaagaagtcgacaccgacaaggacggcaagatcagctacgaggagtttgtggcgatgatgaagaccggcacggactggagaaaggcgtcccggcactactcgagagggaggttcaacagcctcagcatgaagcttataaaggacgggtcggtaaagctgggtgtcgagtgaaaaccgcaccgacgctcgttgatgtgtgtgtgggtgtgtgcgcgcatgtagttttaggcccttgggccactaagcagaagaactctaggccttcttcttctttttttgtcccctcgtgactgtcttgcgtggaaattttagataggtggaagtggcggaaccctccgatttgtcttactacctgtgtaattagctatcccggtctcgctgacaggcactgggccaaacggtgtacctaatgctctcacccgttctcttgatggcagcccgagtgctgtacgatacagtgtgttttgcggtctggaaatgctcaacaatgtgttgggaga

SEQ ID NO: 22512 - DNA, 1509 bp, Zea Mays
gcgctgcatgtattgagggcaagggctgaaaggctcgcgtatgccttccccctcctccacctttttcccccgttcgagtgctcgagctccgaccaaatctcgcagcggtagcaatccccgagcggccgagcccgaagcgggatcagtggaggacgagtggacgacaccctcgattctgacctgcggtcggcgcgacttacagagaaccggagatgcagcagggcgacagcacggaggcgcaggtgacgtgggaggaccagcagaacatcaaccgcttcggtcgcctcaacaaccgcctccacgagctccaggacgagatcaaactcgcgaagttacaatgggagcactgcaaacgatcagattggagaagagtcgaaggtagaagccgatgagctgaaatcccctcgcagtcgtagcgtcgtgaaggtgcgaatgttgtggctggaatagagacatgtgtgcactccatgtagatgatagcccccggatgccgaggtagccgaagtcgaggtggtcgaagttcgagcatcaacggtcggtggggtgacacaaaaatggacaacaacagactcgtggaccttcttgattctttccgtgtccggtcatcgaggagcctcgccaaggaagccggcgcagcgcatgcgtctgcgctggtcaaggtggctgcgctcgctagaggggccgcgccggcctccggccagtggaggcggcggcggatccggtcgggaaggccacgacagcgacagatctagccataaagactcgcttcgacagcaattcgttagcctaaaacaagggagtggtactgttcaggactacatatgaaacgcgacaacttgatgaggaaacgaacgagaaccttgacgatgctgggaacgaactcatcctgtcggacgaagatgtcgtgcgcttccagatcggggaggtgtttgctcacatgccgagggacgacgtcgagactaggctggagcagatgaaagaggatgcggctaagaagctggagaggctagaggaggagaaggaatccgtcctcgcccagatggccgagctgaagaagatactgtacgggaagttcaaggacgccatcaacctggaggaagattaagagtagtactggagttgtgacgacgtggccctctctttctagttcaggtcctgtttttgttcccctgctccccccacagaagcgcttggcccgctcgtgtaatggaagcttgagtctctcagtctttcagaagctcttttcaccaagaacccagaatagttttcattctgcgggtttatacggattgaagctaatggcgctgggcccatgaatcctttttcagtttgattgtacttggtgtatgtgggtacatcgcttgccctatttcctagtacttactagcaagcctgtgactgtgagtaccggaaaacagtggagataacgggcatgtaggtcttgttttctgcctaatatgttgggaatcatttgcagcctttcaccagcttcggtgatatttggagaag

SEQ ID NO: 22513 - DNA, 228 bp, Zea Mays
gacgctctttgccatttttattcaggtttgcggcgtgacattcaggacattgtggattacaaagaatttaatactgtcaacaagttgttccagtttgctatgcttgtagagaaggaattgcagggacgccaacatcgacctaggactacttttggcgcctcctctacatcacggacgcacacacctgcctcgagtcatacaccttcgaccactccagcgtccacgcga

SEQ ID NO: 22514 - DNA, 2523 bp, Zea Mays
tgcatagcctatcgagcgacggcctacgctcaaaaaacacaaatcgctttccgcgccgccgccgcgccgccgaccggcgctcctcacctctcccgccgcacccatcgtccccccgttcccggctaaaccctgcttgagccctagacaccgcccgcctccgggaggtagagagcatgcacgccaggttcctcagcgcgccgtcccctgcctccgccgccccctccccgtacgttcgcttggccttcacgggcgccctcccgcgccgcgcgtgttggaagccgcgaggccccgcgtccgcgtccgcgccgccgcctcggcctctccactcgctgtgcgcccgggcctccatgcagcccgcctctcccgcgcacgacgggcatggtggtccgccggtgcacggcgtctccaacaccgtcatcggggtcctggggggcggtcagctcgggaagatgctctgccatgcagcgagtcagatggggattagaattgtcatcctcgaccctcttcccggctgccccgcgagctcggtttgcgatgagcacgtcatcgggagcttcaacgatggggacacggtccgggagttcgccaagaggtgtggggtcctaacagtggagattgagcatgttgatgccgccacactggagaagctggaaaaacagggcgttgactgcgagcctaaagcctccacaatcacgattattcaggacaagtacaggcagaaaaagcatttctcaagatacgagatcccattgcctgacttcatggaagtagatactttacgcagtatagaggaggctggggaaaagtttggctatcccctaatggtcaaaagcaagagattagcatatgatggtcgaggaaatgctgtagccaagaacaaagaggagctatcttctgttgttgcttcactgggtgggtttgagcggggcttgtatgttgagagatggactcctttcgtaaaggagctttctgtaattgtggcaaggagcagagacaactctactgtctgctatcctgttgtggaaacagttcacaaggaaaatatatgccatgttgttgaagctcctgctgatgtatctaacaaaataaagaagttagctactagcgtggctgaaaaagctatcaaatcattagaaggagctggtgtctttgctgtagagttgtttttaacagaagatgatcagattttattgaatgaggtagcccctaggcctcacaatagtgggcatcacacaatagagtcatgctacacctcacaatatgagcagcatatacgcgctattcttggccttcctcttggtgatccctcaatgaaagcacctgcagcaataatgtacaacatcctgggcgaggatgagggtgaagcagggttctttctggctcatcagcttatcagtagggcactaaccattccaggcacatcggtccattgagatgcggaagcaaaggaagatgggtcatattacaattgtggggccttctaagataagtgtaaaatcacgcttggacaacttgctgcaaagaaactcgtctgatcccaaggaagccctcgtgttgctattataatggggtcccaatctgatcttcctgtgatgaaagatgctgagagggttttgaaagagttcgacataccttgtgagttaactattgtttctgcacatcgtacaccagagcggatgtatgattatgcgaagtctgctaaagacaggggtttcgaggtcataattgcaggtgcaggcggagcagctcatttaccagggatggtggcttcattgactcctcttcctgtaatcggagttcccattaagacttcaacactatcaggatttgattccctcctatctattgtgcaaatgccaaaaggtattcctgttgcgactgttgctatcgggattgcagaaaatgcaggtttgctggcagctaggattctggctgcaagagatcctgagctccaggacagggtaactaagtaccaggatgatctgagggacatggttttggagacggcagaaaggctggaggaccaaggcccggaggaatttctgaagggaatggattgaccccttttgaagccctggctctggggcctgggaggaatacgagtgtattatgggtcggcgataactcactgtccactcgattatggtttaagatggggagtcatcaagaagatactttaataggctcggctgcattcgattttccttacaattcttttttgataattgtgctatcttaacccatctcaacatgcccttttcccttctaatatagggtatgaattttgggtttagagggggaaaaaagaatgggagtaaacgttgtacgtacgaaaaataaaacggttcgagtaacgtaaaaaacatgcctggatttttcagccgcacaagttgctttgagtcaagtaattgtacatattccctccgttctaaataaggccttgtttggttattaccattgttcatggattggatttggttattatcattgcacatggattgaatgagattataaaaaattaag

SEQ ID NO: 22515 - DNA, 3561 bp, Zea Mays
ctctactcccccactcttcccccactcccccagcacgccactgctcacacagaccaccccccactcggaggcggagtggagctcctccaatccgtcccgaatccggacgccgctcgcaccgcccgcaccgcccgcagatggacgcccgccccccgatccgcccgctctgaccagacgaacccggtccccgcccccgccgccgccgctggagcgcggtaatggcgggcttctagcgcgtcggacttaaagatctagcctttctattttgtttcctctctgcctcttttctttcgctggcaccgatggtcaccgagatggcggcgcgcggcggcgaggcggcggcgttcggcgcggaggccgaccgcggcgacttcgaggtcttccgcagcggctccgcgccgcccaccgtcgagggcgccctgggcgccgccgcggccgctgccgacctgctcgtggatgacgacctccgcgccgacccggcgtaccagagctactactactccaatgcgcacctcaacccccgcctcccgccgccgctcctgtccaaggaggactggcgctcctcgcaccaccgcctccgctccgcggccttcggcgggatcggggacggcaggaggcagcagcagccggctgcccaagggacggtcggcctgcccgggatcgatcttgcccgccagaggagcttctccaccgtctttcaggaggattcgtatcagcgtgatatggataggcagactgccagccacaatagtagtgaatcattatgttcttctggaatacagtatggtctaaatcgtggacctggaactattggaggcctgcactctagcaatagtttacgaagcttggatgaaattccgaacaatgatctgccatcaaatacatttgcttctcttttagggtcatctctttctaggagtgcatctccagatcctgagcttgtgaggagggcccctagtccatcccttcctccaatcggtgtgaaagttggcaacactgataagatgaatggtggttcctcttctttccgtcgtagttcatccgcaatcggtggatctgatgatctggtggctgccttatctgggatgaacttatcatctagggcaatgagtgggcaaactatggaccagtctcagctctatcaggatgttgataacgtccagaagtttctttttgatcgacagggtgaccaaccaaatggcaatcagcagcactacatgaggcgtcctgagcatggacaatctaagttatctgatggatattctgccaatttggccaattcatccacgatgagaaaccagattaattctggcagtttcacatcttttgacagtttgtctcttggatctggctttccttcccctaggattggttctagatcccctggagggactgtatcttctcgacaaaatttagctggtatgtctaacatgctaaactataatggaattggaagtccaactgcgtcaccttctcttcagacttctattgatccagcgtatatccagtaccttgctcaaattgcagctacctgggatgatcctctaatggacaggagccatctgggaagttcttacatggacttacttggtacacagaaagctaaccttggccctttacttcagtcacaaaagcaatatggttactgtggcaatcttggatttaaccttggtggttatgctggaagtccattgacaagtcctgttcttccctcttcacctattgcaccaggcagtccacttaggcatggtgaccgcaacatgcgctttccaccaggcatgagaaacttcggtaattcctttggttcatggaattcaggcatgagtggaaagatggatgctaatttgatgccctctctcctggaggaattcaagagcaacaaaagtaaatcatatgagctctccgaaatagctggccatgttgttgagtttagtgctgatcaatatggaagccggttcatacaacagaagctagaaacagccagtactgaagaaaaggacatggttttttcagaaattatgcctcaagctctcacattaatgactgatgtatttggaaattatgttgtccaaaagttttttgagcatggaagcactgcccagataaaggaattggctggtcagcttattggacgtgtccttgctcttagtcttcagatgtatgggtgccgggttatacagaagactaaaatggttgcggagctggagggtcatgtcatgcgctgtgtacgtgatcaaaatgggaaccatgttatacagaaatgcatagagtgcattcctcagcatgctatcgagttcattgtctcgacattctatggccaagttgtaatgttatccactcatccatatggttgccgagttattcagagggttctagagcattgtgatgatcctaagacacagcaaataatgatggatgagattctccagtctgtttgcttgctagctcaggaccagtatggcaactatgtggttcagcatgttctggaacatggcaagccccatgagagatcagccattattgagaagctaattggccaagttgtgcaaatgagccagcaaaagtttgcctctaatgtcattgagaagtgcttagcctttggaaatcctgtagaacgtcaggttctgatcggtgagatgcttggatccactagcgaaagcgaacctcttgaggtaatgatgaaagaccagttcgcaaactatgtggtgcagaaggtgctagaaacttgtgacgatcagcagagggagatgatcttaacaaggataaagacacacttgaacacactcaagaagtacacatacgggaagcacatagtagcgcgtgtagagaagcttgttgctgctggagagaagcgccttgggcttcaaccagcatgcaccgccgcctgaagggcaaactctctaagttgtacagctaacagttgctaggtttgcctcatgtttttttctctactaaaaaccttatatgaaggccccttttggcctcgccaggaaaaaaaataaatactgtatgtttgcggggaagagtgtacattaattctgtagcagaaagaccccctacccatgtggcggaatcaagggaggagtgatgcgtgtgagtccgatcgatctgaaggctgctgtaaagaggaagatggaaggggaaggagtgagaagcatgtcagttactctgctgctgtacaaattaaacttagctcttagagtgaggagaaagtaagctgttagctgtctgcctaaaggaaagaaaggaaaaaaaaaagaagctggaggccattggcaccctgtttcatgtgttggtatagctgctgtggctctcctgttgtctgtctggcctttgttgtaacataaagctgaggcgcactagcctgccttcgttttcacagttaagctgaagttattagtatcagctttcctgaactgcttggtatgtaatgtgactctgtttcttccttgtactaatgcttgtctcatgtaatccaggcccctaatgtctgaatgttttaatctcatttttcacctctgataaacgttgtttttttgtttggttttgttgctgctgagg

SEQ ID NO: 22516 - DNA, 5434 bp, Zea Mays
ttttcctacagagtcaaatgtttactgttgcaccctttgcataactcttctgtgatgctaacaatgaaattgtgctgatttagttgctatttgcactggaatgtgtcacaaggtcagctctatttgacaatctgttgtccatctgttttccagagtacatatgtgcaatattattttggattttgcaagtattacagatataaatacgacttgaatatctgacagctgtgtgtgaatcacttaggttatatgagacgattgtggcttaaggtgcaagtttaaattcagtagttgcgtctgtattccttgaaattgcagctttacgtacagctaccccaaaaaaatcatctatggttaacacactgcaacatatcttttttttctcgaattacacaggagagttgcgtgtcatttcatttaagaagaaaaagatacaacacccgaggggtggaaagaagccccccccctccccgcaacacatcaccaaaaggtaacatacgcgccacgcactaaacctaaaagaacgaccacacagggctgctcaggcttccagccttggcttcctgctgagcagctcatggagggccgtgtttgtggccatacactagagctcactctcctctgctacttcctgacacaccaaggaaatactaggactaagaccctcaaaacgcacacattcctatgtctccaaattgtccaagcaacaagaatgattagagaaatccttttctcttctactttggcactttgttgactgcacatccccaccagcgagcaaaatttctcaatttgtggagcagcggcctgcagtccaacaaaacagaggattttggtccaagtctcccgggagaagacgcaagacactataatgtgttgagctgactcatcttcctggtcacaaaggaggcagacactaggatgtggcaacccatgtttcagcaagcgatccgtcgtccaaactctgttcttgattgccagccatatgaagaatttgcaccggagaggtgcccaagttttccaagtatttttgcaaggttcaatcgtaacagttcccaagaaaaaaggtgttataagcagatttactagaatactgtcctgaacttgtgaacttccaaaagtgatgatcaggaagggctggttgcaaggtaaaaccttccaccaacatccaaagcttcaggtattcgacaatcacctggactgtgagggctccctggatgtcagtgacccaacgcctgttagatagggcttgagaaacagcgcgttgtcttcttgctctcttaggaattaactgaaaaagattagggtccagttctcccacagagctaccgtgcagccaccggtcagtccagaatttggtatcaacaccatttccgacctttgtttgcaccgccacatgaaagagagctcaggccttatagggaacctgaatgggcagcccttcccaaggccgtgaagaatctgttttttttttgtagccaaagccatcggatgtgtaaggcccatcccattttttcaaggttgagaacccctaggccatcacactgcaacggcatttgaaccttctcccaagacacagggcaattgcctccattagcattttgatgacctccccacaagaagccccgtcacagcttatcaatagctttgatcacccatttggggagatccagagctagcatatcatggatagggatggcagaaaaaacagcacggaccatcacaagctaaccggctcggctcatgagagaagccttccattttgggaggcaagctgctattttatcaatcaaaggcagcaggcactcttggttggtttccgaatagtaagaggtatccccaggtaggtgcaaggtaaattcctgatttcacaatccaagagctcagaaatgaccttcaagtcttcaattgtgcaattaatggggcacactgagcttttagcgagattggtctggaggcctgacgcataaccaaaagccttcaacagctgagatatgagaagcagatcatctcgatttggcctgaggaacaagatggcatcatccacatataaagaaatccggtgcttagcctgctgaacagccagcggctgtaggaaatatgcttggacagctttagtgattaaggcattcaatgcctccatgactagcaagaacaacactggggataaaggacccccttgcctcagcccccgatgatgcagaatgaattctccaggcacaccattaaccagaagttttgtggaggaggtggagagaagaaggcagagcaggttataccactttcgtccaaaccccatgtgctgcaggacctcaagtaaagacgcccaagaaactgagttgaacgctttagatatgtcgagcttgaaaaggatataaggttcaacatgtctttcatgtaaaaaaaatgtatgggatataacaaatttctttgtaactttatgtctacaaatttaaattgtttctgagcaagaaggtttttttttattttccatgtggtatcttctaagaaatgctatgccctttttacagcctacgttgaccggtttttgaaggtactcttgtagtttgttttggacttgaattatagtttctttaattaactaatatctgtgatgtaatatttgttgtagaagttgtgattcaaagcatttatattcttgctggaaattagttttcaaaccaccatttaactgtgaacttgcctcagtagaatgtgatgaaagaaataaaagaggggtatgtgtgaaatattaccagtaccatttcataaagtttacatcagtttgtattaactattgtgcgcgtcaccccagaaaccagtaaaaattatttttgttaaaaaatcatgaatgctacttgagatgtgctatcagaagagttttcccatgtaaacacaaagttacagtagtgtcattagaagggcaagcctcaccaggtcgctggtttgaagcagcttctccgtttatccctctgccaatatgtgggagcctttggcactgggtttgcccctaagcacaaagttatagaaaaaatattcatgatttgtatttgactatttatttgagcacagagagaagttatttcaaggattattaaaaaaactagctcaacctaggaggacctaggtaccattttattattcagaagaaaataggcacataaatttgccttgacgagaacttgaatctaggtggtctgggctgggcacacatccgcatgctccacttactgagcatacagccaggactatgtcatatatgttggttggaattatatattatggttgcaaatgtttgttatttttttttgtttttgctatgtaggctaactatattggcatagatgttgtccgcagttgattttcaggattaaaagttgtttagtattagatcattatttagcagtgttccaaaaggtggtattctgcggccacttacgcacgattaggtttaggtgtaggcgccttggggtgtaggtgagcccttggtagcgacccgccttggggtgtaggtgagcccttggtagcgacccggtgtacctatgtgccgatcccggcaggcagggatgttgagcagcaggaaggaggcaggaataggtgaaaagagggtggtgatggggacgtggcgggagcagtgggcgccagtgccggtggcggaggcaggggcactgagtttggtagcgggggaggcagggacgggggtgatggcggtggtagcagatgcggccggaaggaggcagtcagtggtggaggtggcaggcatggctggaataggcaggtggtgctggaggcagcagagaggaggctggcggtggtcaaggtggtagggaggaagtaggcgcctgagagcagaggaaggtgcgacagggcagagagcggatggataagctgggaaggtataaggtgggctaggctgtttttgatggactaggctgcttttgatgggcctttctatccaaccctaggcctgtaatctcctgttttttcttttcctttgaggtaatatttgtatatgtttgtctatttgtgaaacacctaggcttgcctcgcctaagctttaggctgaaggtcactgcctagcacctaatgtaacattgttatttagttagcgctcttttttgtcggttcacttggtgtttgtggactgtaaggatggtatcatattaactaggcagtagaatgatagatggaggatatctgagttagtttgacctctgcgctgtaatgttatttttagaaggtaaggaaaccaacagggctaatttcaattatataacatggtgtcattgaaattcaatttattgtgctctaaatttgtaataaagtgattttagtttgtttcttatcgcagttctcctgcgtacttgaggaaaaaggaacttgtcaggataaattgtccacaaatggttcctgcttctgcagtttccactaattagcagtaggtagtttattctataattgcattgaagcttgaacattgattttggttgggcatgcagtaagtagcttacaagaacatggcttagttgggatactgaaatgcttcatcaatagctctaaacctgccacaaattacttgacattcttctctacaggcatttccgaagaaagatactgctgtagttccgcttgttatatttgatgatgcaactggtgatcctttatctactcttgatcagttttgataattcgtttttggatctggaacacactagaggcgccggaaggaagttgaacttagactaatagaggaggacacagctaaaagagttgagcaagctattaggaagaaggttgaggagagtctgaattgtgatgaaattaagcgtgaaatacaacgtcggattgaggaaggacgaaaaaggatacatgaggaggtagcaatccagatggaacgagaaaaaaaggagcggaatgagctagagaaaaagcttgaagaagaacgaaagaaggctgaagaggcgttgaggaaagaggcgatggaacagcagcagaaagagctagagcggtatcaggagctggagaggcttcagaaggaaagagaggaggccatgaagcggaaaaaaatggaggaagagcagcagaggcaaaaccagatgaaactgctgggcaagaacaagtcgcggccgaagctgtcatttgcttttgggatgaagtagcgttcgagtcaccgaacgaaattagtgttttagtttcctgtaaccctgtatttcctgaaaccaccattgtctaactttggcagacaaattgggacgtcttaaatcctcctgatctgctttgtaagttgccgtctctcggtgatgtggttttctctgctcctttgctgttcactgttgagttgacgttgcgagaagactgccaaagaagaatccggttggtccatagggatggatagtcgaatgccaacacgtttttactcgatactggattatct

SEQ ID NO: 22517 - DNA, 559 bp, Zea Mays
attatgattctcgtctcttttctccattggcaaccatagttttttttgagtgtttcatccaggtacggagtgaaggccatgccgacgttcttcctcatcaagagcaaggaggtggtggggaagatcgtcggggcgaacccagacgaggtgaagaagctggtggatgcttccgccgaacccttggagactcagatagtcgtggagtagtagtcgtttcagactttttttttttttgaagagtcgttcgtgtcttccgaaactgcttcgggagactgtgcgaccgtgagtgcttcttggtcagggtctggatcgtcccggactgtccagtgtcgcccgtgtgcgtgtgcgtgtgcgtgtgatgggtttctgtcgctttgtagcagtagtagcacgaaaaatttgctattttagcctttttaacgtgggctaaatgttattatgtgaccctctaaaaaaactaaaccaaacaggcctatggatccggcttttcgctcaatgatagagggtaggctttatcttggcccgatccgagagaggcactcatgaagtgaaaggaaaa

SEQ ID NO: 22518 - DNA, 465 bp, Zea Mays
atgcagcacaaagccgaccatggcagatgttatcggtttcgatctaggcacaccgaattcatgcatctccgtattggaatgaaagctccatctgctgttctggaggatggaacaacagtggtggtcaagagattgaaggaagtggtggcgggaatgagggaatttgaacagcagatggagctaattggcaaggtttgccagcatcagaacactgtcccattgcgtgcttactactactccaaggatgagaagctcttggtgtatgtcccactaggtaacaaagctgctggaagaaccccattggactaggagaccagggtgaagatagctctgggcactgcacgcggaatggcttaccttcactccatgggtagcggcgggaagttcattcacgggaacatgaagtcaagcaacatccttctctcataggaactcggcgcctgcgtcaccgagttcggccttgcc

SEQ ID NO: 22519 - DNA, 2580 bp, Zea Mays
aaatcctttcccaccaaaaaataaaaatggagccatggaggctgcagtcacacacagtcactcacacatgtgcgcgggcacgggaaaagcacgagtctacttttccctttcgatatgcggccgaggagagcctctctggcgaatggcgagtggcgagcgattcgtctagactctagacaagcccggctgcgcatttcgatgcaaatacgtggaggatggagtaaaatactaagtaagtgagagagaggatagaggaaggagagggtcttttcttttcttgacccaaggtccaaggaggggatcaggggggagtgagcgagggggaggttttgccgccggcaatggagacgaatctccgggctcagagcccgctctgctcccggacccgccccgcactcgccgtgcgcccggacgctgccgccactggcctcacgctgtctgtcataaggcgcagccgatttacgagaggcgggctcgttcgatgcatggtgtcaagttcagattatcataagagtagtccgagaaggacgtcgacttctaagagcaagggtgtcccttccggagggtatgcttcaagacctactgctgaatccagcacgaagaagatagaacagagcagcgacgatgaaggtgattttagcagaaccaatgggtcactctatggtgaggcagcggagcaggcaagtactgcagaagagtcgtctcaggtttactcgacaggagacatttcaagcagcgcagaaaggggcgaagctgggaccgaagaagaggctgaccaaaatcaatcttcagcgttgttttctgtatctgtggatgatgactcaatcgacaggaaacttgatgagtaccgtggtaaaataagtgcactagcaagttcgaaacctaaatcttcatcacttgcaagtgttgctggacaaaacgaaccagttggcgggcaagaggaaccagtaactggttccaaggaacatgacagttcaattgttgatgcgcccataagaggcaggccatttgctgaggctgttgtgggatataaggattttactgaatcagtagcaggaatggcagccagcaagaatgaggaagaacaacttgtctcgttagaagatgtggtggggataagtacagatgcagatatagaagcaccggttgaggatgatgttgatccagaagtgctactgaggaggcttcaagagcttgctgatgagaattatttgattgggaacaactgtttttctttccctgaagtagtgatggctgattcgatgattgatctttacttaaaccgcagcatgtcggccttagctagcgagtccaatgtttttgtaaaaggagcattcaatggttggagatggaacgctttcactgaaacaatgcataaaagtgaattaagaggggattggtggtgctgcaagctctacattcccaagcaggcatacagattagactttgtattctttaatggtgacactgtctatgaaaacaacaatcacaatgattttttcctggaaatagaaagtggcatagatgaacactcatttgaggatttcttggttgaagaaaaacgaaaggaactcgagaggctagctgcagaagaagctgaaaggaaaatacaagctgaggaggagcggaagcgaggggaagaaagggccgcgatggaggctgacagagcacaggcaagatccgaggttgagatgaagaaagagaaattgcgccagttgttgagttcagccagtagatatgctgataacttatggtacatagaaccgaacacctacagaggaggggacagggttagattgtactatcacagaagctcaagaccactaatgcatgacactgagatttggatgcatggaggttacaacaactggattgatggactctcaatagctgaaagacttgtcaaatctcatgaaaaggaaggtgattggtggtatgcagaagttacattacctgaaagggcattgctgtttgattgggtttttgctgatgggccacctgggaatgcaaggaattatgataacaatggaagacaggatttccatgctatcgttccgaataacatatcggatgatatcttttgggtggaagaagaacataggatctttacaaggcttcaacaagagagaagagaaagggagggcgctgaaagaataaaggctgagagatctgcaaaaatgaaggctgagatgaaggaaaagactatgagagcgtttctgctttcacaaaaacatattgtgtatactgagccgctcgaagtacatgcaggaaccactgtggacattctttataacccttctaacacagtgctgaatggaaagacggaggtttggttcagaggttcctttaaccgttggactcatccaagtggtcccttaccaccacagaagatggtaaaggctgagaatggttcacacttacgaacaacaggtgtgcaaaacatacagtgcattgcaacttttcaatggacaattttttatatcaagtactaggtggccttcaaaagtaactttaccctaagctacttgtgtaatctatcttgtatggtgaactagttggtatattttggtattggatatg

SEQ ID NO: 22520 - DNA, 2192 bp, Zea Mays
caaccacgggcgcgaaacgcgaccgggtccacctgtcatccataccacggctcgccttcctaatctcgggactcgggtccgcgatgcgagccaccaagagatccacgaatatacccatcccattccccacaaggctccgtcccttcggcggcggcggcgatgtctctcccccctggcccggcggacagtggcaccggcaccggagacgactggttcctcgactgcggcatcctcgacgacctgcccgccgcggcctgcggagccttcccgtgggacgcgtccccgtcgtcttccaaccccaggtccgcccagatcgaccgaccgattcctcccttccccacgccacctcctagttccggaaggcacggatgctttgtttggcgtacggtcctggcgacaggtcccgtgaccccggcgttccgtatctttgcgatgagtatattgtggaatcgtgacgggcggatgaattgttttggggatttgggctgtgtagtagtctactagatgcatgcgcgtggaggcgtctgatccgtagaggtggtttctttacactgcggatcttccagtctgttgctcgtgctataaacctgccgaggctgcttttgtacaggttaaattagattagagttcccaaacaaaaaaaatggtttcctaaaaaaacaaggctgctgagtttgcgcgctgcaagataacttgccttggtaggtttgttctcgtgtttccgtgactgtgcttatgagttatgacagtggaacggatgtattacgtgtgactatgaccaatgatttgctcaaacgattgagatggatgttttaattgattgatggcgattgtaataccagtcttgatgataagtggtgtggctgcgagtgatgggatgccatgtgttgctcggccatggatggaaatggaatcgtgacacctgactggagagccaaagatacaacttctcatcttctcctgtcatgtatgcgctgatgctgctatgatattaattttgagagtaatttgcagtgatcttgttgtttgaccttttttttcttgctttactgaaagcggtccactccatatgctcagaattcaatgccttacatgtagctagttgtctgattactttcgtccatgaatggtttccagttaattggttgagaacagtgtggaagtgggcagctatgtaaacgccaatgatgcattcaaggagcccaatgatgtcttcaaggagcctggcagcagtaaacgtttacggtcaggatccagtgatatgccaacatctaaagcttgcagggaaagaatgaggaggaacaagctgaatgacaggtttcttgaactggggtctgcattagaacctgggaagccagtgaaagctgacaaagctgccatcctaagcgatgctactcgcatggttattcagctccgttcagaatcacagcaactgaaggagactaatggcagcctcgaagaaaagattaaagaactaaaggccgagaaggacgagcttcgcgacgagaagcagaaactgaaactggagaaggagagtctagagcaccagatgaagctgatggcatcggctccagcctacatgccccatccgaccctgatgccggcgcctttcgcccaggcgcccctagctccattccatgcccagggccaagctgcagggcagaagctgatgatgcccttcgtcggctacccagggtacccaatgtggcagttcatgccgccttcagaggtcgacacctcgaaggacagcgaggcgtgccctcctgtcgcatgatcaccttgatggggctggtcctgctcacaccatgtggattagccgcaactagttgtcgttgtcgatccattgatggggtataactgatgttcttaggctatctccagcagcctctctatcctattctctatcttactccctattttaaattttactctgtaaacagtacagtctatagtgtaagacaatgttttgcatgtttatatccacgcttggctggagatgggcatggtagtctgttggtgaccaaggaagctgtgatatctgtggcgaggtgccctgctagaggctcctttaatgggtgtacaattttcgtggtggaaagaagaatgttcgttcttgttctccatagcaacagtgtcatattatctatctatgccatatatattttatatttgacatgtttgtgatacaagca

SEQ ID NO: 22521 - DNA, 175 bp, Zea Mays
ctacatatgtaaccatatatttatcaaaattcacttgttttcaacacaatgcatgcatggtgacaattatgaaatatgtaccttcttttcattattctaggactctcttgtattagttgttctcttgtagtttctggtctctcaggcgtagactctttaggaaaccatcctttgg

SEQ ID NO: 22522 - DNA, 2679 bp, Zea Mays
tcggcccctccccccgcacggaggtccgggacaagtcaatctgccactggccgcgaggccgacccacgccacgctcctcctcagctacagtccctcctccaccgctgctgcgctcacgctcctcgacctcccacactcactgtcagtgtaaagctcacgccggaggccggagctagctgccccctgcccgtgagctagtcactcacagcacaggtgacagggtggtggtgggcggcgggattgcggttgcggcagtagggttcaggctcggataccagcctcctcctcctcctcctcctcctccgcctccgtttccagaagggggcgagcgctaccggggagctcgacagacgccgagccgcaatgcccaagatgttcgggttctctcggcgccggatgaagctgggcaggttgaagggccatctgcacgaccatttccatggccctcgaagcccgtctcggaccaccaagcgttccagcagtcatcacaacgcagaggatccattggctacctcagtgagtgggcgcgccgacgacctcgcctggcgctgctcgtccgacactttcgatctcaatgggcgcgatttcgagagctccgagaactgggcggtcctgtccaccgagggtgacaagccagctcctcgtttcgatcatgcagcagccatggttgggagcaaaatggtggtgtttggtggcgactccggtcaatctttgctagatgatactaagatattgagcttagacaagcttacctgggattctgttgctcctaaagttcgaccaccattgaacgggcgttctctgaagctgaggccatgcagaggtcattgcctggtttcgtggggaaagaatgttattcttgtgggagggaaaagtgatcaaccttatgacaagatatcagtatggaccttcaatacagagagtgagctctggtctcatatggaagcgaagggtgacattccggtgtctcgaagtgggcatacggtgattagagccggtcctgttttaattctctttggaggtgaagatgccaaagggaagaaactacatgaccttcatatgtttgatctgaagtcattaacatggcttcctctgaactataagggtgctggaccttctccaagatcaaatcatgtagccgccctttacgatgatagagtcctattgatttttggaggtcagtcgaagtccaagaccctgaatgatattcatgctctagattttgaaacaatggtatggtcaagggtcaaaacccatgggcatcatccatcacctcgagcaggttgctgcggagctctttgtggaactaaatggtatattgcaggaggtggaagcaagaaaaaacggcaccctgaaacatgggttttcgatgtccttgagtccagatggtctgtttgtgtagtgcctcctagttcctcaatcactacaaagaaaggtttcagcatggttccattgtactacagggacaagatcgtgcttgttgcttttggagggaacaaaaaggaaccatccgacaaggttgaagtactagtggtgctgcaaaacgagcactgtttcagctggcggtctgcgcccgaggtggaacccttactgtacgacgagtctcctccaggctcaagggaactcgccgaccatctcagcagctgcgctccaccgtatcctactagctccgcggcgaggagcggtctcgccgccacagcggagaactcctgcgggaggaaacccctcccggactcactgctacggacctcgaacctcgggggctcgtcgctccgcaggcagttccgtcaggaagaggagtgcagcagcctggcgcaaaagctgcagaaaccgatcgacgacgacaggtacaaggacgccgccgacgagtgctccgagcatcaaccaccctcggccacgaaccctaaaccgcggaacgacgcgcggcggtcgtccccggaggtcgtcgtcgacgcaaaagcgaggaggctgctgggcaggagctcgtcggacatgaacaaccaccaggacgcaagggtggccgccctggtcaggaggaacgtggcgctggaagagcagctgtcggcggcgctggcgagcaaggacgaggcggagaagaacctgtccctggtcatcgacagcaaggacggcctggagaagaggctggccgagaaggacagggaggtcgaggcgctgagggagaaggcgacggggttggagctggcgcaggaggaggccaacagcctctccaacaccgtccacgccgacaacgtgcggctggagcgcgaggtggcgttcctgaaggccgtcatggacgagacccagaaggaactgcactcgactcgcggagttcttgcaggagaacgcgcacgggcattccagcttcaggttgaagtctttcatctgaagcagcgcctgcagacgatggaagggaggtcacccgcagcaccaagaaagcctcagaatgcgtagggtagggtgcaggcgtgtagagtttttgagcgatagatctgctgtagattcattcagtgatgtaatgtaactgtagtaggtgccggagctactgtaatttgtaatattattcgacgcgatgcgatgcaaacgtatttcgcaactgggacgtacgtaattgtgtagaatgagttgcggtcgactatatatgcaagatgtcttttatctaagagttctgagttattggtc

SEQ ID NO: 22523 - DNA, 1838 bp, Zea Mays
tttcagcttgtcactggaggtgctaattgaacaacctcttacattacatacaaaaggcctcctaacatagaagatactaacagaactatgagagatagctgctattgtggaaggtgtggacatcatatcggactccactgttggcgctgctcgtgctcagagtttctctggaaccagtgctagccacacttggccccgtagtactttttattggcagctttcagacccactagttgatcttctcggaagcgttcatgagaatatgtcagaaggaggaagtagacggaatagtttcttcccagtcttcaacagtttttcttttccagagcatgaacatatgaatgaacacagggatggtaacagtgatcaacagactagggagacttattatgctggagaagctaataatggagatggtttaagggcttctctgctttctcaggcagcaagtgttgaagtaaatgatacaaatacctcttttacttctgaagggagctcttcatatttaagaaggcatggaacatcagtgcttgcacaagagtttatggcgtctatacatgattatgacattgaagaagaagaagaagaaatccatgggtttgcattgcctcaccagtctgcacctcgtgatatggaaagcaccgggagacatccattcagacatcaaatagtccggttatctgaaacagctgatatgaagtttaaatggcgggtgcttcttcaaccaggaatcaggcatgccttatgttatggcatgttaattcaagcccttcagcaatctacaggaatcagtggtcttctccgctgcgctcctgaaatatttgagcagtctggagtggctagtttgttttcagacattggactttctcctcattcaacatcaattctcatgagtacccttaatgctttgctgatactcccttgtataactgccgcaatgctgctgatggatgtctgcgggagaagggttattgtgctggccactactcctgtcctgatactatcattgagtgttatgtctatgtccaccctggtgaatatgggaccgttcgaaagtgccgtcctcttccacttcgcattaaccatttgcttctggtcctatgtcattggtttgggaccgataccaaacattctctgctccgagatattcccaaccaaggcccgtgcgacatgtgcaagtttctgttcgctttccttctggtttgggggcctgctttcagcgtactgcttcccggtgatgttgagcaccatcgggcttggcggagcgtgtgggatctatgcacttgtgtgctgcgctccgctttttctcgtctactatcgaataccagagacgaagatgcttaacctggagctcattgcggagctgttcaagctttcaaggcaggagcatgtacagtagattgtccaggaaccgaggtagcccaggctgagtgccgatggatggtgatgtgtgtacatatgacaaatgtaactttggatgctgaatttgtttttgctagttaggaggattggtgatagtgtacgaagtggtttactcttttgctgtccacaggttgctggcagtgtttgtagtgttttgtcttagggggaattcctgtactccactgtaattgtaatgtaccctataacttatttgtcatcgcaaatatcctaatgcaatttcttatccttccataccattgctagtggtatagaagggaccaggacatgcagttttcttatatttttttatgccgtcgccggtggcatggaaaggtaagaaattgcatccatccgagtgtcattacgagagattaggacatttgcgattggaaataaagtattagacaaaatttggc

SEQ ID NO: 22524 - DNA, 1541 bp, Zea Mays
ttccatcttctccaaccaagaaggtgggaaatctaggcctacctcccgtggagctcgatctggagtgggacatcgattctgctaatttgtgacagatcatgcaggaataggaggccaagagaatttctacaaccacaatgaagacgacaccaggacgatgaagtccggtcgaccggattttgtagttcctcgattgttgcttccttaggtatgtcgatggatgggtctgataattgttctgataaatcatttagtaggttcacatagtgagcatccattgttgcgtggtggattgataaaatttctcagcattgttggcattgacttcatgcatgtcatcattggtggcaccatattcaggctaaccactagccatttctaggatttttcttctctcatgttcttataatttgatatctgttccttgtcttctctctcaacatcgtgacctacatgtgaaacaaaggcaagttcaagaggcggggggacgcaaattcgtaagtggtggattcctctcggggcaccgcgggcgggcagccgcctgtggaacctgctaagatgaagggccttctcaagggcctccgatacatctcgcaaatttttgatgcgaaggagccggagatgcagatcgggaagccgaccgacgtgaagcacgtggcgcacatcggctgggacaacgcctccgtcaccgcgcccagctgggtagccgcttccgttccagttccacccccgaccacgccgttcccgtgctccgcgccgcgtccgaatgtccgaactccaactaacagctgcggttgggcgtgtcatgtgctgcagatggacgaattcaaggcttcgccggggacggcgagaggcagcgatcctgagccctcgcagcccggtggatcggaaggatgcggagaggagcaggccggaggaggagaagacggcggcggcaaggcggagcggccgcggagggcgagggggaacaaggggtcgggcggcaacgagccggcgaagcggcgggactgcgcggccgaggggttgcggcgcgaccggcgggtcgcgaaggcggcggacgcggcagagggcgccgagggccagggggacgccgcggcggcggcgccgaagcagcggcggaggaagccccgggcggcgtccgggggcaggtccaagtcatcgtcgggaggcgccgccgcctcggactcggcgggggcgccgccggacgaggacgatcgctgcggctgttgaaggcctgaggcgaaggaaacggtgttcgctgggaacgtacgtgtggcgtggcgcggcggcattgctagcggggccgcgcgccgatgcctgttggggttcgagtcgactggtagtggtacacacacacactgacacacggagggagtagggagggaggcatcttcaaatttgaactaggtgagtgtccgtgcgttgcaacggaaacatataatactatgatattttatgtacaaatgtccactacattgcaaccatcagtatcatacagacttctatatataactaatacaatattcgtgtgttgcgacgac

SEQ ID NO: 22525 - DNA, 168 bp, Zea Mays
ggaggaggtctacaatgaggagtacgagcttatctagctagcgtctcccagttagctttatggcgtcaaggaataatatttagttcgttttatggttatcatttgtttttgtaagatacttccgctatgtaataatgattgtgacatttatctctatacactttgtcg

SEQ ID NO: 22526 - DNA, 3079 bp, Zea Mays
ggaaaacctccagctgaatgttgttagtccaaactatgttgggtccacagatttttaatggatgttcatttgttcccagtagaccttcttggcctgcggaacagcaatgtctggctactcctttggggcaagctaacatcagtcatcagaataagtgaaaatactcttcattcatgtagtgacaggggaaaatccgagaataagatttctgaggacagtcttggcccagaagtaggtgaacaaacaggcaaatatgtcatcaatgcgcaagctgcagaaagttctgatggtactattaactggaatacttattgtacatttgcacggccccggatcttttgcctgcagcatgcccttgagattgaaaagttgcttgagggcaaaggcggtgtccatggtctcattatttgccactcagacatttcacttgcaaaagcatcaaagtctgatttacatctgatcaatatttcaattgacgacgagggacatgaggaagatggaagagactggacgtcacagatgggtctaaacctgaaatattctgccaaactcaggaaagagaaatcagaaaatcaagaacagtctcctttgccatttgggggactgctttcctgcccttcgcctgtttcggttgttcctaatcttaagtggctttgcaaaagagcgcggacaccatacacagttattggtactatgaggggttctagtgcaacagcaactgctgcggaacttaagcctggagtgaaaacagaaatattcactaatggaaatgtttgcgaggatgacaatagacatcattcttttcgacaaactggcctcgagcaaccaggtggactgcaagattgtgataagccttcatgttccgaggagaatggccatggaagacattgtcttgttaacattcctatcgctgttgctgaatatcctatgatgcatcaagtccgtgagggtccagtgagtgttagcacgtgcaatgactccatttgtttgtcaggttccctggatttacctccacacgcctctccagttgaagtaactagatacctaggatgtatacagtcaactgagctgagcagtttaccagccttttctgttcaacatttctttaatgatgaaagtacctctgtggaaggaagcatagactgtgtaagcaatggctgcttagaatctcaggatgatattttagggagcagagatgaacgtttgcaagttcaacaatatcaagagaagatggggcttcgcaataaccccaatatgaagtcagttgattcacacctgatagaaggtttggctgtatcagaaggaaagcatggggaaactgtggcagcattccttgaaaacaaggagcgttgtgctaagacatcctactgttctaatactgaaacaaaaactactaaatctgcaatagacaatcgattggagactcatcatctgggtactggtccagtgaaactaaattcaagctttaatgagatgcacagtgctgatagacaatgcagtttagtctttggctgccttgactcagctgatgttcctgcttcaactcaggctctgtcagtttcacctgttttgatgagtgacgagcagcaggtcgatgacgcccattctgctgtcaaggccattgagcacctgggcaataatctggctaacataaagcacaaatccctgcatatggatgtcctcatgttagaggacgcccaagttgcttccatggctgcagtccctgggcatgagggagaatctgtcgaggctggatcaaattcttttgatattttacttggagctctggctgaagagtccaaggcagcagatgctcctgggaaagatgaagttggcaaagcttccttgacattaataacactggctagcaacgagccctctgttacagaaggcagagttgtagacgtggtggaaacagacacaattttgggagcaggaaaagatgataaacaacttgaccagccacatggcttccatttgtcagatctggtgtctagatgcatcgggagctcaaatagatccgatatcatatgctatgtcagacgcaaacacaaaaggaagagggattactcgtgtttcgtccgctctccctgtgagagcttgaggccaaggtccaagcctgcagtagtcgaggagtcggaatggagcagaacagccgaggcttcttttgctaaaaggggtaagaggacacaagcagtgggatcatttcagtgtgatattgatctgtgtgacatggcatttgagactagggccgaactcaatgcccacaagcgcaatatttgcactgacgagtcatgtggcaagcgtttcagctcacacaaatacttgaagcgacatcagtgtgtccacagcgagatgaggccatttaaatgcccctgggaaggttgtaaaatgaccttcaagtggttgtgggctcagactgagcatgtcagagtgcacactggagagcggccatacaagtgctcggctcctgactgcgggcagacattcagatacgtatcggattacagccggcacagaaagaaatttaaccattactgacagcttctagttttccgagttattggccgcagctcggggcaaatctccagctgcttgtgtcggtgggccttgtttgttgtagtagctcagctcacgtatttattaacaacctgacagctgataggcctagtgaatgttccccgttaacaatgggctagtaatttagtcggtgtaggagttagaaattgttggggggtgaagtgcaacccccttctgttggtgtaggtttgcataagctgatcaccccccactgacacgtggccattcattatttgtttctcagatcagtgatgatgtatttaatccctgatgacaaacttcatgaacactgaaaccatatgatgtcggatgtcaaaatgatcaggggttgccaccgtcctcatgtaattcctgtcttcgacacattgtccaggtcctcattattctgtcatactgtttcagcagattacttgtatgcctttgtctacgcgaaatctaatcatttttaaattcagcgagatgctgccatctatatgccactgtttcgcttagatttaac

SEQ ID NO: 22527 - DNA, 2793 bp, Zea Mays
aaactctctgttctctgaccgcaaactgggcttttaattgggttgctgctatttgcatatgagtttaggcactagcagagtgaagtgctcaccaaccgttggatgagaattagatgacatccaggtgaggtaaagtcgaccgtaactttaccagtccgcgccggcggcaacctaccctgctttggctccgggcctccggctgggtggctagcgtgcctctttttgttgtcgtaaaccctctctctctctctcgcgcagtctcgctccctctgtctctctcttagcgacgactgggcggccgtcgctgctggcctgctgccctacgccaggtgcccaagtcttcttcgggctcgtcgtcgtcggcgacgaccaccaccaggtccctgttgtttttaagaaaaacaaaacaatggaggcaacattagcattctcccaggacagcccaccaatttcgataatttgtgcagcaaagtttgtgggtctacccctaaccattgatcctagccttgcttctggcttggcacccaccctacgttttgcttctggagaatcactccatggtgtcaacccaatcctcctgtacattgccagcggtgcaacaattccctgcttctctgggaagaatgatattgagtttgggcatgttgttgaatggcttgaatatgtccccatctttctttcaggctctgaatttgaaaatgcctgcttatttgttgatggattcttggcctcccggacctttctggttggtcatggcctcacaattgctgacattgtagtttggtcaaatcttgctggaattggtcaacgatgggagagtctaaggaaatcaaagaaataccaaaatcttgtccgctggttcaacagcatagattcagaatacagtgacacactgaacgaagttttggctgcatatgttgggaaaagaggaattggaaaatctcctgcaccaagccttaaggaaaaggtacatgtttcaaaggatccatcagctccagaagttgatctccctggtgcaaaagttgggaaagtctgcgttcgttttgccccagaacctagcggttacctccatatcgggcatgcaaaggctgggctattgaacaaatactttgctgaaagatatcaagggcgcctaatagttcgatttgatgatacaaacccttcaaaagaaagtaatgagtttgtcgagaacgttttgaaagatattgagacgttggggatcaaatatgatgctgtcacatacacatctgattatttcccaaagttaatggaaatggctggaagcttgattaaacagggtaaagcatatattgatgacacaccgaaggagcaaatgaggaaagagaggatggatggtattgagtcaaggtgcagaaatagtaccgtggaggaaaatctgtcattatggaacgagatggttaatggaactgaaaggggtatgcagtgctgtgtacggggtaaacttgacatgcaggatcctaacaagtcactcagggatcctgtttactaccgctgtaatattgatcctcaccatcgtgttggttcaaagtacaaggtctatccaacatatgactttgcttgcccatttgttgatgcattggagggggtgacgcatgcccttcggtccagtgaatatcatgacaggaatgcacaatattatcgaatccttcaagacatggggttgaggagagtagaaatttatgaattcagccgattgaatatggtttacactcttctaagcaagcggaagcttctctggtttgtacaaaacaagaaggtcgaagattggactgatccacgttttcctactgtccaagggatagtacgtcgtggcttgaagattgaggcattgatacaatttatactccaacagggtgcttcaaaaaatctgaatctcatggagtgggataaactctggacaatcaacaagaagataattgatccattgtgcgcaaggcatactgctgtgctaaaagaccagcgtgtcatctttactcttacaaatggtccagagaagccatttgttcgaattttaccaaggcataagaaatttgtgggtgctggaaagaaggctacaaccttcgccaacagaatttggttagattatgctgatgcagcagccattagcaagggtgaggaagtaacccttatggattgggggaatgctatcgttaaagagatcaaggtggagagtggagtaattactgaactagttggagaattacatcttgaggggtctgtgaagacaacaaaattgaagatcacatggctagcagatatagaggagctagtccccctctcattggttgaatttgattatctcatcagcaagaaaaagctagaggaagatgatgacttcctcgagaatctcaacccttgcactcgacgagaaaacccagcccttggagatgcaaacatgatgaacctcaagcgtggagagatcatacagctcgagaggaaaggctactataggtgtgatgccccttttatcagatcgttgaaaccggtggttctgtttgcgatcccagatggccggcagcaggccttgcttaactaggcatgatgaccacttttggcacatggaattcctgagatatcggagtccgcaatcaatattgttgcattatacactttgatattgtactgtgactgggcttactcatggtgcgctagatggccaggcctatcctgtcaaccaagcagcacagccattttgattttggtcttggcctagagatctttggaaaaggtattacaaagaataagttgttttatgaatggacaatgagaatg

SEQ ID NO: 22528 - DNA, 1105 bp, Zea Mays
gaaatgctaagtggcaatctatcactcaaggattacaatcaacaaggaagaacaacatttcatgctaaggacgcttctgagtttgctgcacgcaaggcattttcaatgcaagatagggaaaaacttgaacagcagttgcatgacatggctttgatgattgagaggctagaggggagtcgtcaaaaactgctaatggagattgattctcaatcgtcagaaatagagaaactgtttgaggagaactcagccttatctgcttcttatcaagaagccattgatgttactgtacaatgggaaaaccagaaaatttcaggttagagactgtctgaagcaaaatgaagagctccgttctcacttggagaaactaagacttgaacaagttagcctgttgaaagtaagcaatatcgctacccaatcagatgggcaaactgaaaacagtatctcaaacccaccacaaatggtcatcgagaatatttctctaaaggatcagcttataaaagaacagagcagatctgaggggttgtcggcagagataatgaaactttcagctgagcttaggaaagcagtccatgcacagaataaccttgcacgcttatacagacctgtattaagagacattgagagcaatctgatgaaaatgaaacaagaaacttatgcgacgatccagtgatacatgttgacatgttgtgaaactcagtcctctggcatggccgcatgggctccacgttactgattttcgtcgtggatgtatttatctcatgccatcttcaagatgctggtgcaaagcagttcttttcgtggccaccatttataagtagagttcagtcgagatcgttgtacttgtatcatactcatgtatacccgattcccagactggttcatctcgtaaattggaagcgatgtttggatgcctatgtatcaagtggatcataaacatccaaacaacgccttaaaatagatcgtttcgacattattattttcctgcttgcaatccaggctctaacaacttctcggtcttgtttaatcctttcatttggcgagtccgcatgttcgagtttgagttctagaccagtccgcatatatggattgtttggatgaagtcgtc

SEQ ID NO: 22529 - DNA, 284 bp, Zea Mays
tacagtctggacagtaaaagcttggaggacgaatttggatccatgtcccatgcgtgcaaagtgaaattcttaattattggttaacagaaatgttgactcaaattactagaaattaaaaataaattgctaaacgcattgttttttacagtcatacgttaaaaacaaaataaataaaaaaagaggtagttgaagttagttggaatgaaatgtgtattttatatgtagggtaggagataggggaatatgtagaggtaaccgttgcgggatgagtaaatatagaggag

SEQ ID NO: 22530 - DNA, 2322 bp, Zea Mays
ctgcactaacccttgtagctcaaatttaaggcctctgatgtactgctccacaaagaagacttcatcaatctctgaattgtgtatagccactctataacggacctcttcaaattctttggtgtactccaataaggagtgctgttgccgtaggccgagcagctgtcgcatggcttgggggtaagactcagctccaaatttgttcatgactgattcagtgaagccctcccaagactcaataccatgcttgattttgtggacttggtaccaacgggcagcattctctttcatgtgtaacgaggcagaaacgacccaaatgtcctgtgggattctgtatatactaaagtaagtgagacagtgatcaatccataccaccgggtcacgacccacaaactcgggaaactgcatcttgggaagcgaaggtggtggtgggtcatgccgaagaccagttcttcctcttcttggtcgctgggggcgtcttggggaatttgaaaggtgaagactttctgtcctgggggtaaaagaagcatcttgatggtgcatccgacggtgatggggatgatggtcaccctgtgatccctgatcagagtcaagctgtgctgccagtcgctcgagccgcatctgcgctaccaccttgccggtctcttcaatctgccgagacatcaacaacctctctctggcggcttcttgtgcaactccagcggcaagatcagcttgtgccatgagttgctgctgaactccatccatcgttaacatccgttgttccaaagaatccaacttttgaaaaacccgatcccatcgcgtctcctccctctgcgaatccgatgccatagcgtgaaggatcagctgagtttggagcgagggtttacctggtggagccgtggcggatgatcgagggtggtctcgtcgtggccgtgacgagacgtggttgaagacgctgctgccgcggcgaaagcttgcaacttgagtcggggaaaaaaaattcccgccttcctgacgccgagtcgacgatccaacccggctgaggaagcccaggctcttgataccaactgtgacgacccgtggccacgacgcgcctacgccggacgtgagccgagcagtggatcgccggtgagcgtgtcggcgatggcgaggaagacgctggatcagccggagggctgccagatggatctcaaggatagcctctccaaatttaagcaacagcaggagagatgccagtcatcactggcgagcatagctgcttcgacctcaaagccaaagcacagggcccaaccagcgcatgctcctaacgtcccagcaagaccatcacaacctattaagttttcaaatgatacagaaaggctgcagcacatcaattcgattaggaaatctcctgttggagcacagatcaagcttgtcattgaacttctttacaagacaagacaagcttttactgcagagcagataaatgaagcaacttatgttgatattcacggtaataaagctgtctttgacagcttgagaaacaaccccaaagtaagctatgatgggaggcgtttctcttacaagaaagttcccagaaggtcttgctgttgtggaagtcaaggatgcatattcaaatgtattggaagatttgcaggctctgaaggctgctggtgaggtttggctgttatcaaacatggactcccaggaggacattgtatacccaaatgatccaaaagcaaagatcaaggttgatgatgacctgaagcaactcttccgtgaaatagagctgccacgtgacatggtcgacatagagaaggagctacagaaaaacggtttcaagcccatgacaaatactgccaaacgacgagcagctgcccagatcaatggcgtaaaacccaaggctaagcccaagaagaagcagcgtgagatcacaaaacggaccaagctcacgaatgcccatctgcctgagctgttccagaatcttaacacttaaacgtgctacagtatctgacgacggaagatggttcattttactcctatttattgctacgttgtgtgtatgtgttatgcagctatgctgtatggcttatggttatgagcgccacaaatttgtttgtcaagattctggatgatatacttatgcattctgacataataggaggcaaaacctcaagattttccttatttttattttatcaattacagcattttctgagtttgcggcattatgtttggttgattttgggtcaattaggttggtgtgaggacaagctgaacatattttgatggattgcttagcttgaaatgataccagaatttaaacctcataattacgagtactgcggatctgcaggtttagct

SEQ ID NO: 22531 - DNA, 650 bp, Zea Mays
cagcgcgctccctcctggccgcctctcgagcgagtggcgacgacggcgccttcgctgcgcctcagtcttcttaggcggcgcccctacccctcgaagccttccgccccacctagctcccgtgctcgccagcgtccactgaccagcaggctcccagcccccagctcccaagcggccgcagtgcccctgcaggccgcggcctagcccttgcctgtttgcgtcttgctgctgcacagtgagccagacagcaagctttgtttccttccattcacttcgttgtagtgtggagatcagactaaccaagggcaacccaaatttggggattctttaagtgaagcctctgtatagagatagtttgaagatgatgaaccagcacagggaggaggatgcattgagaggtcaagcagtcaaaaaccagaagaccctggaaatgagattcttgctgcagaaggcattttctacttccaacaagttgccccaggaacccatcagagcaaggttttgcaatcatgataagcagatagaacaagcctatgatgatctgttgaattcatcgaagcagactttgagcagcatgatggagctgcaggaggctatgctcgagagtaatcaggctacaaagggtgccaatggtattgctactctccacattg

SEQ ID NO: 22532 - DNA, 192 bp, Zea Mays
gggagaagagcaggcggttcaagaggagccacataacgaggagttcgatctgatctaggtggcatctcctagttgacttaatggcgccaaagatggatttagtttgttttatatttatcttttatttttgtaagacttatgctatgtaataagtactctgatgttattgtgacattattctctatacactct

SEQ ID NO: 22533 - DNA, 3639 bp, Zea Mays
cgccaatcggctgtggccgaaccgtcgtcgaattctccccgtggcagcccgatcatggcgtcgccgccggcggatccgcacccgaagaaacgtagggtcgccgacgcccaggacccaagctcctcctccaatcctgcacccacgcggcgtccttcccctgctccgcctcctcccgaaaccctaggtgctgtggcgtcttcaacctcctccccacctccgacagaaaccgcatcgctgccgccggagggggtgaggcttcaaaagcttcgcaaccaagaggagttgagaaatgtcttccagcgctacagccgtatccgcaagtacatacaggagcataaagacggcggcctcacgcccgagctggagcaggactatctctacctcatctccgcctcccgaggttgtgaaagtgtacagtgttttctatctttgccaatccctcgatttgcctcacgctgtcctactgcactcgaggcggcgactaaagttaccatcaacatgtacaattgcaacatggccactgtaaagagaggggaggatttgaaaagtgtgccatacaagacagctaaagcatgtatcattggcttaacttacatatgctctgcagcatcttctgaagaactcaagtcatctgttatgaaaggaatctgctctgtcgtttatagaactgtcctctccttcttcatttcaaccttggaggggaaggatatctatcgtatggactatacaaaacgtgcaatgcttcaggaccctgtgacgttgttagacactttaaaattggagttggacaatgctaagcaaccaacaattgataatttgtctgagctgggagctatttgcttgctttgcacattccttttgttcccagagaatatactagaagcctgttttaagctgcttgattctgcagaatgtgatgatgtaaaaggagaagggttataccttttaaatcagctgacctgtcatctgacctgtaatgctgcaaatgatgctatgggtgataagatcgatgagcagtgtcctgtgatggaaggaaatttgtccgacaccaataaatttgttgattcaaatcctgttgtttcggaaaatgccatggagccaaatgagtgttacatcacaatggcatccatttctgagacgttggatattatcaaggtacaagaaattatgtgattcctgtaaacctgccgtggtttctgaggtgtcatcttgtttgaaagttttgggctctttgtcagaaccttccgatgataaaagtcacacgggcaatgagtcatcagtgctggagaaacttgataacaatgtcagagaaaatatgcgaccagatgaactaatttcttcatctgagcagggagcacttgcaaaaactgagagtgtcgataattatggaaataagttttcacagaataagaatgtggacatggttcgttctgataatcagaaatctgatgagctcacggacgcaaaattggatgacttcaaaggaggaactgttgtctctgatgcacagcatcaaggttcaagatctgatttgcttatgccaaaatctgtgtatgattctgctggaggatctacatcacttacttctccaggacaacattttggaagggcaaagcatttattttctgaaccatttgatatttatggcacttatgttgcgagggatgtgatttcagtttcaaaggaactttgggttggttcactgggaaatagagcaactgaggcactagtcagatctaagtttgaggagtttggcccattagtaaattttttgttctatccatccagaaaattttctttagttgagtatagaaacatattacatgctgtgcatgcatgtggatatatgcagggttcatctatttggggcggttttcttcaagtaaagtatttagacaggcttataggtagtaagggagttattcgtggtatagctattggtgaaagccgtcatgtttatgttgctaaagtcaagaataaaaaagacaaagatgaggtctttgatgatttaaagatggcagggctgaagtggccatctgggattactgatattcctggagaaaatgctttgcttcttgaattcgagacggcagttgatgcagctactgcaaaattctatattaggcaccaagctcgtccaaatgtttgttccagggatatgaatctacctggtcatcaacttttggtgcaaaatatagaccactcagtccctgacatcgacttaatcaacgccttctctcaattcggtgaggtcatcaggtggcaaatcaatagggctgatagtaactgctttatagtttatagatcacaagatgctgctgcccgtgcgaaatcacacttgcatggagcgcggtttgggttgaagtcaattagtattgaatcaaggacatacagtgcaggatctgttcatgataaaacagtgtcacctgttgctccgttgttaggccagagtgttcctgacaacagcgtgcgccatgagatcaggaatccaatagtcccaggatatcatgcaggatatgcagcaccaggggatcgacctatttatggtccgccacctccaaatacaagcagagctccacaaggaaattttccttgccctcctgtttccacacaccatggttctgtgatgccaccgccacctattcaaacctcttttgttcgtcctatgtatcctggtccagggagtccctgggagaacactactccaaatccaccgcccttcagccacgtttctcctcgcatgatgcctggaagtaacttccgtgttaatccagcttctcttccttttgtaccctcttgtgttacccctgtttcacagcttcctggaggatcagcacagcattctgagaaaatgccaccatcactacctctgccaactgtagctcccccaccatttacacctctagatatgccaccaacacaccctccgccactacctatttcccagccaccttcagtgccgccacccccaaattctcctcctccgcaaccttttgctgattcgtctgactcacaaaagccaagttctcatcctcaatggcagggtcctcttttaaaaagtggcttgcattactgcagaatctatgcaagcagaatagagtttggatgcctgcagatatgaaaatactgtttctgaaccggcagaatggccttcagcgctagatgtgacaaagcgcacagctttccagcatgtgaagacaactttcaacaatacaccgcctaataagagagaggtctgccggctcgtgccttgttcaaatggtgatcagagagggttccgggatttcataagctatctggtacagaaagaatgcgctggcgtgattaggattcctgctgtgaaggcgatgtggacgagaatactgttcatccttcctcccacatctgatgcatgtggcatggtaggaatcccccctcttccagctgacaccatgattgttgtaactttgcccaaggaaacaacagtcgaagcatcataacaattttgtgtgctacatgtatgtatgttagctttgtcggtgtaagctttttgtggagctttgtgctccatagcagtcatgtaaaaactgtgcataattgttggctactatgcggtgttagcattattatacagtaggtcagctcagttcttctgtcaaa

SEQ ID NO: 22534 - DNA, 178 bp, Zea Mays
ggggaactttctctacatccatgctagttcagggggctttcagagtagcagtaggaatgaggtatacaacccttgcactgatgcaagaggcgactagctaaggtctccggtgcggcggggcagtcttccggtaggagggtttctgcagaaggagccgtgccactgaccgatccatggg

SEQ ID NO: 22535 - DNA, 1183 bp, Zea Mays
attatattacgcatcatcggcatcagggacgtgatcccgccgccgatcccgcgggctttcaacgacgtgtacatcggcatggagttcatggagacggacctccaccagatcatccgctccgggcaggagctgtcggaggagcactgccagtacttcctgtaccagatcctgcgcgggctcaagtacatccactccgccggcgtgatccaccgcgacctcaagcccagcaacctgctgctcagcgccaactgcgacctcaagatctgcgacttcgggctggcgcgcccgtcctccgacagcgacatgatgacggagtacgtggtgacgcggtggtaccgcgcgcccgagctgctgctcaactccaccgactactcggcggccatcgacgtctggtccgtcggctgcatcttcatggagctcatcgaccgccgcccgctcttccccggccgcgaccacatgcaccagatgcgcctcataaccgaggtgattggaacgccgacggacgacgagctcggcttcacccggaacgaggacgcgcggaagtacatgcgccacctcccgcaattcccgcgccggccgttcgcgagcctgttcccccgggtgcagcccctcgcgctggacctcatcgagcgcatgctcaccttcaacccgctgcagaggatcacagttgcggaggcgctggcgcacccgtatctggagcggctacacgacgtcgacgacgagcccgtctgcacggagccgttctcgttcgacttcgagcggcaggctctgacagaagaccagatgaagcagctgatattcaacgaggccatcgagctgaaccccagtttccgatattagagatggatcggatccgtgcacgattcctcgttaatgcacggtgtttgtaaataggcgtaatataagattgaaggctgcatttgtttgtttgtttgttttgatgttcgaaccaaggcaaccatcctgtgtctgtgaggccgtgtaatctgtcgctgcaggtttcaggcgtccctgtaatgactaatgagttgtaccaaacataaaaggttcggatcaaaaggcgatgagttgtaccaactaccaagataaaaaaggtgatgtgatggttaatggtatcattttcaagttatatgagaatttagtgataatttgtattcgtgggccctctttacgtatatcttaa

SEQ ID NO: 22536 - DNA, 1922 bp, Zea Mays
tgcaatattgtcgccacagccccaacacgccaacagccagctgctcaggctgctcagcaccacactcccgcggtgccgccgtccggcgttatcccgaatccaaacccctccctcacaggctccctctcagcgatagcggcatccgagccctcctgcgcgcccactagggtttatctcaagcgaggccgcgccaaccgccaatggcgctcgcgcgcccgtcctccgctctcctctcatgctcctcgtccgcctgcctccgccggctcaacccgctcctcctctctgccgccgcctgccgccgcccggcgtgggccccgcgccgcgtcgcccgcaggttctccgcagcgattgcctccgagacggatgtgttcaactccccggaggtcgctaagtcgttcgacttcaccaacgaggagaaaatttacaaatggtgggaatctcaaggattctttaagcctaactttgaccgtggaggagatccatttgtcatcccgatgccaccaccaaatgttaccggatcactgcatatgggccatgctatgtttgtcacacttgaggatataatggttagatatttccgaatgaaagggagacctgcgctgtggatacctggcactgaccatgctgggattgcgactcagttggttgtggaaaagatgctggccgctgaaggtgtcaagaggacagatatgacgcgagaggagttcaccaaaaaagtttgggagtggaaagagaaatatgggggtactatcactaatcagattaagcgattgggtgcatcttgtgattggagtcgtgagcgtttcactcttgatgaacaattgagccgtgcagttgctgaagcattcgttaggcttcatgataaagggcttatatatcaaggatcttatttggtcaactggtctcctaacctgcaaactgcagtatctgatttagaagtagaatactctgaagaacctggaaatttgtacttcatcaagtaccgtgttgctggcggaaccagggatgattttatgactatcgcaaccacaagacctgaaacaatatttggtgatgttgcaattgctgttaatccggaggataagcgttatgcacaatatgttggcaaattggctattgtaccgttgacatgtgggagacatgtccctattattgctgatcggagggagaagcaggtcctagcattactttcaaagcttgacgttcagaacgtacattttactgaatcagcaccaggcgatgcaaaccagtcggttcacattgttgctgatgagggtttggaggcgtatctacctttggctgatatggttgacgtgtctgaagaggttaagcggctctccaagcgcctctccaagatgcagtcggagtatgatgctcttgttgcccgactcaattccccaagttttgttgaaaaggcccctgaagatattgttcgcggagttcgtgaaaaagcgtctgaggcagacgagaagatctctctaactaaaaatcgtctcacttttctgcaatcaaccattaccacttaaatacagtaatccacggggactctaccaggatgccattttgatcgatgacgcaggacaaaactgattgttaatagtttttggttgaaggatatgatagattggcaacgaagttgtgccttgtccagcagaaacacacattctttctagttcatatctgttgtctcttgaaacttaaaacatacattcggctaggcatataatttatattcctgacttatggttttagagcctttcgggatgcccttagttgaggtaaattttgttctgcctctgaagttttgctgatgccattgttagtaatattcatattttgtaaggtgggcgcacgttattagatatgaatgatctgtaaggtcggtgcacatgtattatcaatgactattgtttcgggcgtca

SEQ ID NO: 22537 - DNA, 1926 bp, Zea Mays
tcgtctatagctgcaagcctgcaacccttcctttcttttcctccttctattccatcacccccagcgtgcgcgctgcactccctccctgcccctgttctctctctcgtggcgacggcgacggcgacgactgggcggccgttgctgccgccctactcgccaggcgcccaggtattcttcggccccttcgccggcgacgagtgtcaccaggttcctcgtctccggaacgcagtgcaaagcagatcgatctcggcccagcaggggcctcacgacttgactcccaagggctcccaaccttgcaggctgactcgatctctttggtttcgtggaccgtgatcagactccagggctggatcgtgtttcttccagtgtgcaagcttggatctcgtaggtctggtttagaaaggaccgtgcttgctctttgctgccgcaatcatgcagagtgggggcgacatgaggcctgtgcacaacagtgtcgatacagttaacgctgctgctgttgccatcgtcaccgcggagagccgcacacagcctcctgctgaacagagaaggaaatgggctgaccggttgagcgtgtacttctgctttggatcacagaagaatggccggcgcatgcgtgtcaaccatgccgcacttgtcccagaacctgcacctcaaaggacagatgcgcctgcagcagaaattccaaaccacccaccgcctcctgtgttcccctttgtggcaccgccatcctctcctgcttctttccttcaatcagaacccacatcaatcgtacaatcaccaagggctggagctccagctttttcgcccctctcaccaaattcccaatccccgacggggccaccatccatctttgctattgggccgtatgcacatgagacacaactcgtctcgcctccagtgttctcggccttcacaactgaaccatcaactgcccctttcactcctcctccggagtctgtccatctgacaaccccttcctctccagaggtcccatatgcaaagcttctgacatcgatcaacaatagcaagaatggtgaagcagggggtgatctccagtcgtatccaaactacccagacagcccaattgggcgcctgatatctccaagctcgggctgttctggcacatcctccccattccctgaccctgagatgcaggcttcttcacgcagcgctttacgcttgttcccagttcgtgagccccctaagatattggatggcgagggcgttgcgacacagaagttgatacctcgccatatgcgcaacggtgggtccctcttggatggccagatctcagcagctgtaccagttgtggacttctctgcccgacttcaacccaacgagcacgcaatggatcaccgggtgtcattcgagttgaccgtcgaagatgtcgcgcgctgccttgagaagaagactgcaatctccggggattctggcacggcatcattccaccttgcaccgaccggcagcggcgaccaccacagagaatccaacgaggcaagggcagggctctacgtcgacgaatcataccatgacttgcccgagaaagcgaggcggtccctgtccctgcgcctggccaaagagttcaatttcaacaacgtcgacgtcggtagcgtggagccgagcgtgggatccgactggtgggcgaacgagaaagtcgccgggatgacaactgagccaaaaaagaactggtctttccacccggtggtgcagcctggggtcagctaacctttgcactgaccataatgatcttatacagggatgaaggaattagcttcttctgcttctgcttctgcttcagtggtcgattccttagggatgacttgccagcttgttctaaacatgcagctagtggttacagggtcccgcggtggctggagctcgattcaagaattgacagcgagatggtgtggacccgctcaacgtgac

SEQ ID NO: 22538 - DNA, 187 bp, Zea Mays
cgcaaaacgaatgtcacatctttactgtataataggagttctgtacaaactaaataaataattacatcataaggagacaacgatccagcaacccaaagttgactgggagacgacgacctagacctctcacgaactcatcacaacattctccatgcgcctcaccctgcagtacctgttcttgacctgt

SEQ ID NO: 22539 - DNA, 4316 bp, Zea Mays
cggggctggaggagcactcttccagcctgtagctgtgaagggctcctcttcatactgaggaaccgcaccctggctaataactcaaatgcttggtctcagaaataagagggccctgctgcaagtgccaaccaccgttaatgctgctgcagtgctgcgtcatggagaaggaagatcttcatgttgatgatcgggtccgctcctgcatcatgtgccatatcagtagcatttggtctgtgtatcaaatgggacatgtacttggctgatgaggtgaggaaaacactggataacgtaacgactctttcgcagtggtggtggcggtcagcaggtgctctagaggcttgatatcacgtgcatgtgccgctgtaaataacataatgctctatgtacgtgtacatctctactactctataagcctgtagtgtaggcgtgcacaccccgtgcaccgtgttctgcctccaacgtcctctcgcccacgcgctccgtcaatcacgcaagttatgccaccgatgtcgcccgaccgccccatccgcattgcccccacccccgtccgccgctagatgcggatcccgccgcttccagcatccagccaagcccgtgagccgcacgccgctcctgctcccgctccgagcgccttaggtcaggcggcgttggcccgacggcggggggaggcatcacgctgccatccatgggcgcgcccccgccgccgctgcacccgacgcccacctctcccacggcgcgcccgcaccaccaccactacctcttctccatcaagcagctcaacacgctgggcgcggcggccgtgctcgccttctccaccacggtcccgctctcggagactgccttcgcggtgctcctcccccctacctcctcgtcctcgcctggctcgccttcccgcagcgcccaggccgctcgagacccggatcccgcctctacccctcggcaccatcgtcagtgtcttcgatggccacaacggccccgacgcccccaccccgacagacactgagccctcttccgctcgcgtgactggtgccccctcaaccctcgactctcctccccaccgtggccccttccccagccccagtgaccagcgcctcccttcctaagtgcggccatggcgaccatcgtgccctagcccgcccctgcaccatggcaagcacaccccttctactcctctcgccccaacccctgtgcagcccagcgcggtggcctataacccacagcaaggcgcaactagctggctggtggccctgccccggtgagcccctgctaggcgcggccagcaacccccgtggtctagcccctgcctaggcacacccaaaacccctgcccttgcaacttgtcctcggcgccgccccactcgcccgagatctgccgcgacaacaggaattggacgtacattgggactttgaagtgcagctaaggctacctggcgattggtggaaagagatctgatgacggcgatcatggtcgaagagtaggagaggccctagaagaaagcggaataaatgcaccgagctgagaaaggacagaacaaagaaagatcttaaaatcaaagctaaagaagtggagattcaaaatctaaaaaaaagctaatgtcatggaataaatgaggttgatgtggagctaaaaagggaggctatgtttttttgggtgaggcggttatcattggcttgttatgtgaacattattgtgatgtggtttcatgttgtccaggtgccagtttaacaactttttgcaccaccatgtcgagaatatcattgggtcatgtctggagagtaataatgatcaactgatgggccatgtccttgatgagtgtaaacttgttacaagaattttggaagcagagaagaactctgctctatcgtcagaattggacggtcgcatcgacgccaggttccagcagaggagtcgttactctccttgattccttcaccgagttcaccgaggaatatgaactgaaaatgaaagagaagggtgagcaactgattgtaagatctttcatcagtgcaacctctccttttttagctttcatcagtgctacactcccacagtccccacatgcacgcagatgtttgaaaatataaaataaaatcaacaacactgcaaatttactagctcaactacaagaggcatggagttattattaaaaaatgaagtactcatgatgaattccaaacaaaaaatctgacctaataatcaacataatataaattgttgtagctcagtcctatagtcatactgagctactgattagaatgttcaagaatgaaccattagatttcctgtgctaaaatgaggattgatcataagactaatgacgatcaagactatcaaggcccctacaaacaaagctcatgggaaattagaaagtgaaatgaaataccatgttgaaaacagggccaaagtagctagcaattcaaagaggcaaaatgctgcaaaatataatgcttcatgaggtcagtaaatacatatttggtaattccatgctaatacactgatgctttaagatgcctgagacatctatcttctttgttagttgttttcggtgttgtcaaaatctcaggtgccacaatggatgaaagaacaacatgtagaattgggttccaaaggacttgagggctacttcatcacaacctgtaactgaagatcttgaataactgactacatcaccatgcaagactaaagtttttattttattaagaaaatgaccccaaagaagaagatgtgtgatatatccctgatgactgcatatgtgttgagggttactacacactgaaaaatagaataacagactctgtggctgttagtgaagagggattagtcaaaaagagaacaaggcgtccaaaacctgttggcaatgagggggctgtcagaaagagaagaggctctgccatcccacaactataattgttcaatatattgtacctttttaaacctttagatggctgaattgaagggagaagatgatttatcagcaggctctatgagcacaactgcatagtcaagacataattcttcggcccctgcagacttcaagcagctaagaagtgttacgcccattgacatctttccacgacaagagacctgggcaagagaatccggacgtgctgagggggagaggaaggagaggaggaagatatcgggcaagagaacccattgacatccttggatagggtccgtctgatgccattcatcgctgtctttgatctcaggaaggcatcttagccagctcaattttattagaaatattgttgttttaagatacagagtccatggttactattgtacgcttttctgagaaacttgtcatcccaataatttggttctggagctatatactgatctagcttgttttagtaacaaatgtaagttgctcacatttcctttagactgtcactagaactttgaacgatcaactcgtgcttctaaatcaagaattaccatatgtgttttttgagttcgatcccttctattttttatttggccaccaaacgaagtttttacatgacaagaatgttataaatacttctttaaatcacgagtttcgtgtgtcacgtacgtgcaatgtaggtatatttctctttcatgcttctcgcgatcgattgtgccgtcgcaacgcacgggcattaacctagtctgtacatatgctgccagtgtgctgtgtgcgtctggtgtcgcactcgagtagtacgcgacgggtctcctgcggccctgttggagtcgtcaattgtcagccaccttcgaatacgagtagggatgacaattgacaacggggacagaccaggagctgtatgaaataaagaacattgtagatgctcttaatgagcaacgcgagaagttgcaagagcaaagaaagctgcttcattcagaccgagaaccaatctgacagcaaatccagcagcttactgggttagaagagctgaaaattgaatctgagaacgggcaactaactgtctttgacacaatgtgagaacttaaagaaataaaggtggcgtggaaaacctgaaagagaacggtgttcacatgtctcctgacgagaggatgtataaaaacgcaaatgcaaagcacactactgtgaagagattggaaccgtctcctgcgatccacaccaattttcctgggtgttattagaaaatgtgctcaggtgatattcaaaggctgtgcagagaagagcgctgatgatccccacaacacaacgatagattggtacctgcaaagttggcaatgcaaatgtcaatggctctagcttaattagctgctgctgcctattcagatgaactgttatttggtcatcagctggaaaatggtgctgggaa

SEQ ID NO: 22540 - DNA, 2165 bp, Zea Mays
tggccgtcgacttatcactggatcacaaagtggtgaatttacgctatggaatgggcaatcttttaactttgaaatgatacttcaggctcatgatctacctgtgagatcaatggtttggagtcacaatgaaaactggatggtgacgggagatgatggtggtgcaatcaagtattggcaaagtaacatgaacaacgtcaaagtgaataaaacagctcatagagaatcagttcgtggtttaagtttttccaggacagacttaaaattctgctcctgctccgatgaccgaacagtgaaggtttgggacttcgcaagatgccaagaggaaaaatcattaactgccaggccacggttgggatgttaaaactgtcgattggcatcctacaaagtctttactggtttcaggtggcaaagactatcttgtgaaactttgggatgcaaaaagtggcagagagctgagctcattccatggtcataaaaatattgtgcattgcgtgaagtggaatcagaatgggaactgggtactgactgcctcgaaggatcagattattaagctgtatgatattagatccatgaaagagctgcaatccttccgtgggcacaccaaggacgtcactgcattggcgtggcacccatttcatgaagaatattttgttagtgggagctttgatggagctatatttcattggttagtcggccatgaagctccacagattgaaataagtaatgcacatgacagtagtgtctgggatctttcgtggcatcctgtaggctatctactttgcagtggaggcaatgatcacgctacaaagttctggtgtagaaacaggcctggtgatcttacccgtgatagatacaacagtggccaaatgcaaggttttggtgaccaacatgctgcttttggtgctcgtggtatgggtggattccagatgcctgaacctccaataacgcctggaccatttgctcctggattgtcacgcaatgaaggtaccatccctggcattggggttgcaatgaccttggcaggccagtcttttgatggatctgatggagagcagaggccatctattccgggtcttccacctgggcaacccccgctgccaccaggtcctcatccatcacttcttgggcagcaacaacagtatcaacagatacctcagcagcaacatccccagttttcgcagccaccacctccgaacatgccccaactgcaggcaccagctcacatgctttcacattcacaaggatctcggcctactcttccccagcttccaccaatgggtggaccatcagtgccatcacaagtgaacccaccgcttccgcctatgcctcacccaacgagtcagatgatgccccaaatgccacagcacatgatgggcctaaatcagatgcatgctggttctgtgcctcctggtactgtacccccaatgggtgggttcccaagtgggatgggaaacatccaaggagcatcaggttcgtctggcgtacaaaattttcctatgggtggcatgtataatcggcctcagggacaaatggctccacaagggcaaatgacatccattcctggtctaagctcttaccagggaatgggtaatgttggccttacaccgccaccgccacagcacccgccgcctcgaggaggctcggcaacacagtgaccatccctggagcaaaacaaggattgtactgaacctaaactttctcgtgacactaaatttgtagcatgtaaatccatctcgagcaatatcagcgtgtctagactcccgcaaatcacgagggatttcttcacgattattgctcaggcagctaggatttttgctatctcgtgctgtggtttacaactgggggccttctgtcatgtgcctcatttgtactgtaattcgaatcgtgcctttacttgccggctgcttagatgttgaacatagagaattctttccctcagttttgagaagcgtgaacttcacttgtgccagttattgcatgtgtactttacgagttgttgacagacgatggcagtcaatacgtgtgatatcctgaccccggttgacagtagaattgattggcctaaggcttaatagaattgatagtgtattcatatcaacaagatgtattttctttttttaagtctgtcttgaaaaaatcttcaaattaagggtgcttgacgagca

SEQ ID NO: 22541 - DNA, 895 bp, Zea Mays
ccgaccccagaccccctctcgcttcgcccctcctcatcctctctcctctctcccccgccccgttcgtctccggcgagctagggtttgcccccccgccttgccaccccacggttcccgccatccttggatctccagccatgtacggcggagacgaggtttcggcaatcgtcatagatgtgggctcttacagctgcaaggcgggctacgcaggcgacgacacccccaaggccgtcttcccatcggttgttggttcaattgaacaaactgaagacacagatgaccccaagccagagaaggaagctgactctgcatcagattctaagaacggtgccaagcccatggatgtggacaaagccaagacaaaacgcagactttatgtaggccaagagttagagttcaggagggatcacatggaggtgatttcatctatgaaagatggaacggtaactgactgggatattgttgataatatatggaatcatgctttcagacggaggttgttgatcaatcctgaagagcatcctatgctcattgctgaaccatctacaaacactgcacagcaaagagagaaagcagcggaacttatgtttgagaactacaaagtgccagcgctgtttctagccaaaaatgcagtgctcacatcttttgcgtctggacgagctacatctttggtggttgacagtggtggtgggtctactgtggtttctgctgtacacgatggttttgttttacagaagtctgtgtcgacttctccagttggcggtgaatttttaactgactgtatgatgaaaagcttggagagcaagggcatcgtcattaggcccagatattcatttaagaagaaggaaatcagtcctggagaatataaggaggctctcacgtgagtgggttgtgg

SEQ ID NO: 22542 - DNA, 473 bp, Zea Mays
ttaggatttgctgcgcgtcgtcgttttacacctctggacatggaaaccctagaccaagcgaagatttggaaactaagaagacatctattgctgtcatcataatagctagtgttctcgcttcagtccttgtcgtcactgccttgttcgggggcttcaagtattggcagaagaagaagagggagcgagaccaggtgcggttcctcaagctctttgaagagggagatgaccttgaagatgagctgggccttagtaatgaattctaaaatagtgcgtacagtcttacttccgatgttttcagatgtagtttccacgtatgatgtatagaatgtgtgtttttggtgacctcctagtagcttttgcagagggagtgaatcttgcaacagtttgcacaagccccgtaacgtacatatataaaagtgcaaaaatgaatggattcacgtatagccttcaattcttcatcgaatgcttcacgt

SEQ ID NO: 22543 - DNA, 3570 bp, Zea Mays
tttttttcccccacgaccaggatcggtgagcgagtccaagcggccaaatccaatcgctaaccaccgccggcgtcctcgtctacgtctactacctgctctgctctctctcccccacaggccccgcagcatccacacgaggacttcagaatcagcagcagccagcaggcagcagctcagcgagacagacgcgtccggggctcccctccgcgcgcccgccgatcaaggatcaacaacacacggggacgcctcccgtctccttcattcccagcctgcactgcgccgccccagacgcccgcgaccctctccacctcctccggcgaataccgttcctccccggcaagctaccctccgatcctttgttccgggtctgcgaggtagtaccgtcgacgaggcctccctcccctccggcgagccccccttccgaagtcgtgagtcctcccagggtttatgcatgacagcccctgtgtctcttccaaatgagctagaagcggtctcccattctgcaagggttgagttattccgagacgctagttgcaacatagaaaatgaggtgttggccagtttgggaaatggccaagattcaactgctgttggagcaactcctggtttcagagttggagagatcaggtttgctaatggagatatttattctggcacattgttggggaacacaccagagggttcaggccagtatcgctggtcagatggttgcacctatgatggtgagtggaataaagggatgaggcatgggcaaggaaagacggaatggccatctggagccacctatgagggtgagtattctggtggctatgtatatggtgaaggtacctataagggtccagataaaatcatttacaagggacgatggaagttgaatcacaagcatggacttggacatcagacatatccaaatggagacatgtttgaaggttcgtggattcagggagaaatagtaggtcatgggaagtacacgtgggcaaacggggacacttacgttggcaacatgaaaagtggcaagatgtcagggaaaggaactcttacatggaaaaatggggactcgtatgagggtaactggatagatggcatgatgcatgggtatggaatctatacatggaatgaatgtgggtattatattggaacatggacaaggggactgaaggatgggaaaggtaaattctttccgaaaggttgtagagtacctgttaacgacgagatgtatatcaataatctaagaaatcgtggtgtactgcctgatattagaaggcagaatcatggttcacgcatacttcactcttcctcggttgacatggggaacatgaaggttggtatggctaggcaatcttcagatgttttgttcaaaaggaattcagctgagcaatcttctttgaagaatgtgtctttggaaagacggtggagtcttgaggtggctattgaaaaatttattggccatgaatccagcgaaagttctggtctagaaagcttggaaaacttgagtgattctcgtttgcccatactggaaagagaatacatgcaaggtgttctaatcagtgaggtggttcttgacaggagtttttcagactcctcaaagaagacaaaacgccgccagaagaaaacggtgagggacacaaaaaagcctggagagacaataattaagggacacagaagctatgatttaatgctcagcctgcagcttggaatcaggtacacagttggaaagatcacaccaattcaaaaacgtgaagttcgtgcttcagattttggaccaagagcaagtttctggatgaacttcccaaaagaaggatctcggcttactccttcacattcagcggaagattttaaatggaaagactactgtcccatggttttcaggaatttgagagagatgttcaagattgatgctgcagactatatgatctccatatgtggaaattctgctcttaggcaactatcttcccctggaaagagtggaagtgtctttttcctgtcacaagatgatagattcatgattaagactctccgaaaatctgaagtgcaggttcttttacgaatgcttccaaactattatgatcatgtccgtacctatgagaacaccctcataactaagttttttggcctccacagggtgaaaccttctagtggtcaaaagtttcggtttgttgtaatgggaaacatgttttgcactgaattgagaatccaccggaggtttgatttgaaaggatcatctttaggccgttctactgataaaattgaaattgacgagaacacaactctgaaggatttggatcttaactattccttttatcttgaaccttcctggcgtgaggctcttcttaaacagattgaaacagacagtgattttttgagaacacagcggataatggattacagcctactgcttggtgtccattatagagctccacagcacttgcggacacgtgcatcttatcaccggagcatggcagcagatagattgactgttgtttcagaagaagatgctcaggaagatgatgcccttagccatccagaaggactagtcttggttcaaagcagtggtgagaacagtgttattgttggccctcacataagaggcagccgcttgcgtgcatcggctgctggatttggcgaagtagacctactgctgcctggaacagccaggcttcagatccagctaggagttaacatgcctgcaagggcagagcagacccctaaggaagatgaaagcaaaccgttccgtgaggtgtacgatgtggtcctctacctgggcatcattgacatactgcaagagtacaacatgacaaagaaaatcgagcacgctgtcaagtccatgcagtatgactcggtctcgatctcggctgtggacccccagttctactcggagcgtttcttgaacttcatccagaccgtcttccctgagaattcgtagctccatccaccaatacttttcttggaagatgcccgcccactaccacttgctgagaacttcatccagacgacagtccatgtcttcgaatttggagcttgcgagcatcataagaacattgcactctcttcagtgcgtgcctgttccttcctggatgaactggcaggaagagtggccaacaaaatgagattcgttagtgaaattgtgcagaagcaaatcgatcttctctaggctattttgccccgatccctggggtcaccggatcagccgtctggcttcctggagtaggcttggcgtattgggactcgagcaggaagtagatgtgagttgcgaggattctagtgacagcggcgccatagagctctgggattcactgttatgtctcggcagttgcagaaagctgaagcgcctgttgcctctggctcgtgtttcatctgttaaggtgctatggaggatatgtttaataagtccctgaaaacacgcatcaagctccgatacatttttttgtaggacaaacaaaagagtactatgtattttatcgcaaaaacgaaaagaaatggaagcaacagatgaaaatcgcgcgtggtgacggaggaattacgagtgcggcctagttagcatatgtttcctcgtttccatggtgtgagtat

SEQ ID NO: 22544 - DNA, 1664 bp, Zea Mays
tggctgagtttatgggtcctgggcctccattcggtagtcaattttattgggctggtccggcctacaccgacgcccttatataaatcccgaaccctagaaggcagcaccttcctccccaacacgccgccgtcttctgcggttctgccgtttactcttccactttggcctcctctcttgcaagccatgggtaaggagaagtctcacatcaacattgtggttattggccacgtcgactctggcaagtcgacaaccaccggccacctgatctacaagcttggaggcattgacaagcgtgtgatcgagaggtttgagaaggaggccgctgaaatgaacaagcgatccttcaagtatgcttgggtgcttgacaagctcaaggctgagcgtgagaggggtatcaccattgatattgctctgtggaagtttgagaccaccaagtactattgcaccgttattgatgcccctggacaccgtgactttatcaagaacatgatcactggtacctcccaggctgactgtgctgtccttatcattgactccaccactggtggttttgaggctggtatctccaaggatggccagacacgtgagcatgctctccttgcgttcacacttggagtgaagcagatgatttgctgctgcaacaagatggatgcaaccactcccaaatactccaaggcacgttatgatgagattgtgaaggaagtctcatcttacctcaagaaagttgggtacaaccctgataagattgcatttgttcccatctctggttttgagggtgacaacatgattgagaggtccaccaaccttgactggtacaaaggcccaaccctgcttgaggctcttgatcagatcaccgagcccaagagaccctcagacaagcccctgcgtctccccctccaggatgtgtacaagattggtggtattggaactgtgccagttggtcgtgtggagactggtgtcatcaagcctggtatggttgtcacctttggtccaactggcctgactactgaggtgaagtctgttgagatgcaccatgaggctcttcaggaggcccttcctggtgacaacgttggcttcaacgtgaagaatgtcgcggtgaaggatatcaagcgtggttatgtggcctccaactccaaggatgaccctgccaaggaggctgccagcttcacctcccaggtcatcatcatgaaccaccctggccagatcggcgttctggcaaggagcttgagaaagagcccaagttcttgaagaacggtgatgctggtatggtgaagatgattcccaccaagcccatggtggtggagacattctcgcagtatcctcccctgggtaggtttgctgtccgtgacatgagacagacggttgctgttggagtcatcaagagtgtggagaagaaggacccgaccggtgccaaggtgaccaaggctgctgccaagaagaaatgatgcgacctgtcgttgatgcagcgtctgcttttccaatacgtagctgagatgttccattttggcataagttttgtatgctgtggttgctgacttgctgttaccttgtgaactgttgagctctactattgggtgcccgtttatctgtttatgtagcatcttgttatttcacctattgcaatacaagaatgctatatatgacatatagtgagaaaaaaaaca

SEQ ID NO: 22545 - DNA, 945 bp, Zea Mays
cacccctctcccctaccgttccttttctccaccattgaaacactctctgaccctcactcgctccctgtcacacacactacactcgcaattcatccgcagtcacaagctcggctgctgctcccgctaacggttgaggcgttgctggtgcacacaggaagggaagggaagggagagctgcacacagctttgctctggctcttggctcccctgtccagctgtcctgtccgtccatcatggaggaaacgcccagcccgcagctctagccgccgtcaatctcgtctcgtatcggagtcgaaggaagtaagaggcgggatggcatgaagcgacctaccaagaatgagaggctgggcaacccccggcacaagtaggaggaagaacccgagcaaccgagccacagggaggaggaggagatgggcaactgcggcacacgggaggagaatgccgtcgtcgctgcgcacgcgcaagccttccaagaacgccaatgcagataggaagcacacctgcatgtcatcagatataagtgacccttccacacctaggaaagttgaagatgccaagaacatttccatatacaacgatgtgattgccttcacattgtttgagctagagacaatcacaaagagcttccgtgttgattatgttcttggcgaaggaggatttgggaccgtttacaagggttacatagatgaaaatgtcagggttgggctgaagtcactgcctgttgcagtcaaggtgctcaacaaagatggacatcaagggcacagagaatggcttaccgaggttaactgcctggggcagttgaggcatccaaatttggtgaagttgatcggatattgctgcgaagatgaccatcggctgcttgtctacgagttcatgtttcgaggaagtctagaaaaccacttattccgaactgttactaactacatttgaagaaaaaggcaaaat

SEQ ID NO: 22546 - DNA, 2540 bp, Zea Mays
cccccatctcgcatctcgcgtactatttccacaattccaccgacccgtcgtcgcgccactccgtcttgctcaacaccagtcaccactgctctccaagcctccaccagcgtccagccgaaccatcgccaccgcaggatggcctcccgcctcctcctccacctccacccgcgctacccctccacgccgcgcggctcctctcctcctccccaccaaccgcagctgcggccgtcaggatcggcccgccgcccgcgcgggagagctacctcaacgccagggccatcatcgaggccgccctccgcaccggcgcccaggctatccacccgggatacggtttcctttcagagagtgctgatttcgcgcagctctgtgaagccgaggggctcaaattcattggaccaccagcatctgcaatccgagacatgggcgataagagtgcatccaagaggatcatgggtgctgctggcgtgccgctggttccagggtaccatggggctgaccaggacgttgagctgttgaaactcgaagcggataaaatcggttatcctgttttaatcaaacccacccatggtggagggggcaaggggatgagaatagtcgaaaggcctgatgaatttgtggattctgtactgagcgctcaacgggaagctgcagcatcgtttggtgtaaacacactattgattgagaagtatattactcaaccaagacacgtagaagtccaggtatttggcgaccaacatggaaatgcgatatacctttatgagagagactgcagtctacagagaaggcatcagaagatcatcgaggaagctccagctccaaatgtgccagctgagtttcggtctcatattggtggagctgctgtatctgcagcaaagttggttactacaatgctggaacagtggagtttattgtggacactctttctggagagttctacttcatggagatgaatactcgactccaggttgaacacccagtgacagagatgattgttggtcaagatcttgtggagtggcaaatacgtgttgcgaatggagaacgactaccattatctcaggagcaggttccattaaatggacatgcatttgaagcacggatatatgctgaaaatgttccaagagggtttctccctgcaacaggaaccttacatcactaccgaccagtcccttctgacccaactgtaagagttgaaactggagtcgaagaaggagataccgtcagcatgcattatgatccaatgatagccaaacttgtagtatggggtgaaagtcgcacggctgcactagtcaagctaaagaagtgtttatcaacctttcagattgcaggtttgccaaccaatgttgatttcctccaagaactcgcaagccacagtgcctttgaaaaaggcctagttgacactcacttcattgaacgttataaagatgaccttttgagtatttctacaaagtcctcaaaagaatctcatggtgtagctgagcttggtgcaattttggctgctgcatgcatttgcaagaaggaacacattacatctaaagaatcactacgagccaacaagtcactatctgtatggtacaataatccacctttcaggatgcatcactttgctaggcatcccctggatcttgagttggaagagaatgatggattcagtgagaaacttcttaaactgttcattactcataagtttgatggaagctacttcatcgagacagaagatggcacttctggtttagatgtcaaagttgatcacaagggtgaccacgattttcgtgtggatgtttctggtctgcaaactgatgtgactctagcatcttattcaaagggaaacagcaaacacatacatgtctggcatgggaatcatcaccaccattacagacagactgtaagagctgagcatgcagttgaagatagctcccaacctagtcatgcttctgaagggaagtcgcatccaaaagggagtgttctggcaccgatggctggcttggttgtgaaagttttgcttgaagacggggctcaggtggacgcagggcagcctgtcatggttatggaagcaatgaagatggagcatgttgtgaaggcgcctcgtgccggatacgtgagtggcctgaaggttactgcaggccaacaagtttttgactccagtgtccttttcacaatcaaggacagctctgcaaactgagatggagcgatcactgccctagagtagttgcactgcaactgcatcaagcacccagcggatgctcgtccagatagagaagcgaaggaaataaactgctgggttcgtctgcgggcaatccaatccggcagggcaagcagacggcgcatggtgtttcccggcttgatgcgaatccatcatccgccgcaacaattccattgcgtagtgtacacgaacatgaaactgtaccacgctgagcaagaggaattcttgtttgatttgtgcaatgaaataagttgattccatcaccgttccatttctcataattagtaataataatgaataattagtaataatataatgaggaatgtgtttattttaccaa

SEQ ID NO: 22547 - DNA, 1926 bp, Zea Mays
ctcgtgacacatttaaatggacagtgggtgaaacacaacctcgtgatgatggcttgtcgaaatccaaggatagggacaaagatagagaaaaggacaaggacagagatcgtcgccgagaccgtgacagagatcgagggagagacagggaccgtgatagggatagggacagggacagggatcgggacagagacaaggatcgccaaagtaggcatcaccgtgaaagacgggaacagcgagaccgtcctgatgatcacagagtccgtgattctgaaagaagaagagaacgcgacaaagatgggcatcgtaggcatcgttctcggtctcgttcaaggggtagagatcgaagatctaggtcacgttcaagaagcaagcgagttagtggattcgacgccccacccccgcaagcaatgggttcaacatttccagttattccaaccccaagcaaccatgtatggtaacaaggccaatcttgggtcacttgcctcacttctaccagtggaatgagctgcctactatagctttaatgtacaaggaagaatcagtgcgccggtttgatatcgtcatgttcatcttcaactagctagtactaggtcagttaccaggctcttcgcttcccaacattggtggcatgtttccaaacatgctccctttcggtgttgctgggcagttcaatccccttgtcatccagccacaagcaatgactcaacaggctactcgtcatgctcggcgtgtttatgtcggtggccttcctccatctgctaacgaacagacagtggcaatttactttaatcaagtcatggctgctattgggggaaacactgctggtccaggtgatgctgttctcaatgtatacataaatcatgacaagaaatttgcttttgtggagatgagatctgttgaggaagcaagcaatgcaatggccctggatggcattatgttcgaaggggcaccggtgaagcaggatctaatggaggactagaaggtccagaccgtatttttgtgggtggcctcccgtattacttcactgaagcgcaagttcgggagttgcttgaatcattcggtcctcttcgagggtttgatcttgtgaaggatagggaaactggtaactcaaaaggctatgcattctgtgtttaccaggacctcaccgtcactgacatcgcttgtgctgcactaaatggtatcaagatgggtgacaaaacccttactgtcagacgagcaaaccagggggcatctcagcccagaccagagcaggaaagtatcctattgcaggcacaacaacaggtgcagttgcagaaacttgtgtatcaagttggagcgcttcctacaaaggttgtatgcctcacacaggtggtaactgcagatgaattgaaagatgatgaagagtatgaggacattatggaagacatgaggctagaagcaggcaaatatggtaatttggtgaaagttatcatcccacgccctgaccccagcggacagccagttgtaggagttgggaaggtgttcctggaatatgcagatatcgatggtgctgccaaagcaaagacagcgctgcatggaaggaaatttggtgggaacccagtggtcgctgtctgctatgcggaggacaagtttgccaatggggaatatgatggatgaaaatcttatccctcttgaactatagcagtagccggtctttgtctttggctctatgctacctgcttgtttaattgcaacaaagatgaacggtctctcatttaagctgaacctctacctgtattgatatccctggattttttctgagccaccacctgttgtgatttgtgaacgttgtaagaataggtttctttgcttgggttcgcttgttgctgtcgaaaatatgtaacgaatgttattaataaagaatttcttgtatgactttactaccgtgtgtttgatttggtttgagtt

SEQ ID NO: 22548 - DNA, 1720 bp, Zea Mays
atataccgagtagaatagagaggggagagggctagggttcagagcacgacgagccataacttcaacaagcagcgggcgggtctcgggcggcgcgcgggcgcttggtggacgacgctcaagcggaggcgggcagcgcttgggagtcaggcgtgcgaccttgcggctgtgctcaggcggggcgttgcgtgaagcgctagggagtcgggtgtgcgacgggcggcgctcgttcctcaggcatgtgcggacgacgctcagacgcatggctgtgtcgaccacttgcagacgacgccgacacagatccaggtccaggtccaggttaagtattgttttttggtgtgtggacgtgattcttctagtgagatatgttctgaagcggcaaggtaaaccctcttagtctacttgtttaacttttaaaatatacccatcggtttgaatgatgcaaaactacaataatcttcatgtacttgattgactaatgagttggatatgattcgtattctatttcttaaaaaagtaaggcagaagatagctagattcatgatttggcaaatacaacctcaaattaacttgcctattcatcgattatgttcaggaaataatgtatcaattaattgaaggaagtaatagtagtggctcatctagaactcattcgattcctagttctaactatgaccactaacttttgccttgctagctggctatgtacaagcctgcaacacattcttatgataccatcatgtcattaaatgtcaagggctgagtatccccggacagcagggcctcgactacgcagttcgtagtcgtgacccatcttctccggcgagattttgcccctcagccacaggttttgttggtgagtggagaggagagattagagagaataaactttgcttaatccttccagccggctggttacacatatatatatggccgatcggccctaataaactagagataattactccttgatcctagggatagctatctaatcattcctaacaaccagcccctcccccctaaatcttctccttaattctaggaacttgaaacaaaaagtaaccatgttctatctgtaacaaaccagtgcgtgcgcgcctaaccgcccacgcgtatcgcacgctcttttgcccggcgcacgtcgttggcgcgcctgcgcctggtgtagttcatggagcatggttaccaccttggtttgcggcacaatatgctcattacgcggaggttgtcgcaggtcactagaataaacaagggaaacctgctgtgcagaatgttttgcataagagaaaatggttgccctcaagaaaaatgtaggaccttatgtataaaaggtatcaacaagatgttaatgggataaacctcatattgagaccgctaagatgaaatggattcatgttaaggagaaattggttgtcctcaagaaaaatgcagaaccttatgtacaaatggattgtcttcaaaatgttgttcttgtagctacaacaaagagaaacaacaatggtggtgatgctatacgtgtagaagtagcaatgttggtcttgtagctccaagattttgttattttgttgttgatgaatgatatctatgataatatattgctaagtgtatgtgatgatcattggttgttgtttaattataatggtttgtgcttattgtgctacattgacattggtaataattaaaaaattaaaatggccttggttgggccaaatgttttgtgaca

SEQ ID NO: 22549 - DNA, 1954 bp, Zea Mays
atagcttttgcccatgtctggtggtgacgtcgtgtgccccagcgcggcgtctagtcatcagatcattatccgcaccgacttgcgtgcacgagcttcgcggcgagggcagcaccggggctgggaatgggaagacactgcagcccagctccagcagcactacagcagtagcgccaccgaacctgaaaactccgaccccccacgaaatcgcggaacctacccacgagccgagccatgctcagccgactcgccgcggcgaggcgacagctactgctatccccggccgtcgcgtaccgctcctcctcggcagcggcgacggcgtcggcggtccacgagagagcagcgcccgcctcggcctccgtgctcccggacaccctcgaaaggggctccgacgcgtaccagcgcaacacggccgccgtcggcgggttgctctccgacctgcgcgcccgcgtctcccaggtgctgcgcgggggaggcgccgaggcggtgaggcggaacgcggcgcgggggaagctgctcccgcgggaccgcatcgaccgactgctcgaccccggcgcgtccttcctcgagctctcgcagcttgcaggctcagatgtttatgatgaagcattaccatcagcaggaaatagcttcggagtgcaaactgccttgcatatatctcgttgacagcggaggtgctaatctccccagattgcagtagtcttgggttcttgcactgctggtggggcatatattcctgcaatggcggatgagagtgtaatagttaagggaaatgggactatatttctagcgggtccaccacttgtaaaggctgctacaggagaggagatatctgctgaggaccttggtggagcatcagtacattgcaaggtatcaggagtctcagatcattttgcacaagatgaaattcatggacttgagttggggcgaaacattgtgaagaacctgcacttagctgctaaaggaacaaatattcagagttctgcttgtggttaccaagagccattgtacgatgtagaggaacttcgctccattgcaccagctgatgtgaaacagtccttcgacattcgttcaataatagcccgtattgttgatggaagtgaatttgatgagttcaaaaaattgtatggaacaacactagtgactggttttgcaaggatatgtgggcaaccagttggaattattggaaacaatggcattttgtttacagagtcagcgttgaagggctcccacttcattgaattgtgcgctcagcggcatattcctttgattttccttcaaaacattactgggttcatggtcggatcaaagtctgaagctagtggaattgccaaagctggagcaaagatggtcatggcagtttcctgtgctaaggttcctaaaattacaataattgttggtggaagttttggggctgggaattatggaatgtgcggacgtgcatatagcccaaactttttatttctttggccaactgctaggatatctgttatgggtggcatccaggcagctggagttctcgctcaaatagaaaagaacaacaaaaggagacaaggagtggagtggagcaaggacgaggaagaagccttcaaagccaaagtcgtggaggcttacgacagagaaggaagcccgtactactccactgctaggctatgggacgacggggtcatcgaccctgctgacaccaggcgggttctgagcctctgcctctccgcttcggccaagccggttccggaagacacaagatacggtgtattccggatgtgaataaatgtgtgtgagtaataacgcagacgtgtttaataaaaagctgcctgcacgcacccaatgtgtgtgcacaaataaaaatttcgccctggtttctgtcgtcgaaatatgttgaagagtgttgttcatttcatatattactatctgatgaatgggaagtgttcttcatttgatacgtcaataaaaaaaa

SEQ ID NO: 22550 - DNA, 2815 bp, Zea Mays
ccagagcctccgccggcgcatccggcgactgatttgcagggagtgcttgaagatggctttgttgccgtcaagaagttatactcgtatattgcaattgaagacgaaccatttcatcgtgaggttgattgtctaatgaatattaggcaccacaacatagtcttgtttgttggttactgtgctgaaacacaggaagtggttgtgcgtcaagaagggaaacatatttttgcggaaaaacgagaaagattactttgcttcgagtatttgcataatggaagccttcacaagcatctgacagccgaaccatgtgggcttccatggcacatttgttaccaaataataaaagggatttgcctgggcttgcactacctacatgacaagaacataattcatctagatctgaaaccggacaatatattgcttgatgatgacatggtgcccaaaatcacggacttcggtttgtcaagactcttgggtaatggaaaaagccacaccattacacaaacaagaataggaacatggggttacatggcacccgagtacttggatgatggagtgatcacaatgaagacagacatctatagcttgggtgtgataatcagacacatggtgaagggacgtaactcggcagacaccactgatgaagaagtactggcaaactggttgattaggctggaaaaggatccatcacagatgatgaggcagcagacgacccgattattatttgaaacagagtacaaagagcaaataaaagcgtgcatggatatatcatggaggtgcacgctgcgtaaaccaatggacaggccaacgacgcagcacatcctacttacactggaggaaacagaagcaaagatcaaatcggtcgttgggcctactccaccaaatgccgggcagcttcagattgccaaatttgggccgtggggtggagatggagggaagacgcgagacataagaatgacgccttgccatttgcatagcgtaacaattagcagtggaactattatcgattctatcgggttttcattcactgatcactatggtcagcaccacacaacagggccttggggcggtaaggagggtacgaataagattgaactaggcccttcggagtttcttacaggagtatctggaacaagcggcccattcaaaaatctaacaaatgttgtaacgtcacttacgtttgtcaccaatactcgtagttacggaccctttggaaaagggcgaggaacaccgttccacatccaaacgcagaacaacggcaggatcgttggcttctttggccgttctggccagtatctctatgcgattggggtctacacgaaccaagatgctagggtcgcaaggatcgggcgacctttgggtggagatgaaggggttcttcatggcatcacagacctcagtgggcagcagcgcagcagaggtggaggtccatcgggagaatgtggagacagcgacgacgagcccaacggtgatttcgccaaattcggcccgtggggcggcgacggaggacagccgcaggacatcggaacactaccctgccgtctagacaggatcaagatcagcagtgggcttatcatcgactcgatcgagttctcgtacgctggccctgacagccagtaccgcaccgcaggcccttggggtggtcatggaggagacaacagctcttttcagctagctggttcagagttccttacaggtgtgtctgggtcaatcggcacattcaacggccatgcaaacgtcataacgtctctgacgttcgtcaccaacgctcgtagctacgggccgtttggaagagggcgaggcacatccttccacatcccagtgcagggcaatggctgcatcgtcggtttctttgggcgctccggacggtacctcaacgcgatcggtgtctacacggcgccgaaacccgaaccaaaagcaggtggtgatgaggccgtcgtcgccaggattgggccttggggcggggttggaaatgctctccatgacatcgcagagaggccgcatcgcctgcacagagtgacgatcttcagcgggacgatcgtaaactcgctggagtatctgtacagcgatggcgacgggcagcagcacaccaccggtccgtggggcggctgcggaggaactggtcgaaagattcatcttgcccctgaagagttcatagtggaagttactgggacattccatccatgcgcgtgggacagaacaatacccagtgtcgtgtcctctctgacgctcgtgaccagcacgggcaaaacacacgggcctttcggaacgcagctgggagccgcgttccaggttccggtgcagagcgacagcaggatcgttggcttcttcgcccacggagacaattacatcgaagcaattggcgcctacgtgaagaaattgacagaatccagcaaccgttaactcttggaacaacttgcagctgttcacactgtttcttgggccattgctccttaaatttagtccagatggccaaggagcaaccaaacagaaatcgctatggcagggaagatggactaaactggactgtggcacctccagcatagcctgctcttagattagtgaccagacatcatcgagatatttcgatattataataaatgaggaacccatctcagatgtttatgttagctcctcagtttttgcttctgaatgattaatttagatcttccttatttttgcaataaatgaggattcttttctgtctcttctgaatggatacgaatcatgcatcacgtatcagtgcacctattgcagtgaggagatgaggacaaggtgctgacgaacttattgtcctgagctcccacttgagtttctg

SEQ ID NO: 22551 - DNA, 3051 bp, Zea Mays
acagaacgcacgcgctaccttttctctctctacgaccttccccttacctattcgccgtccctctctcctgctgccctccccccgccgccgccctacggcccaccccgccgacgcgccacctccgtatctctcttccccgcctacgcgggcggcggatctccggatccgcgcgggggagggagatctggattggatggtcctctccggccgcggctagtccggcctgatctgatccgacccgtcccggcggcgcagtccgggcaggttgtctgggaaatttcggactcgggcggtgttgatcccggggagaggtcgtgcctcgctcgatctccgcataaaagctgtgattttgtggcggcgcggctgcgagttaccgggattttcccagggtttccggcggccgatccgcgctagttacgctattctgttccgtcagggcggcctcgtgttgggggctcgtttatttgccgcgtcccggaggagggttttgtgttcttctgtcgttggctccatggccagcggctctgatgccccgaagcagtatggaataaccaagccgttgtcgttgctcggaccggtggaggccgacctccagaggacggaggagctagagaagttcttgctcgagtcgggtctctatgagagccctgacgaatctgctaggcgggaggaggtgctggggaagcttgaccagattgtaaaagactgggtaaaacaattgactagtcagagaggatacactgatcaaatggttgaagaggcaaatgctgtactcttcacctttggctcataccgtcttggggttcatggacctggagctgatattgataccctctgtgttggaccttcatatgtgaaccgtgaggaagatttttttattgtactgcatgggatattagcacaaacagaggatgtgaccgagctgcagcctgtacctgatgcacatgtccctgttatgaaattcaagttccatggaatatctattgaccttctttatgccagtgtctccctcttagtagtaccagctgacttggatatctcccaaggatcagtgctttatgatgttgatgaagctactgtccgtagtcttaatgggtgcagagtagcagaccaaatcattagacttgttccaaattttgagaattttcgcacggcattaagatgtttgaagtactgggcaaaaaggagaggtgtttactctaatgttactggctttcttggtggtgtcaactgggctttactggttgcgcgtgtctgccagctctatcccaatgctgtgccaagtatgctggtctcacggttttttagagtttttacacaatggcagtggccaaacccggttatgctttgttctatagaagaggaagaacttggtttccctgtttgggatccacgcaaaaatcctcgagatagatgtcatcatatgcctattataacccctgcgtacccatgcatgaattcaagctataatgtttccacaagcacactgagggttatgttggaacaattccagtttggtaatagaatttgccaggaaattgaaatgaataagaccagctggcctgctctgtttgagccttttcaattttttgaagcatacaagaattatctacaggttgacatcattgctgaggatgatgaagaccttaggctttggaaaggatgggttgaatctcgattgcggcaactaactttgaagattgaacgtgatacatatggaatgctacagtgtcatccttacccacatgaatatgcagacccttctaggcagtgtgctcattgtgctttcttcatgggcttgtcaaggaaagaaggtgtgaaaatacaggaaggacaacagttcgatattcgaggaacggtggatgagttcaggcatgaaatcaacatgtatatgttctggaagcctgggatggagttagctgtttctcatgttcgtaggaagcaggtcccagcttatgtgtttccagagggttataaaagacctcgcccttcaagacatgtgaaccatcagtctgataaaaatgacactgaagatggcacagcgaccaggtctccagacagtcaactgaagagaaagcatgattctgttggaactgatgatatcaggtatgcaaagaggtcatcgaccagcccagttcatccgaaaaattcacctcaatctggaagcactggcgatgagactagatgtaacaaccaaataaaaagggctcctagcgatgcaagtggtggcagtccggcttcacctcaggcatcagagagaagcccagatactattctgtctgcccctaggtgcacgacaacaggagcagtgtgttctggtgatgcaattagtaagcatagtagtgttcctcttgttgagaactgcaccactccgactgtagcagtgtgcacaactttgaagcgcgtagctgagaaagttgtttcagagctagttggaagtgaaaggctggggagcaacaacagtgcggaattgttggagagtatggaaaaggaggatgtccttgctgaaaatgttcgttttggcgggaatggagttgcgcaaggtggccttccagaagagttagaggtgatgcttctggtgcacccttctcctgtttatgcgctgtctaacatgatctgaacattctctttcgactattgtttttttgatgtataaagccaaacaataggattgaagcggtttcttgagctgatgcaggtatgaacaagtgtacattgtggaagtcgtcactgagggttagtggcatcaaccacacaagattggggaaaaaatggtgtagagatggataagttctacccccttgctggagggaatggtaagtagctcaactcacaagtttccttctggacacagattcgcaattacgggggtttctatgatgatggatgatgggagattatcggatatcatgtcttgcacaacggcatggcaaaaaaaaaacgacgaagaagattttgtggaaggccatggtcgaatgtcatgtcttgctggtacactctagatgagcatgaaccttaagttttcgtttttttttaactttaaaacctata

SEQ ID NO: 22552 - DNA, 2658 bp, Zea Mays
ctggccaggggagcctcctctcctctcgtctcgtctcgtcgcacgcgagcccatccccccgcccgccgcctgcgcttgacttgacccgcgctcctcctcggcgtcggggagaccgggctcggtccgcgttgtctcggcggacggaggaggaccgtagcgcgaccgcccgtccgccgccagagccctcgtcatcgtgccggctgctcctgccgctcgtcccgccgcgttgagcattggggatctcgcgggcccttcgtctgtacccgccgactcttcaaaccctagcctctgtggcccgccgacgccgacgggaggagctggagctggggctggggctggagggcgcggaagctggtggctgttgtttcgctgattgaaagtactccatggcttaatgatgaactggtaataaagaggtcaatcattgtcagctagctgtctgaggagggtttttggagttcttactaagaagagagttactcatgctagccagtgaaggacggacacagatcttgcttgctttactgaactgaagacatgcccaaaacacctcctgtcaatgcaagcaagaacactgaaccgcagaaacaatctgcacccaacttaacaataacaaatgggcacacaagtacaaaggtagtggttaaaaaagagcaccctatcaatgatgtgaaacacattagcacttgggtttgcaaaaatttggcctgtaaagctgttagaccagcagaagattccttctgcaagaggtgctcgtgttgtatttgccacaagtttgatgacaataaggatcctagtcaatggttagtttgttcatctgacaatgatagcaagaattgttgtggttcttcttgtcatattgaatgtgcattccgagagaagagggcaggatgctttgatctagagcaaattatacatcttgatgggagttattcctgtgcctcgtgtgggaagatttctggaatactaggatattggaaaaggcaattagtaatcgggaaagatgcccgccgagttgataatctatgccaacgcatttatttgagttacaggctattagagggaactgtccattttaaagaattgcatgagattattgaagatgcaaaagcaaaattggaaagtgaggttgggccacttgatggaatgtcggcaaagaatgcacatggtatcgtaagcaggttctcagctggtatcgctgtgcagaaactatgctctacagcaattcaaagagctgacgagtggttgagttctcctgacctgcatcttcgagattcattacctgttgcctgtagatttaaatttgtagacataacatcttcttccctcattgtcatcttgaaagaaacctcgtcttctgacactatcaaaggttataagctatggtactggaagagcagagagcaaccaagtatggaaaagcctgttattgtgtccaaagatgaaagaaaaatacttctttatgaccttaccccatgcacagaatattctttcagagttatatcattcacagatgatggggtacttggccattcagaatctagatgccgtactgaaagtagggagatatttgtcatgcgtgcaccaaagaatgcagtgggaggaggggctacacatgcgcaaaaaaaagacaggaaccagtcttgtaagtcaactgggttcaagatccgagatatttggaagaactttcaggaagctttagatgcagaaggctgttttgaaggattttctgaagatgtacatgaaggttcctgcagcagaagtgttacagagacagagttatctggagcttgtcgcaaacttcatttcaactcatcttctgtccccgacctaaacgccgaggttcctgtacccgtggactacactgagaaccattattattctaagaagggacttgtgaggtcaaatgacagtggtgactctgagacctgcgccgttggccagactgcagagccgcctgcagttgaatctcggcaagtaagcaaggtgaatagcgtaccagttaataaatgcgagcagaatggtgcttctgctatttgccatgaaaagatgctctccggatcgacgaggcaactggatggggattatgagcactgcgtaaaggtagtaaggcagttggaatgcgatgggcacatcgaaaatggtttcaggatgaagttcttgacatggtatagtctaagatccacagaccaggagcgcaaggccgtgagcacatttgtcagaacgttaagcaacgaaccaagcagcctggccgagcagctcgtcgattctttcggagaaatattaaacagcaagaaggccaaaaccggtttctgcagcaagctatggcattaggacaaaaaggactagatctcaagatactgctaactcactgattatccatatttttcactgaccggtgcagtgaaattctagtttattccatcaaatttgacagcgatgaaaagggggcatctgtgagaataggagattattttgggcagcaagtagcctgctctgaaataattcttttccatcaggaagtagtggaaacttgattttcattggattacctgggtcaatccagaaattattgtagaagatagcatgaggatatcgaatgactagcagaggcgaggagcaccaatgatgcggcatggaccggacttgataggtttc

SEQ ID NO: 22553 - DNA, 4360 bp, Zea Mays
gctgccagactgcaacagccaccggcggtcggcacgacagcacggtccttccattgttgctcccagctccaacgcagcattactcatctccattctccagtccgataatccactcattacctcatcatcgtttccaaaagcaaagctttccacgcagattccaccattaaattgggcgaacttttttgaattaaaaactcaaatcctggaaaacgagatgcggtaggctggtagtaggaggactaatcatgtgggcgacgctacataaacccgtcgcgcacgccaacttgcgtctcctcctcacagtctccgccttctccggaccactccacttaggcaccgccagcgctgtcgcggcggcggttacgacccgacgctcgagttctagcaggggcgtcgcggccaccgcgatgccttcgtcgtctccgcctccgctgccaccagccgaggagacgaccgcctctgctgccgctctcgcccctgagggtggattctccctcaccgagccctcgttcctcgagtccctcatgccgaagaaggagatcggcgtcgaccgcttcctcgccgctcaccctgagtatgacgggcgcagcgcactcatcgctatcttcgattctggagtcgatccagctgctgctgggttacagactacttcagatggaaagcctaaaatccttgatgtacttgattgcactggtagtggtgatgttgacacgtccaaagtggtgaaagctgatgctgatggtgctattgttggtgcttcaggtgcccgtttggttataaacccctcatggaaaaacccttctcaagagtggcatgttggctgtaaattaatatatgaactgtttactgacacacttacatctcgattgaagaaagaaagaaagaagaaatgggacgaggaaaaccaggaatcaatttccgatgctctgaagcagctgaatgaatttgaaaagaagcatcctaagcctgatgacaccatgctgaagaaggcacatgaagacatgcaaagcagacttgattacctgaggaaacaagctgaaggttatgacgataaggggcctgtaattgacattgttacatggaatgatggtgatgtgtggagggttgctgtcgatacccagacccttgagggtaacaatgatggtggaaaactagcagattttgttcctctgacaaactacaggcttgaacgcaaatatgcaattttcagcaaattggatgcttgctcttttgtagcaaatgtttataatgatgggaaccttgtcagtatagtaactgactgctctccccatgctactcatgtcgcgggcattgcagctgcatttcatccagatgaacctctgctgaatggagttgcacctggagcacaattgatttcctgtaagattggagacactcgcttaggatctatggagacagggacggggctggtgagggccttgatagctgcagtagagcacaaatgtgatctgattaacatgagctatggagagcctacccttcttcctgactatggcagattcattgatctttctaatgaggttgtggacaaacatcgcattatatttattagtagcgccggaaacaatggaccggctttgaacactgtgggtgctccaggtgggactagtacaagcattattggtgttggtgcttatgtttcaccagccatggctgctggagctcactgtgttgtacaaccacctgcaaagggaatggagtacacatggtctagccgcgggcctactgctgatggggatcttggcgtttccattagtgcacctggtggtgcagttgctcctgtaccaacttggacgcttcaatctcgcatgctcatgaatggcacttccatgtcatctccttctgcctgtggtggggtagctcttcttgttagtggcatgaaggctgaaggcattccattaagcccttattctgtaagaaaagcaatagagaatacagccgcatctataagtaatgcacctgaggagaaactgaccacaggaaatgggcttttgcaagttgatagggcttttgaatatgcacagcaggctaagaagttgccacttgtttcttatagaatctcaatcaatcaagtgggaaagtcagttccaaaactaagaggaatatacctccgcgggggcaatgcatgctgccaaacaagtgagtggactgtgcaacttgacccaaaatttcatgagggcgcgagtaacttggagcaactggttccttttgaggagtgcctgcaactgcattctactgatacctctgtggttcaaattcctgagtatatactggtgacaaacaatggacgcagtttcaacattgttgtcaatcctgctaatatcagcagtggccttcactattttgaagtttatggcatagattacaaagcaccatggcgtgggcctattttccgtgtgccaattactgtaataaagcctattgctctattgggagagccaccactattgtcaatttcaaaccttcgttttcaatctggtcatattgaaaggaggttcataaatgtaccttttggagcttcatgggcggaagttactatgcgaacatcagcttttgatactcctagaagattctttttggacactgttcagattgtgctgcatggaatatccattgatcagaaagtaagtacccttgatggtgagtcacccttgcttatagttgctagatcacttctagcgtcagagaagcttgttcctgttggcaccctgaacaagatcaggataccttatcgacccgtggagtgtaatctttcttcacttcccactgaccgtgataaattgccctctggcaagcaaattattgccctgaccttaacttacaagttcaaattagaagacaatgctgaaataaagccccatgtgccactgcttaacaacagaatatatgacaataaatttgagtctcagttttatagaatatcagattcaaacaagcgtatttactcgtccggagacgtttaccctagttatgtcagactttccaaaggagaatacacgttgcaactgtacataaggatttcgttccattgatgttctactcccaacctgatggtcctatagttggaagtggcaccttcaaatccactgttctagttccaggcgaacctgaagcattctatgtgggtcctccgtctagtgaaaaactcccaaagaatgctccacctggggctgttttggttgggtccataacctatggtactgtaagcacatttaacaagaaagatgaacaaaaccaccgtgctccagtatcttatagtatctcatataccattttgccatcaaaggttgatgataaagaaaagggggttttagttggtacaaagagcatacctgaacagttagatgaggaggttcgagacaccaagataaagtttctttccagcgttaagcaactaactgaggaggacaagtctgcctggtcagaacttgtggtttctctgaagtcagaatatccgaagtacacacctttgctttctaagattttgcaatgtgtcctccagaaaggaactgatggtgataagattagccatgaaaaagaggttattgctgcagccgatgaggttgtgggcagtattgataaagaggaactggctaagtatttatctctaaattcagatcctgaagatgaagaagcacagaaattcaagaaaaaaatagaagaaacgcgagatcagttggctgatgcactatatcaaaagtgtcttgcattggctgagattgaatcactgaagtctgatgagtcaattgaggtatctgctaaagatatttttgaggagaattacaaagaattgattaaatgggttgatgtcaaatctgcaaaatatggcacttcgactgttttgcgtgaaaaacgctgtggaagacctggtacagcattgaagattctaaatgatttgattcaaaatgaatctgaaccaaagaaaaagctttatgatttgaagatccagttgattgaggagatgggatggaaccatgtctcaacctacgaaaaacagtggatgcaagtccgctttcccccatgtctgccaccattttgattgtgaactcatttttacaatggctctatcatcctgggttcagtagttgtcattttcattgctgggtgcgtcagttcattatttcgatggcaaacagccaactaggcaagctactggatttgtgcgtttggggacacagttattccatagttattttgtggtacaatatcaggggagtcctttctccaaggagataagacggaacagagatattttgatggacttgaaggagattttatcctcttcaatccttataatgtctatcaaaccaaataaggtttataatccttgtcaaac

SEQ ID NO: 22554 - DNA, 1387 bp, Zea Mays
tgccgatgcagatcgaggggcgaggctgccgtcgtcgtcccgggctctctgtgcgcgtacgcggaagagtgaggaagctctagtccactcatacagcctttacggttcaggagagaccgtgatgcaattgggatgttcggcaaggtttgtgatgaacatgaagggtactttgttcatgaggccctttccattgccatcgattgcttacaacttgatattcaaatgaggccagaaatggaacatgtacttttccgtctccggatcattgttgctagaagcaaacttgctgctggtagtaacaataaacctagccaacatattggtcgggcccttgttaacaacattgataaacttcacccaactctcatatcaaccatttccatggaggaactgaatgaagcaaccgggaacttcagtaatgatgttcttataggacagggaccatacgccgaatgtttcctgggagttcttaaagatgggcagaatcttgctgtaaaaaggctacgtacttctgaagaaattcaagtagaggttccgaccattttaagaatgtgttaccatgacaatgttgtgcaatttctaggatgttttcttgaagggggaactcgtgttcttgcttatgagtacgccccaaggggctccttgcatgatattcttcatggtaaaatgggcatcaagggagcccgaccagggccacctctatcgtggttgcagcgtgtgaagattgccgtgacattggtgtttcaatacatgatgcccatcgccgggttcataattgggccgagtactattctgtcagggaacatctagcacctgagttcgcattcagaagaaggtatagcacaaagagcgatgtctacagcttcgggcttgtactgttggagcttttaactggccgctcagtttttcatgttgcgacacaatgtggcccgaggagcgcagttagatgggctaaaccaatgcttagtcaagacaaggtggaacagtgcatagatccaaggcttggaggagggtacctactaaacgatgtcagaaagatggcttctgttgctgcactgtgtttacaagacgagccagagttccggcctgaaatgagcatcgtcgtcgaggctctgagcctgttactgaacagcaagtgaacaagtaaccgtccctgcattggtgaagcacgtggaatgtgatttccttgcatgtcattgcgagctcaagatcacgggtttcgtgaaggcgattggcccccaacagaaagttatgattactgcattcatctaggcttggaacttgtgctttctttgtctgtgcacatgtaatactcaaaattctaaataaagaatatagagagatcttctcattttatgtgccttatttgcatcataaaaagagcaca

SEQ ID NO: 22555 - DNA, 1413 bp, Zea Mays
cgagctctccgacgtcgtccccttccactcgacaagggaccttccttcctgatacaggaaggcagggttcatgagtggcggcacgcctgcagcaagcagtagcctgcggacatcactctcatactacgtgaggcaagtccgcgcctatgactaccaccactacctctgccttctccacctggccccggccgtgcgcaaggccgcgttcaccttccgcaccttcaacatcgagacagcaagggccatggatgtggtgttcgacccccgagccggcctcatgcgcctcctctggtggaaggagggggtcgacaagatctttggcaacaagctagtcgagcacccagttgcccaggcgctctcttcgatcatcgcagaccacaaggttagcaagcactggctgaagcggtccgtggaggcgaggatcaacgacgccaaccgtgaggaaggcaccattcctaggacgagcgcgaagttggagaggtatgtggaggacacccagtccaccatcctttacatgaccttgcaggctggcggaatacagtccaccgtggctgaccacgccgcctctcacatcggcaaggccagcgggcttctgttactgctcaaggcgctgccgcaccatgtaaataatcaagggacggtacattatatcccagctagtgtggccgaggaatgcggcctgctcatcacacgggagggcggcaggtcggaggtcagggcaggcgagaggctgctagacgtagttttcaaggtcgcatctgttgcggaggctcacctgcataaggcgcgagagttggcaccgtccgtgcccaaagaggcgatccctatgctcctcccagccttgccggcccaggtcctcctggataccctgcgaaggtgagttcaacgtgtttgatccttggctgtcgaggggagtccacggggtctctcctctgtggtaccagctgaagcttaactggaacgcgcggcgaagcaggtactaatgaggaggaggaaccttttgccctcagccatgggagctgttgctgttccttgtagcaaaaagctttttattgggggtttttgacatagcagagattgaataactacttgcggcagatttgaagctgttagggtttagggttattcaattgtgccatgggagctgttgctgttccttgtagcaaaaagctttttattggtgttttttgacatagcagagattgaataactacttgcggcagatttgaagctgttgaatatgtgtcgtgcttttcgttgtgtttgtgggctgggctcatttacattgcacaattgcaacactgacagtgactgttttatttttcttttggaacatacaatgcctgtttgtattaatacagcagaaagcagacaatattttttgataaacgcaattagttttctatagtctat

SEQ ID NO: 22556 - DNA, 444 bp, Zea Mays
gagaatgggtacatgggacagcacctccataatccttctgctgcgactacagacacgagctgcgagtctgtggtcacaagtggtcagcaccaccaacagcaaaacccagcagttccgtgtcctcagcgggacgcgaataacccagctagagttactatcgaaagcaacatgaactgctgtcgattgggtgcaaatggttgggatgaagcctggtccggattccattggaatcatcgttgttttgcacaattgcagtggcgtagcaggccaagcagatcaaggtctggttccagaaccgcacctgcatattcgtgggatgtttgctttcatggttatgttgtgtaccttgtccgtgtgaggcgtggtggtaggaagaggcctttgcccaagtgtattatctatggcaatcccaagcatcagggtatcacccaactcaagttctag

SEQ ID NO: 22557 - DNA, 1264 bp, Zea Mays
cttccttctccgccgggcggccgggcccaaccccaaccccacgcgagcgaggcgcggccatcataacgctcttccgctccactccaaatccttgctcccatttcaaaacctcttcctcctctcctcgccgcagctcccaccattcccgcagacgccttgtccccttcccagcttcccctccccaccccgtctgctacaacgcctacggcgtcttcaaagacagggacatgtacgagcgcgtcttcggcgacggcgaccgcctcgcgcgcttcctccgctggcgcgtccaggtcatggagcgtggcgtgcgcgcgctcaccctgaggcccgggggcgtcaacgccatcatacaggtcaccgacctcaaggacatgccaaagcgggagctcagagccgccagcaaccagatcctctccctcttccaggacaactacccggagatggtagcgcggaaggtgttcattaacgtgccgtggtacttctccgtgctcttctccatgatctcgcccttcctcacggagcgcaccaagagcaagttcgtcatcgcgcgcgagggcaacgtcgccgagacactctacaagttcatccggccggagctggtgcctgtgcagtacggcgggctgagccgcaccggtgacctcgagaacggaccaccgaagccggcgtccgagttcaccatcaagggtggcgagaaggtcttcctggagatcgacggtatcgaggccggtgcaacgataacgtgggatctggtcgtcgggggctgggacctcgagtacggagccgagtacgtgccggcggccgaggacagctacacgctctgcgtggagaagacgaggatggtctcggccaccgccgaggagcccgtgcacaatgccttcacggctagggaagccggcaagatggtgctgtccatagacaattctggttcccggaagcgcaaggttgccgcctacaggtacttcgtgcgcaagtcgtcggcgtaggcatgctgatgtcttgtggtggtcgtcgcggccggcaccttgccggcaggtagccgcgagggggaggttaacgtcaagttaggctgtttaattattagtgctataacgacatgcatgtattatgccatatgtagaatataatgtactccgtaagagctgttgcacttttgtcatcaccactgttataaagctaatgatgagttaagttttttgggctactcgcctctctctgtctcgctcttttgctttggattcctagaaggaatttggagagtacagtg

SEQ ID NO: 22558 - DNA, 68 bp, Zea Mays
aattggttgagcgcttgtggaaaatcgcgctgctaacttcgtctttacccgattcttgggttttcttg

SEQ ID NO: 22559 - DNA, 1575 bp, Zea Mays
ttcgcccatctctcttccaagctctgagttctgattctgacccagacggggaataatcagactcctcgcatcccctctcttctctcttcaccccgtcgccgtcccgttactcgattcgagggcgcgacccttccccatctctcttgcctcgccttgccggcggcgccaatcccagggctcgcgtcgggagtgcccaacttctccacagtggccgttccgccgcggcgcccgcaggtgggcgatgcgatcggatgagttggcggcggcggcggcgcttcgtggaaaggaggaggaggggggccttgtgctttcccgcggcggtgctatccccgccgcatccgcccctcggagccggtgatggccccgaccgcggagccgtcttcgcggccgccccaatggcgcccccgcacgggcccacccccggggctgaagaacctcggcaacacatgctacctcaacagcgtcctacagtgcctcgcgtccacgccgcccctcgccacgttctgcctcgcctctcgccactccaaccagtgcaagaaggtgttcccgaatagggacaatgactgcgcgctatgcgtgcttgagcggcagattgctcggctgcttcgggcagatgctggggcgctcgattccccagcaaaggttatccgctgcatgcccctatttgccgagcacttcaggtgggggcgccaggaggatgcacacgagttcctccgctatgtcgtagatgcctgtcacactgctgacctccgcatgcgcaaggggttacgtgcagcagctgccagtggaaactgtggtgaggatgtccgggggcagggggtttgtctggttatgagggagacatttggcggggcattactgagtcaagtgaagtgccttgagtgcaagggagaatctaacaagactgatgagataatggatatcagtctcgatctacctgggagcagttctgttgctgatgccctttcccgcttctttcatccggagaccttggatggcgcaaacaaatattgctgtgaaaggtatgctgttctttatctaaaaaggaacaaatggttcctagacgaaggttctatgtactgcaagaattttcactgtttacttgctaaagatgcaaaagccgttttacgatgctttagggttgataataatattttcagtggaaacaaaatcatgtaggaagtttcaccagcctcttctcttgcaatctaattttttttcctgtaggcaaatgttgctgttcccttagtattcaaatccataggaatgtaaatgttagtttggacctcttgaaattaccctacttggctacttttttggagaaggaaaagcttactattcctttctcgggaaagtttatatgttgtcattttcaccaaggcaaagctaactctggtaatctctctagcttatgactgcttactatagattttttttaagaatactacagaacaaagttggtgtgaccccaaccatggatccttgtgattgttccaaaactggtgaaaatgccttttaagctcttttgagtctctttccaaattgaaattgtcaaaatcatagtcacaacattcc

SEQ ID NO: 22560 - DNA, 3713 bp, Zea Mays
gcctctctcccgcacgcccccgccccgaagacctcgcgacgccaaaaaggaggagagaccgccacccccacgcccgcacggcccactcagcgctctccacccccgtcccctcgcggcggcggcggagcccgagcctgagtcctgcccccccgggctaggttggtctccgcctccgccctccagtctctttggcacaacctgcagccgctggcgcaggtggacatggatctgccaagcctcgccgtcgtgctgcgcgccgcgctcagtcacgttcctgaggagcgcaaagctgcagaggagagtctcaaccagttccagttcacaccacagcatttggtgagattgttacagatcattgtcgatggaagttgtgatatggctgtaagacaggttgcaagcattcatttcaagaattttattgcgaaaaactggtcacccaatgatccagatgagtctccgaaagttttggaaagtgacaaggccatggttcgtgaaaacgtacttggttttattgttcaagtgccccctttgttaagagcccagcttggagaaagtatcaaaacaattattcattctgattatcctgagcagtggccaagtctccttcactgggtttcacacaacatagacttacagaatcaaatttttggtgctttatatgtcctaagggttcttgccagaaaatatgaaaaaatcctggctacgcctctgaaggcaaccaagttggagattccgaagcaactatttgatccaaatgtcttcaatgcatggatggttttgtttataaacttgttggaaaggccagttcctgtggaaggccaaccaatggatcctgagattaggaaatcttgggcctggtggaaagttaagaaatggactatccatatcctgaaccgtctctacaccagattcggtgatctgaagcttcagaaaccagagagtaaagctttcgctcaaatgtttcagaagacttatgcaggaaaaatattggcatgccacatgcagctgctgaatgcaattcgtagtggtgattacttgccagatagggttatcaatcttgttcttcagtatctaactaacagtgttacaaagaacagtatgtatcagatgatgcagcctcagattgatatacttctttttgagataatttttcctcttatgtgcttcaatgacaatgaccaaaagttatgggaagaagatccccatgaatatgttcgcaagggctatgatatcatcgaagatttgtacagtccccgaacagctgctatggactttgtgagtgaattgattagaaagcgagggaaaaacaatctccaaaagttcatccatttcattgtggatatttttaggaggtatgatgaagcacctgctgatcttaagccatatcgccaaaaagatggtgctcttctcgctattgggacactctgtgataaactgaagcaaacagatccatataaaacagagcttgagagcagcatgggttgctgggcagtatgcccatatcaacttttcagaccagaacaattttcgtcaggctatgcactgtatgtctcaggaatgcgtgatccagatcttcctgtgagggttgattcggtctttgcacttcgttgttttgttgaagcttgcaaagatttaaatgagatccgacctatacttcctcagctccttgatgaattttttaagctgatgaatgaggttgagaatgaggatcttgtattcaccctagaaaccattgttgacaaatttggcgaagagatggcaccttatgcactaggtttgtgccagaatttggctgctgctttctggagatgtatggctagttcagaagctgatgatgaagctgatgattctggtgctttggcagctgttggttgcttacgagcaattagcacaattcttgagtccataagcagcctcccacatctttttctgcaaatagaacctacattgttacctataatgcgcaggatgttgacatctgatggccaagatgtttatgaagaagttcttgaaattgtttcctatatgacatttttctcacctacaatttcactggacatgtggagcttgtggccactgatgatggaagcgcttaatgactgggctatagatttctttgagaatattcttgttccactggacaactacatttctcggggaactgatatctttcttgcaagcaaagatccagattaccagcaaagcctgtgggatgcactacaatctataatgatggacgaaaacatggaagattctgatattgaacctgctcccaagctcattgaagttgtttttcaaaattgcaaaggcaacgtggatcagtgggttgagcactacctcaggattacaattgcacggttacgtagagcacagaaaccatacttgaaatgcctccttgtacaagtgatcgctaatgcgctctactacaatcctgcgctgacccttgaatctttaaataaacttggggttgcagctgacatttttaaccattggtttgctatgctacaacaagttaaaaaaagtggagcacgggttaatttcaagagggagcatgataagaaagtttgctgcttgggcctgacctctcttatcgcgcttccagctgataagattccagcagaagctttggatcggatcttcaaagcaacacttgagcttcttgttgcttacaaggaccaagttgcagaagctaagaaggaaaatgaagaggctgctgatgatatggatggttttgatgctgatgaagaagatgatgatgaagttgactccgataaggagatgggtgttgatgatgaagacggggatgaaataagcagtcttcagctgcaaaaattagctgcagaggctagaggcttccaaccagccgacgaggatgatgactcagatgatgatttcagtgacgatgaggagctacactcaccaatagatgaggtggatccgttcattttctttgtagaaactgttcaagctttgcaggcatctgatcctgccaggttccagaaccttatgcagacattggatttccgttatcaggcgcttgctagtggcataggacaacatgccgagcaaagaaaaattgaaattgagagagagaaatctgagaaggcaaatgcacagtgacataataaatcatttctggccgcccttgtttttgccattttgccagtataagccattggtgtctggtcaattccctgtgatttgcaggtcgctggtatgagttttgcagccttagccaacctttaagggtaggacaattttaggctcgcaaaattctatccttgtgaggaagcatcttggataatctgtcacgtcggccatgttcttcgtggcctgttgttgccgtcttggttgcgcaagaaagtttctctcgaggacagttgctccgtcttgttgaatttttttttgggggggggcttgtaagagcatttgttatagaaactcacctcaggtggtggggttgcattctccgagttgtcaaagtttattactggttcggagtagattgtatatggtttcggttggtaagacaacggttgtacgagctgcggtatatgtttttttttgtcaacaggacattgtaattgggttttgttctttggtcggcgagagcaagaaaaattggcattgttctgcggagttaccttgtttggtttcattgtccacttgcctgtgttgcaaaattatataatgttatagaaattggatggtgt

SEQ ID NO: 22561 - DNA, 794 bp, Zea Mays
cttctactagcccacccaactccaggaaaagacaagggcccacttgcagcccgagccccttgattccctcgccggtgtcacgcgactccagatccccaattcggacagccacctgctcggcgagccatggccggccgccgcgaaggcgagcaccaggcgagcccgtggcgatccgggacgcccgcggcggaggaggactcgggcgccttcccctccgccatcatcttcttcgctctcgttggcgctaccgccaccaccgccgccgtcggacaactgcgccggacggtcagctggttctacactcaacttagtaggtcggaaccatatgttttctgggaagacatacctcgtcgaccaaatcgtcatcggtgcggtgaagcctgggaacgatatcaccagaggatgcgtgacaggaccgaggatcaaagggaaagagtggaacgcatacggcacatgcaagatgtatttaaaaaggagagaagtaaatgtcgggattatcgaaattgggatagccataatcccaactattatcagcatcatcaaagagatgactggtactggaacgcagaagcattttatgccaatcaaaggacaaatttcagggcaatgaccagggaagccatgacttacactatgtcacaccactattctgttttgggccttgacaggtcaaggtcagagccattttcagatgctgaaatcaagaatgctttcaggagaaaagcaatggagtatcatccagaccaaaaccaaaataataaaggtatatacgtgctcagaaacttcctcttttg

SEQ ID NO: 22562 - DNA, 2290 bp, Zea Mays
aactcgactcgggtccggcgctgagccgctgaccgtcgacccgaccttgccctggctcgcctcctccgctgcggcggtctggaagggatcactggatcgtagatcccactcggcaaacccaaacggccaaacctttgcttgcattcagcacccccggcgagacgccactccaactgccgggatccagccgctgcacgcggcggccaccccgccctgccggccgaccaggggggttgagagcgggcgaggcggagatgcagagcgccacgcggctgacgctgctactgtgcgcggcgtgggcggccgcgctgctgtacggcgagatgggcgcctactgggtctcctacctcgcatgctcgtggccctcgtcgtcctcctcgccgccgaataaccatgtcaaggttgctgttgttgctgacccacagcttatggatagcacctcccttggtcttccatcaagctcagttgctctccaagctgctgagttttacacggatttgaacatgagaaggtccttccagtccaccatactgccattcaaacctgatgtggtcttatttcttggtgatcactttgatggaggcccttacatgcccgatgaagagtaaggtggcaggaatcattgtttcgatttaaacatatattcggcctgaatgatcaaagaacaaagcaacagatccctatctactaccttccaggaaatcatgatattggttactcagcatttcattcagtccatcctgaggtgctcagtcggtatgaaaaagaatttggatcaagaaattatcaattttctgctgggaaggtggacttcgttgttgttgatgcccaaacacttgatggagctaaacaaagcaaagaaaggtcctcctcttgggagttcattaaaactctatctccaggtaacacatcaaacccaaaggttctgctaacacatattccactataccgacctgataactctccttgtggcccgcatcgttcttcacctgttataaatcagagggtatcttatgccgccttagaccaaggaatcacctaccaaaattatctaactaaagagacttctgaccttttgctaagcttgttgaagccgatccttgtgctctcaggccatgatcatgaccaatgcacagttgtccactccactccttttgggccagttacagagcataccctggggacaataagttggcagcaaggaaatctctatccatcttttatgctgctatctgctggacccaagttatcacaaaattcaactgatctggaacatgaggttgcaatgaacctttgctttttgcctaaacaaacccatatttatatctggtatatctgccagtttgtagtgaccatccttctcctagtcttttggccaacaaatggtctcggttctcttccttgcatgaacacattcatgagcttcatgaggtcggtgggcgccgaactgctttcaaggaccaaggaaaaagatgacgaggacgatggtgattatgatatggtttttgatgcggaaggatccatgcacctcgttaaaaaggcagtggcaaagaccccaagtgctagctcagactccagacctactggacgcggaagtgttgttgcaagggcaacagcaggaagacaccgattggagcctgattcatcgattcgtgtcgacatgggttctgagatgacatcagaagatgggggaaagttggcccgcgctggcaaatcgggagcaaggaaggtgctccaacggctgttccgtgtcattcagtctgttcttgtcattgccgctctgaatgcccccttgtacatgatgcttctcttcaaggattggattgatcgttgaaggtaatgatgataaggatctctggatttgcttcacatgaatcattccctggagatcaaaaatggtgcaataggggtccgtttgggagggcttcggctcctctgaaaatggctatggctctagctcttgtaaaggagcagtttcctcagtaattcctctgcaggagccagtgtgttttgtttttgcaagcaaaacggctccgcagttgctgctacttgttgaagccactacttgctgctaaacatggagatctgcattcaacctgctacttgctgtctgaaattgctaactgaaacctgctacttgttactatagaaactgaactgctacttgctactttgtgcaagtgcaatgcagcaaccaggtcccaacctcctaggctagctgtctatcaaggcaatgttgctgactgttgtatgattggtcaggtagccagtcattcacgcttgaaatttg

SEQ ID NO: 22563 - DNA, 916 bp, Zea Mays
gggtagcaatcatgttattctttccatcttcaataaagcgaaaagacagcttcgtcagagatagagctctagtcctacgggagttgtactctgctgcacagcgcgagtcttgcattgggcaacaagaaattctggaaagagagaacctaccaagagctgagacgtctattcatggaatcgtgacaaacatcgttaggtatgacactgaagatgaaaagttggctccacccaagaatgatttgatgaatcacagccgcagcaaccctgcaaaacggcacgtggaaggcactgattgccactcgtcattgccaaagaaactgaagtactttttgaaagacaagaagctgaactgctaaaagtgtaaaaccgtagaaggtagatagagaatgctgtaggtttgtttattttggttattagacgagttatacgtagcatagatgcatgggaagttcgcatgctaaggttgaactcttctgctgcataggaaagttggctgacttcttatattatgcgagcctagcttaggtacctcctgtggggagaagcgattgcaatacatggtagcatgttgtagagctcctcaccccagttagtcagtgactgatgatggtatcctcttaccagtcctctggtggtatcatcttttgttcacggaggtcgatgaagtactgcctccgataaaaaaaagacgcttttgacattattgctccccaaattcttattttgacggctatactttgcccagcgagtaatatctaataaatatacgttttaacgcaattacatttttttttgtccaagaaaaatatttttggaagctgttgaaggtcaagtgtcaaaattttggatagacgttgacgtagtaggttgagagcaggtacttgcgtgcttcccctgtgaagttttgtttcataat

SEQ ID NO: 22564 - DNA, 1208 bp, Zea Mays
gtagccacgacgatgatatttcgcatcacacttccgtctggccaccgcaaagcaccccctctccccccgtcgccatggcgagcgataaccgcgcgtcggtcttccccttcgccgccgccgtccttgtggtgctcctcgctggcggcgccgcggcggacgacgcctccagcgacgacgacgctgggacttcacggacacccggctgctccaacaagttccagctggtcaaggtgaagaattgggtgaatgggactgaaggtacaacttttgttggcctaagtgcaaaatttggagctcccttgccaagagatattcatgaagcaaaaaagtcatttgctgtcctctcaaatccaattgactgttgctccaacttgacatcaaagttaacaagttcagttgctatagcaacacgtggggaatgtgctttcacggaaaaagcaaatattgctcaggccagtggttcgaccggtttactagttatcaatgataatgaagagctttacaagatggtttgcggtgagaatgacacctccattaatgtgacaatacctgttgtcatgataccacagtcagcaggaaagaagctgaagaacttattgcatcatggagcaagtgtggaagtgcagctatattcaccaaatcgaccaactgtggacctttcagcatgcttcttatggataatggctgtaggcaccatagtctgtgcttcactctggactgaatttgttacatgtgaacaggttgatgagcgttataatcagctgaccagaaaggatggacctgacacgggaacaaaatacagagaagataaagaggtcttcgagatcagcgcgaagggtgcttttatttttattatagtagcttcagttttcctcctcctcctgttctacttcatgtcatcttggttcgtttgggtgctaattgtactattctgcattggtggtattgagggtatgcatgcttgcttggtcacgcttctagctaggatttttaaggactgtggacaaaagactgtacaactccctgttttgggggaggtcttgatcttatctgttggaattgtaccattttgtgcggtgtttgcaattctctgggctgtgtatcgccatgcttcatttgcttggataggccaagacgttctgggtatctgtttgatgataactgtgcttcagatggcacgtttaccaaatatcaagactgtattttgg

SEQ ID NO: 22565 - DNA, 2601 bp, Zea Mays
cggacgcgacggcgaggtgacccgatgacgtgcgcagcgtagcagcagccaacagtggactccccgacgccctgcccggctgtcccgtctcgaccaccagcaccagttcagcccatccaccgccaccacctcagacgctcctagtcaccactcgctgtcctcggcttctcctaaaagctcgacgcgatggcgacgctggtgcggccgcccgcgctgcacgtccgcgccgtgagcggcggcgggaacaaggacagggtggcgccgcagcggccttggtggggcgggaacaagcccatctcaccgcgccagtcgggcgggagcggggcgcgaggaggcgcgggcggcggcggcgtcgcgctggaccaggtgctaggtgtgctccgccgcgacggcgaattcgtccaggccgccgtcggcgccccgctccgcgacgtcttctggctccgcttccttgagaagaagcagcggaagcagcagcagccgagacctaagcacaagcctttccggcagcagcaggaagaggaggaggtggtagtggtggacgagtcgcccccggccttcccgcccccctcgtacccgtcagggttgtcgtgcgtggagctaatggcggccgacttccaggccctcaaggtgtacgccggtagcgcgcggcactctctcgcgcgccgattcctcggtagcaatagcaagggaaagtctgaacagcaacctaaacccaaaccccaggagcagcagaaagagcagcaacatatacttcaggccccagccttccctccgccctcctacccaccaggattatcctgtatggagttgatgatggctgaccttgaagccctgaaactgtacatcaactactattcggccatcctgactacgccgctcccccagcattatgatcctgacctccttgcccagtacttcgcctcacgtccgcatatccttgcctctcgcgtcattcagatactcttcacatttctctcagctgtggtgaagatgcggatttcaaaaagagctcagttaaccacagatgctacctatagtagtggtaacagcggcaacgggtttgatgatactcaatatatggtcggccaacttctcaaggagacatttcttaaccttgggcctacttttattaaagttggacaatcactttctacaagacctgatatcataggttcagagatttgtgaggcccttgctgagttgcatgaaagggttcctactttcccaagagaggatgcaatgaagatcattgagggagaatttgggtgccctgtgtcgcatatgttcagttatgtttcagatgagcctgtagcatctgcttcctttggacaggtctaccaggggcgcacagttgatggttctcttgttgcaataaaggttcagcggccagaccttctaccttctgtactgagagacatctatattctacgccttgggcttgctttcatacggaagatagccaagcgaagaagtaacatttctctttatggtgatgagttgggtagaggtttcgtcggcgagttggactacaatattgaagctgctaatgctaccaaatttatggaggttcattccagatatcctttcatgctagttcctaaggttcttaaacaacttactcgaaagagggttttaacaatggagtgggtggctggtgagaaccccaaggatttgctttctttgtctaaaggagtttctgaaaaatttactcaagcttcagataatcagaagttggaagcaaaatctcgccttcttgacctggtcaataaaggtgtagaggcatcgctagtgcagcttcttgagacaggcttgttgcatgctgatcctcatcctggtaacttgcgttatactcctgaaggccgtgttgggtttctagattttggtttgctgtgcatgatggagaggaaacatcagcgtgctatgcttgcaagcatagtgcacatagtaaatggtgattgggcttccgtcgtttatgatttgactgaaatggatgtagttccaccaaaaaccaatctacgtcgtgtgacaatggatttagaggatgcattaggcgaggtaacctttgaagatggcattccagaaatcaagtttagtaaggcgggtacttcactctattataggttcaattcagtgcagtggtggcttgatatcttcgtacctatattttatttcaaaagaagcaccgtacctaatgcagttcttttcacattgcttttgcccttgtttattgctgcatataccttttaggtgcttggaaaaatttggtctgtggcatttaaatatcacttccgtatgccaccttactacacacttgttctccggtcacttgcctctttggaaggactagccgtggcagcagatgggactttcaaaacatttcaagcagcatacccatatgttgttcggaagcttctgtccgaaaattcacttgaaacaagaagactcttgaatcaggcaatttttaacaaaaggaaagagttccaatggcagaagattgacgcgtttctaaaattggcttcagcaagcatgcggaatgaagcaagtatctggagctgggccagcatgggcttctatacgctaagtacttaatgggcttcc

SEQ ID NO: 22566 - DNA, 680 bp, Zea Mays
cctcattggtcctcacatttaggaattcagaccatgatgtctaggtgaaggttttgcgctattctttcaaaagagtttatgcactttccctaaagctggagtgttagtaataggctcataaacttgtacagaaggatgtagatgtgatctcacaccgaagaagtttgtcatgaacattactatgtgaaaaatacaaagatatagagttgaagacctctaagaatgcctcgacaaacctgaagtttgaacgtatgacagatgacatcttggttacttttgtggatggacatcttggtcgcttttgtggttggcttttgtggatgcgtgaagctacaattgtagttgtgtaagatttatgtgcataactatgtgggttgcatcagctctccgtactatgtatatacctcccgcgtagctgcctacctatccctaacttgcgacccataaacgtagacttcgatcctataatcttatttgggatcagtttcaggctgtaatagccctgaccgtcttactatggaacacgttaaagtatggtctaaaactttaatgcggattatgttcggtctatctatgtttggtctcatagttgctttgttgctccccgcgctaaacggttttattggagacttaatcatcctttgctgaattttaatatagcatatataattgtttgctca

SEQ ID NO: 22567 - DNA, 1236 bp, Zea Mays
gctcgattgaacaaattggagcggcactacactcctccacgcctccacctccagcctcccactgatctggcctctctcgaggtgagcgcgcctgaatctatggattcgatgtgaagtcccaaagggtagcttttagggagggggaatgatgagatgttggaagttcacaagttgtgtctttcttaaaggctggtaaccttaatcctagatcaatatgagaaggggctacagttacagtccttcaccaccaaggggctacaggagaagggcgcgcagtccaagtcctcatgatcattatggtggtcgtggtagggatctcccaaccagtcttctggtcaggaatctccgtcgggactgcaggccagaagacctccgtcgcccatttggacagtttggtcgagttaaagatatatatcttccaagagattattacactggggatccccgagggtttgggtttgtccagtattatgatcctgctgatgctgctgatgcgaagtactatatggatgggcaggtagttcttggtaggcaaataacagttgtttttgcagaagagaacagaaagaagcctcaagagatgagagctagggacagagtcaggggtcattcttatgatgacaggaggtattctcgctctaggtcgcctcgttattataggggccgctctccttcacgcagccaaagctactcgaggtctccacctcagaatccaagacacagacttagagagaggtcctactccggctcacctgtggacagcagatcaagaagtgggagcccttatgaggatggatatcgcaaatcatcacggagagagaggtctctttctgtcagcggatgaagcagttttacggtctagagctattgctgtgaatctgcgcatggtggcctacttgctatgtctttctgaaccatatatgttctgtctagattatcattcccagtaccagagaagtatcgtgagactgtttgctgtactttctagtcttgaggatacagaagggggtcaccgattctctcagtagatggactattgaccactagctacgccagttccactgctttgtgtatttacaggcagctttgcggtttgaataaaattgtttgcatcgtgaaagctaattggtaaaaagactgaatcatgaaacgaacgttttgcatccctgttccctgatggcatttggatacgattttttgttctttcgacgaacaatttggcaaatctgcatctta

SEQ ID NO: 22568 - DNA, 692 bp, Zea Mays
atgacacggggcccacttagttgcttatgtgagcaacccaacgctattattacgccacgataacccaaacaaaccaatcatcctctccgtgtaggccgcgggattccgtgtccctctccaatccggcgtagccatcgtcgccggatacaggatccggtccccgcgatggagccctcaccaacctcctcctcgccggctgtggcgcgccggttgtcgccggagaccgcagcagcctcgccggaggccgaggaccgcaaggacgatgttggtgtcgatggagatggcatggcgacgtcgtcggttgcgagtgactccgattacgagacgacgcagatgtgtgaccttcttaaatctaaggttggatcactcgagttccttcaaaagctcaatggtattcagaagtcagtagatcagaattgtgcagttgaacctgatacatcatgggatataataaagtcggatttgtgggaagatggtgactcagatgatggatatgttcttgttaaacaggaagatgtggttgatgggatcacttcctttatggctgcatgcctgttatcacttaaaagaaccaaggtagctattttcttcacttgatgggatcatcatggtgaccgaggagttcatgtctctgcatgttgtatgggaggtgcttttatatatttaatgtgtgaattccatgtttgtgtagg

SEQ ID NO: 22569 - DNA, 2870 bp, Zea Mays
gaggaggccatcgcatccgccggctggtcctgatcccggtcccgggtcgtatttgggcgccgccgcacgcagcaggaggaagacatcagcgcggggcgaagcgtcgagcccatctccgccgcgggaaccactgggtgataggtgcatcagagaaccatcacatctgttcgagagcatagtgattgttgggcttccacctcacgcagatatccaggagctggaaaacattgcattagggagaaatgatgaagatggaaaaagatcaaaaaatttatttggcaatagtcaccaccaagttcacgcaataacaaatttggaaccacaggttctttttgcataccctccagagaagcctcttccactcaagtacaaggataccctctctttctgccttcccggaggtgtacaggttcatgctgtcgaacgtactccttcgttcagtgagctgaatgaaattctcctgggacaggaacagcttaaagaaagcaaccaatcatttgtgttccgcctacaggtggctgataactctgcattatatggatgctgtgtgcttgttgaagagatcgtacagagaccatcaaagttggtatcgatgctcatgaatgaaaaacccgtctttccacgccggagtcgatatgtgataactacgccccggtgttattgcatcctatccaggcttccattctttgaactacattttggggtgttgcagagtattcttatggaagaacgtcttgaatggctcacagatggtgttagcatgctaacttccttatcgcttgaggaatcctgtgagaacgatatctgtgaaggaactgcagttacagcacagaaacattatttagatagcaacacaactgatgtggataaatcatctgaatctagcaatggagtttcgtcaacggagctgtctgatactgacagcagttctgggtgtagagaaaaccagcttgactttgtttctaaagaacaacagcaaaatagttcttgtgaagaacagagtaattttaaaagagaaatagtcacttgttctgatgcttccgaagtgtctgatcattttgttccagaagatacatcatctgatcagtctggagttaagcaccatgaacttcattctgcaccaagtatcccggatgaatctggtgcaaggaactgtgatgattccccgaaggaaaatgtggatgatgaggagcttgatctcttcattatagatactattttaccacttatgcgatctcgcctttgtgaagattgtgaatcatctccaagttcacagggttctccttctgaaggcagaaattttgacacccaagaatcggattcagaggagccatcttccattggtgatggagacttagttaaacacaacaacatactgcagtgggctaaggcaaaaaaatatggttctttgcaagttgtctgtcaatactaccagttacagtgtcctgctaggggttcaacacttgcttttcatcccttggagcatttgcattctttgagttttcaccggcctggtgaaacagttcttcacattgctggttctactattgagcttaggtcacgtgatacaagcttagaggttgctgagatgcgcaatgcactctttgctgaggaggaatcgactgctttgtccacatgggcagtggcatccatttgtggatgcctcaggttggaacatgtaatgacactttttgctgccgcactcctggagaaacagattgttattgtctgttctaatctgggaatgttatcggcttcagttttgtccatcttacctctaatacgaccgtatcagtggcagagtctcctcatgacggttttgcctaatgacatgatggattttctggatgccccagttccatacatagtgggcgtacaaaacaagacatctgatgtgctcaaccggctaacaaatgccgtagtcattgatgccaacaggaatcagattaagtcctcttcagtcccacaactaccacagcacagagagttgctttctgccttgcgcccgtatcattcaatacttgttggcgaaagttatcttgcaagaaaacgccctgtttatgaatgcacagatgcccaggtggaaggggctaaaggtttcttggcagtgcttagagactaccttgacacactatgctcgaacttgagatctcatacaattaccaatgtgcaatctaacaatgacaaggtttccttacttttaaaagagagctttattggttctttcccaagccgggataggccttttatgaagctttttgtggacacccagttgttctcagtacatacagacctagttctctctttttatcagaaggactaagtgtctggcagacttgaatgtctgcctcgtcttgccaagcctttagatgttgagctaaactgtacatatcggcagctcagtgtttgtgcaaagagctcgaaggagaagccatataccgtcagaaaaaagtggtagattgccaggatccagttatgggtattgaagaagaatgcttgtagctgcttaagttagtctggtgcggtaatccaaggttttgttggctgtagttggtgcccccataagaagccttgtatggattgttcctgcaaatgcctgtgctgtaacggaaccgtgtctgtggcaaaatctccgaacatgaatgcgtccatttggcaaatctaagcgtgcaatgggacatcgaagaaaatgtaataattcgtggtactccctccaggccgaatcagttgacgctatggtatttaataacggtcgagctttcttattttaaactggatttgtagaaatattaacaatatttgtattattagaaaagtttattactaaaacagattcagagatttatataacaatactagttatgtgcttt

SEQ ID NO: 22570 - DNA, 880 bp, Zea Mays
aaaaaagacagaaattcacatcatagcataaaaatccaaaccagtttaaaaaaaaatactagatatagattcaatttttttggacctgaaaaaagtaccatttccgaagtactactactaccgcatggcgagcgagtagacggttcttctaatgggccgttccgtgggcttcattgtttaacctggggctagctatatagtaataccatcccaccccgctcctcaaaaccctagctagcgccgccgccgctgcagactcctccttttcgatcccttcacaaagcgccgccgtcgccccatcgaacatggctccgaagaaggataaggccccgcccccgtcgtcgaagcccgccaagtccggcggtggcaagcagaagaagaagaagtggagcaagggaaagctaaaggagaaggtgaacaacgcggtgctgttcgaccaggctacctacgacaagctgctctctgaggtgcccaagtacaagcagatctacaccagggcaacaaatacctaaggatgggattcccttgtttgccctctctgtaggagctcgtcttctttagaacagttgccatctctgtcaagagtttgctaatgctatgttagatgagtttagtttggcttgcctattataccttatctggccttagctttttctatggaaatctgccttgaaatgtctgatccgtgattatgcaactctatctaaactactgttatgctgcaattctgtcaacttgtctgaccagcaagtctgatgaatgaacttctgtatagatgtgatatttgcttgtgctgaacgttagtcagaagttgccaaggtcggtcgtctaacgcgcaacactatttttctagttctaagtcaatactatgatatttgag

SEQ ID NO: 22571 - DNA, 207 bp, Zea Mays
gaacatcacatataatgacaaagtgtatagagataaatgtcataatcattattacatagtggaagagtcttacaaaaataaatgataacaataaaacgaactaaataattattcattggcaccatcaaggtgactgggagatgccgcctagattagctcatactccgtattgtaggcctcctcctggaccacctattcttctcctgt

SEQ ID NO: 22572 - DNA, 1733 bp, Zea Mays
gtgtcacttaatagccaagtggataatgggaactctgttagagatatgattgcattgaatatgtggaatgattatagtcaacatcgttcatgatatatcaagaatgtttggaagaggatctcctaggatgaacttgatccaagctgcaactatgaaaaaaatatcccccagatctactactaacaagcgcaagaagagaacatcaccaaaagttggtcgtcttagagcaaactggaatagtggactagaaaagggtttagttgaaattcttcaagatcacaacaatgattgttataagggtcaaaatgggtggtcatcggaagcatggaatagaattgtcaagttattccatgagaaattctcttatgtcacatttacaaaatgccaaatccaagataaagagaaagagttaaagagagactacaaggctcttaaagaggcaaggcaacaaagcggggtatcatgggatgagaggttgtgtagaatagaagcagaagaacccatttggaataacctcaccactagtaacgagagacttaagaagtttcggactaaatctttcccactatttgaggctttaggagagctatatgatggaaatattgctgagggaaccatgaattttacttctattgagccttctcgacctcctgtcacacaaccttgtcaaggtgctgctacacagccttctcaagctgctttcacacttacacaaccttctcaaatcgctttcacacaaccttctctagctgctttcgcacgaccttctcgaaccgcttttagacatccttctctagccgctttcccacagccttctcaagccgcttttgcacagccttctcaaaccattttcacacagccttctgaagccactttcacacagccttctgaagccactttcacacagccttctgaagccactttcacacagccttctcaagccgctttcacacaaccttctcaagctaatatctcacaagccatttgtgatgaagatgatgagctcagagtattggatccaccagcccctgcatcagtgagcaaaagggcaaaaaatgttggtactggtaattcaagaacaagaattaacaagcgtacacaagatgggaatgtggttgagatgatgggaaggtttctagaaatgaaagaaaaacaagctgaggcggatgaaagggccacaactaatgcaaatgaggatgatttccctattcaaacatgcattgctattgtggatggaatggaagagttttctgatgatgagaaggttgattcttatgatgtttttaaggatgcccaaaaccgggccattttcatgactgccaaagatgctacgcgcataaaatggttgaggaagaagattgcaagaacatgatatgatatatgaagctaaagtaatgaaggatgattttgtagtatcgtccagcataaagaaagaaagctgcaatttgtgctattgtcagagatggatatttaactttagcaatttgcaacttttaagtaatctgttaaattaaagatgagatcttgcagacttttcttattacctaatggattctcttattagctgattcaaatctaatcatgcatattgtagtaaggactatgtatgttgaatcaatgactctggttcaattttaaatatcacatgtgttttaagtttcttaattttatggcttatcttctgattttattttcttttatttttatctagcggattttttagtaatatgatc

SEQ ID NO: 22573 - DNA, 770 bp, Zea Mays
gatgctaaaccatgaaagacctgcaccagctttgcggtctgatcctgggatgccatcgtcccatgcacaatccatattctatgctgcgaccgtcctagctctttcattgtactactggcttgggacaaattatctgaccatgattcttgggcctgcaactctgtcgttggctgcctatctgtcttggctacgtgtgtctcggggccttcatacactaaaccaggtcatggtgggagctgttgtaggatctgccgtcggtgctctttggtttgtgctctggcattggcttgtgcaggaggcctttgcttcttctgtgcttgtcagagttgctgtcatccttggatcatcagcattttgtgttagctttgtcgtctacatgattcgtcactggctcaaggatgagtaatgtacttcggagctgcaatgggagatggacagataggcatggtgattttggaaaagtgaatccgttccgattcttatcagaatcgcttgaaaaaatggtgacaaatgggttttggcggagcgattcacgagtggaacaattctcttttccttcagaaactctcggattggggaaaatgaagtttcacaccgattcctaatagtcacatacgcctcgtgtcacactagtaattgtattttttcccagttaatcatttttaagtacaaggaactaaatatgttgtatctagagcaagctcaggagatttatgtcaggaatacaatttttgatgaaaaaatatccttcaacaactcgtttagataga

SEQ ID NO: 22574 - DNA, 2921 bp, Zea Mays
aaaattaaatgcctatgaaagtatagaatgaaactttctattgatggtgcatgttcctaagctaacaaaatattatcatcaagtgctcgcaagaaaaaacaaaatatattttcaggcaggaaacaagaccagagcaaagcattccttcttggcgtttgagaaatggaagcagcgaagaaccctcggggatggtgaagcggaacagtggtttgtcctggagcatctgcactgaactggacgcccccgtgcgatgttagtcgcttgtttcattggtgccagctaagtagcgatggctgaagaagccagaccacgcttcccaccttccctaaaagccatggctactcggctaggcattccatcgagcagatgggcggcgctcctatatgaacagaggcgcacaatgtaggatcggcaatttgcatcggcgaggctgcggtggctgagaacaatcgcagcaaatggaactgggatcggagcgatggatatcgtcgatgtagattcctgcgccgaggaatttgcgtgggaattcggaaatgcagaggccggactggaggcccagctgcagagcagacgcgttttttgtgcggaagaagccgcaccgcatgtaaacgccctctccatctacccgcccacgtgtccgattccgatctgacggaccggatggaagcaccggaactgccggcccagccggtcgactttgaaggcgaaaacgcggaagagaaagagaggacagaggagcccgcttcaggcttcaggcttcaggcggacacatccctcgcctcaatagctccgccgctggcgattagtgaagagagctccgaggtggtatcccttgtatcgcatagattccggactctagtcgtcgcggttctcgcaaggtccgcggatccgcgccccgctctggatctccgcttgatttgttgttctggaaggtatggcacgaaacttgaccgacaacaggaccagaaatacactagttatgattgtgatttttggtctctgttccttcttctatctcttgggtgtttggcagaaaagtggttctggaggaggagacgggatacagacttgggtcaatgaacagaccaaatgtgcacaacttccaaatctgagttttgagacccaccatagtgcatccaaccttctgaatgatactgataattccaaaattgaaccattcaagccatgtgatgagcaatacactgattacactccttgtgaggagcaaagtcgtgcaatgaccttccctagagataacatgatctatcgggagaggcattgtccaccggataaggagaagctttattgcctgatcccagcaccaaagggctatgttgcacctttccgatggccaaagagccgtgattttgttcattatgctaatgtaccacacaagagtcttactgttgagaaggctatccagaactgggtgcactatgagggcaatgttttcaggtttcctggtggcggaacacagtttcctcagggtgcagataaatatatagaccagcttgcttctgtcatcccaatagctgaaggaaaagtgagaactgcactggatactggttgtggggttgccagtttgggagcttacctgtttaagaaaaatgtgttgaccatttcatttgcaccacgggataatcatgaggcacaagtacagtttgcattggagagaggtgtccctgcatatattggtgtccttggatcaataaagctgccatttccttctcgtgcctttgacatggcccattgctcgagatgtttgattccatggagtggaaatgatggtatgtacatgatggaagttgacagagtattaaggcctggcggatattgggtgctgtcaggcccgcccattggctggaagatttattatgaggggtggcaacattctaaggaagatcttcagaatgagcaaagaaaaatagaacaattcgcacaacttctttgttggaagaagatatctgagaaggatggtattgccatatggagaaagagattaaatgacaagtcttgctccatgaaacaatataatccaaaaggtgtaaaatgtggtttgacaagtgacagtgatgtatggtacaagaagatggaagtttgtatagaccccctacccaatgttaatagtgtatctaaggttgccggtggtcaattagagccttttcccaagaggctctatgcagtacctcctcgtataacccttggttctgtgcctggtttctcagttcagtcatatgaagaggacaataaactttggcagaaatatgttgaggcttacaagaataccaataatttgcttgatactggaagatatcgcaatataatggacatgaatgctgggttctctacttatccaaggacatatgaccttatacattctaatggcatcttcagcttgtaccaaaacaaatgtcagtttgaagatatactcctggaaatggacagaatcttacgcccggagggtgcagtcataattcgtgacaaggttgatgttcttgtaaaagtggagaaaatagccaatgccatgaggtggaagacaagattggctgatcatgaggtcacagagatgcagaagacatgccaaaaggatcaattgaccttgcactagtgactcatatctgatcggacagatgcagctgcttataattggaaccctgcagcagtccaggaagttatgaactagcagtggacttacagttttgtataggatactcatttacctctacacgcacctcttttttttgttgttgtatctcagaatctcatcaaatggattgcatgtggacctataaggtctttttcggtgttaaatattgcataattcaccatatgatgattcgtgtggtaggtttatttgtaataaactcgaaggaataattgtgatggtgtatagaacaaaggacacaagatttaaatatatc

SEQ ID NO: 22575 - DNA, 650 bp, Zea Mays
aaccaaacagtatggctgtaggtaatcctgcaaaggtagttggttatacagagaaagaagatccttctttaactatgaaacatgatgcaaggagagattattttgagcatgctgccatcagattgagatgattgatacacctaatgacgagtcttctttctattcgtctgtggaatactgtggagtaaaaaaagttccaaatcgccttattggcaagaagttttgtggagttaaaaaaaggtttcgtcgtcttactcgcaggaaaccttgtgaagttaaaaaaaaaatgtttgacgaaacgcatacggatgccattccggacatttcgtcacaggcacaaggctggatagtcgatgagctctgtgtttccctttctgcccagacaaccaaatgaagatggaaaagggtcacccagggctccaaaatctagagtgtagacaagcatgtccttaatgcgccttaaattggtctggatggcacttttttgtgataaactatctatctaaaccattgactaatgtctactctactctcaacaagatcaattaattgtatatttgatattaaagttggaatgtttagtatgacaaatttaatattttaaaatagatatgcatgaaatttgatcttgatctttttctattatcaag

SEQ ID NO: 22576 - DNA, 1994 bp, Zea Mays
gaatgctatacagagagaggctgcgttgcctcgtatccaatctaacggcggataacaccgagtggcgaccgcctgacgcgcccgtgtcggcaagccgccgacgacttgacgtggggcgggggaaacaaaacaacgcgggcagcgctacggcaagcgcgtccctgccacggcgcggacacagagagtggaaaccggaaggggggaagagagatggattcctccacctcggcggcggcggcaggggaggcggccgtgccgccggaggacgacgtctgctccgtctgccacgaccgcttccggatcccgtgtcaggcgaactgctcccattggttctgtggagagtgcatcatccgcgtttggaattatggacctcctgtacaggcttgcaagtgtcccatttgtcgccgccttataaatctactggtgcctgctgcattatcagggcaggaggatggtccacaagctcaacgtattctaggagagattcagcactataactgtatatttggtggagcaccacgcagcctaactcagaggttgcaagacctacccttcttcatccgaagactgttcagagaactaatggacccccagcggaccctcccactcgtgttcagggcgcggatgctgatgatggtcgcactgagtgcaatttatgtgctgagccctgtcgacattcttcccgaaagcatgctgggcctctttggattcgtcgatgacctgctcatcctgctgatcgtgttcctccacctcgccgcggtgtaccggtcgttgctcctgtaccgccacgggggccagtagaagtcgctgtgcataaaccgtttgtttagctggtttccatgtggagttctctgagatcgcagcagcggatttggaagatcgccgactcgccgagtagatggcaacgtcacggacggcttagcctgtccctgctctgtaccattctactacgcctgtttttctgagactctgacacggtgaactgaactttggttggttgatgcaagtgaatttcccttcgttttactcgtcaggaaaagaaagggaaagagtttgcgttcgtttgtctttgtttctgctctttggaagttggaattgaaactgcactgatgtttgcgtttcaggaactgcattgacgtggatcctgctcagttctcttagcatttacttatgggccaagtttgtagaagtttagtgggctgtagacccattggtgtcatgttgggccaccgcgacgagtaaagaagaggtaggggatcgccctggccgggtagttggctcttgcgggagggatgagatgggaatgggatggcgacgggcgggcgtgtgcggctgcaagcggctcggaaggggcacggtggagacgcagcggaccctcgcctcttctcctgctcctgctgctgacctgacgagctgagcccacggacgagaggggagacgaggaggggcacaccacgcaggagaccggaggagagcgcgcgcgcggatccacctcgatgttggcaagaccatcagcaccgcctttggtgactgctcaaactcctgaagtcggcatcttcattacagctcgcaacgtctcgggtgcactggtcgccaagcttcctggtaacaaaaacaagtgtggaggaagatcgaatgtccggcagcggaacatccaacctgggaaaaggggctgtcgtcgggagtggcgggcgctctcagcagctgaccaagcgcaggcttctaccttggacgtagatgaggagtgcaaacgggtgctcactccattgggtttctccagcgaagacgccgagaagatgctgaagaaagcgtttggctggacccactcgccgtactggagcgaggagagggagaaggaggttccgaccgccgaggcggtagctggagtgctggactacatcaggagcctggggctgtcggacgaagaccttggcaggctgctgaagaagttccccgaggttcttgggtgcgacctcgacggcgagttctgcaag

SEQ ID NO: 22577 - DNA, 2591 bp, Zea Mays
gcacgacgcctacatctgtcaaccacaacccaagcgctcccccctccccgtcgcctgcaggatctcctcgggccaaggaatcgttcccctccggcgaccttcctccctccctccgttccgtttcggtccttccactgtatcaccggcaaagcaaaggatcggaggccactccgcccggaggagcaagccgactctgagcattggagttgtgcttgttcaaaagtgtgaattgcatggagatgggaatgactcctgatgtaatgtatggacaaaatgtttttgttcctgctactgcaactccctaccaatatggttatgcagaagttggatcacagatggaatggtgtaaccagtcgagctctttaggatatgatggccaagataatttctatccgactgaaggcatgcaatgcgtatactacgcagccccagacaacggatctgtgcatcctacctacagttcttacccttctgatccttctttcgtacccgatggctcatttatgcctcaggagtatgttgctgaccctgctaactccacatgccaaatagcccagacatcctattatattccagctgttcttccttatgcacaagatagtgccttgggaagcgcgaccacacatcttcactccaactccaatgttgcatttcttcctggcataccagtctactattgtcccttcaaagcagttccaggactatgcaaagccaccaaaggttcagctgcacaattcagttccacagaagcaagagttgccagatagatgtatgattcctgctaaactccctcatgcttctcaggtatcagcacatttgtctggaaacaattgtcttggatgtgctgctgggtctgatcttcggaagtgggctgctgccgagaaattccaaccatcttcaaagtcaagtggccatctaaatgctactggccaaaaagcgcatagcttagttgattctgagaaaccaagcaatcagaggcctgctataattgtgaagtctcacacaacaaggctccctgttggtaatccggatgggacaatcgttataagaaccgaccagtacaacagagatgatctccgactcgactatatgtatgcaaagttctttgttatcaagtcaattggtgaggcagatgtgcacaaatcgataaaatatggtgtatggtcaagttcctccagtggaaacagcaagctagatagcgcattcagggatgctgacaggatatcgaggaggcattctactaagtgtccggttttcttgttcttctctgtcaatggtagtgggcacttctgtggcatggctgagatggtcggacctgttgattttcacaaggacatggacttctggtgtcaggataaatggaccggatgctttcctgtgagatggcacatcgttaaagacataccaaatggttctttgcagcatatcacactgcagaataacgaaaacaagcctgtgacgcacagcagagatacacaggaagtaccatacctccctggaatgtctgtgatcaatatcttcaaagacatcaaagtgcggtactgcctttttgatgattttatgagctatgaggcagaagaggcgcaaaagagggcacacagaaggtgcaagctaagttcgaatgctccagactttgtacctgtctcacagcgtacaaaagatgagtctggcactgagcagagagaatccaggagcgtacttgtagacaggacatctgggatacaaaatgcggccgagaagccccacgataccaaggtgatcaagcctcaggatccgtgcgtctccgaagagcaggctagcgaggccgagaaagagaatggacctcagggatgtcgttgcagcggcaatcagggccaagaggaggcagcgaaaactgcaactaaccacccgccagcttcaggcttgaaggcggcaggtgcggaggggaagcagcagcagcagcgctggaagaaggtcgaaaatccaaagcagcatgcggacagcgtccctgcccagtgctcacaggaagaagcacctgagaagcggttaaatggggtcagcggctgttcgagcgcagttcaagagggttgcgaggagcagagggccgctgccaaacttgcttctctcaagatcggttccagggcggcagtggaagctgaccgtaaaactagcgcagttggtgtggtgacaatcggctcgatgcctgtccgggttgactgttgtgacgtctagtagtggcccatccggagctttttttttttggtctcacccacagttttttccctttttgcccttctgggttaatcttttacccctccctgtctgccaaggctttcatttccatttccatttccattttcctttttcttttggttgaatgtgcctgccatggttggtggttcctagcttctatatggcatcaaaaaaagaaaaaaagaaaagaacaaaaaaagatgatgattagttaggttcaagtttcattgagtgaaaagctagttttaaaggcaacattctggtggtgggtggtggtttcttttgtggaaaagaaagaagagactatatcagacgttcgttttaatgacattattaagaaaaaaagagagtaggttaaa

SEQ ID NO: 22578 - DNA, 1493 bp, Zea Mays
gagccagtaagccacacacagacagtcagacacaggcacacagcgagggagtcctctcctcccccagaaaaggaaaagacgcattccgcacacgcgcggctgggtgtcgaggccgggagacgcggtgaagctagctgctagcgtagccgcgcgcggcgggcgggctcgagctgcgctgtcgctccatgtcggccaccgccgagagcggtggggatctgtcggcggcgcgccgccggtgggatctcaccaacaagggggccgagagcaccccaattttgaaagatgctgtggaaatatctacagatgaagaatcagatggtgttgttacatgccatccgaatggtaacactgatggatgcgaagaaactattagtggcagtcacgatgatgatagcccagaaggccaggaaactagttccattaaggaacctgatgtagaaggtgacacacaggaagacaaacgtgtaaatcaagattcactcaagttgattgatgaagagtctgctcctcccaagtccccagcaaaatccgcgactgcaagttctagatcggagaggcctaaacgtgttgttccccgaccattttctctttctaatcaaagaagtttgtttggagtaaatggtggtgtggccaatccattggccaataaggataaatctggtgataaaagtagcatctctccagcaagcatgacaaagaagagtacgcagatggcacttaggaagactttgcagcctgagaagttctacacaaaattagaggagaaacataaagctttggaagcagagaaggacgaggctgaggccaggaaaaaggatgagcaagacgttgctttaaaacaactaaggaagtcattggtgattagagcgaaacccatgccaagcttctatcaagaagggcccccaccaaaggctgaactgaagaaggtgcctcctacccgtgccaaatcgccaaagtttacaagttcaaggagaaggagctgcagtgatacaccattgacacctggcggggaaaataccaacgcaacatctacccggccacatcgtcacagcatcgggagtcctagagacgctaacagagtacaacaatgctcgccaaagagcggtgtggcaaccaaaacaagatctgtcaaggctgagctgaaggccctctgaagagcatggagcagccgagtgatgtgtttctctgtacaaaccgaattgtctaaccgtttccatttccatgcatttttgcttctattttatacccaacatctccagcaaaagaaggctgtagggccaatgacgttgttcagcgccgctggaccttatccattttcttacattcgccttgtactcgtaagaactcttggtggcaccatgtgacattccatgtaaattacttgaggatccttgtagggagttcgtccggtgttttgctcctgttaagcccttggccttaactaatctgtgagctgaaaagactatcggaatggcactgttccgtttgatgca

SEQ ID NO: 22579 - DNA, 3090 bp, Zea Mays
accgtccatctccaaacaagcgagtcggttagatatttcctcaagccccagtcagccgcctcctctccctcccacagctcctgccgccgcctctccctccgtcggtatctcccacctcgcaatccactcccacctcccccctcgcccctaaaaccctagctaaacccaagccgaaagaaacaatggctctcctcgcctaagcgagctcgcgcccgccccttgctggccatggcgctccagctccgccgcttcctcccgcacggctacggccagcgacaccgcgctgtcacccacgtgctatcaccgccgccgccactcgcgatgcttcagttcgaggtgtttcagagatattcttccgcaccctggcccttgtcacctttccgcccttgtgaaatgtgtggggttgcattcaggagcaattcaacaaggaaaatgtgctcgagaaatatttttggggttgcatcacagcccaaaagtagcaccttttttactactggactctctggcaaccgtagctctgtatgtttcagagcgagggacagccgtggaattgctttaaagactaataatattgttaattcacgaccattctcaactatatacagtaaaaagctaaggtttcttattaaaaataagacttcatgcaataatctaaatgtgagaagggaagatggaagtgttgcacatagtttgttttgtagatctgagaaacgccaaagcacagttgctacgtgtagcaccattgctgacgaggcttcaacatctactagtaacagcagcaagagtgttactgattctaagactgacactgccaagatgaggcgttcaagaggaagcaaaaaagaagttgatggagttatgaaagataaggaagtacataccaagaaaaagagaatatcttctagaacttgtatagctgcaacaaagacgactgagagttctagtgcgaagcaagaaaacaagaagactgataattgtaaactgaaaaagggtactgatagtcctaaagagaaaaaagtgaataataggtcaaagtcaaaagcaaaggtttctgcttcttctgtatcttctgaagctgagatttgtatgaaatcctctatcgatggttctggtattgagaaaaagccactggtgccattgtatcctccgagagccaaatcagtcgtggttgtggaatcagccacgaaagcaaaagttattcagaattatcttggggacatgtatgaagtgttaccaagctatggtcatgtgagagatttagcaggtagatcaaaatctgtccgccctaatgatgacttcagcatggtctgggaggtgcctgctgctgcctggacacaccttaagagcattaaagttgcactgaaaggagcagaaaatttaattcttgcatctgatcctgatcgtgaaggtgaagcgattgcttggcacatcaaagaaatgcttgaacaacaaggtgcattgggctgtgatgtgactgttgcaagagttgttttccatgaaataactgagaatgcaataaaaaaggctttaatgtccccaaggtatattgatatggacttggtcaatgcttatcttgcacgccgttcccttgattatgtaattgggtttggcatatcaccacttctgtggaggaagttgcctggttgccaatcagctggacgggtccaatctgctgctttggcccttgtgtgcgatcgagaatctgaaatagaacagtttaagccacaggaatactggacaattgcccaaaagctttatgagggtatcaatctttcctcagaagaaacaactgggttaataacatacataagaactgatgggtttcatatttctgatggagccgcagaagacatccgttcattagtcaaagaaagatacggccagaagtacgttttagaggacactaggaagtatttaaagaaggtgaaaaatgctcaagaagcccacgaagcaattaggcccaccagtataaggaggttgccatcatctttggttggaatacttgacgatgattctctaaaactgtacactctaatatggaaaaggacaatggcttgccaaatggaagcttctagaactcagatgattcaagtggatgttggcactcctgaaggagagatgatttttcattcagctgcatcaaagctagacttcaagggataccaatctgtttatgaggacactgagggagattctgtgcatgaggataactttgaggccttgtcaaaattaatggttaaggacttggtgtcccctgttaacgtgcatcttggacagcactttactaagccaccatcacgttattctgagggtgcattgattaaaaagctagaagaacttggaattggaaggccatctacttatgcatctataatgaaagtattacaggataggaagtacgtgacagcaaaaagtcgagttctacaccctgagttccgtggtcgaatggtctcggcattccttttgcaccatttctctgaggttgctgattacagctttacagctaacatggagacagagctagataatgtctctgctgggctaactgaatggaagggtcttctaaaaggctactgggaacgattcagcaaatattgtgcagatgcgagtaatctggatggcagaaaggtagagagaatgctcgaagaaaaatttggtcctatcctcttccctaatgttgacacagacaatagaatttgccctagttgttctgaaggaaccttgagattcaaagttagtaggtatggtgaaggctattttataggctgtgatcgacatccaaaatgcaagtacattgctcgctcattatcacaacaagaagatgaaaccgaacccaccgaagaatgtcaaaaaacttttacacccagattacttggtgtcatgcctgattctgatgaaaaggtttttttgaaacaaggcccatatggccactatgttcagattggagaggacaaaaagggactgtttccgaaaagggcttccctttccaagcctgcgtgctggttgggcctaaggcttgtaatgggagaacttggagtgtttgagggtggttttggtagaattttctacaagagaacatatgccatgtaa

SEQ ID NO: 22580 - DNA, 1226 bp, Zea Mays
catcaagtctcaagaggcagctaaaccaaccagcggtgatctgtagtagcaacttggttcttggtaggtgagatcagatagtgatacagcaggtagctcgagcgagaatgagccaggagcagccgaggaggccgtccggccatgaggagacgagcggcggcggagagcagggcgccgtccgctacggcgacgtgttcccggcggtgagcgggggcctcgcggagaagcccgtggcgccgcaggacgcggccacgatgcagtcggcggagaacctggtgttcggccagacgctcaagggcggcccggcggcggccatgcagtccgcggccaccgccaacgagcgcatgggcgccgtcgggcacgaccaggccacggacgccaccgccgtgcagggcgtcaccgtctccgagacccgcgtcccgggcggcggccgcatcgtcaccgagttcgtcgccgggcaggctgtcggccagtacctcgcgcgggacgacgacgatggcgccgccgccacggctggcggcggcatcgccggccccggcgccggagcgggaggcggcgcctctgctggcgtggcgggcaaggatatcacgaaggtgaccatcggcgaggcgctcgaggcgacggcgctcgcggcgggtgacgcgcctgtggagcgcagcgacgcggccgccatccaggcggcggaggcgcgcgccacggggctggacgcgaacgtgcccggcggcctggccgcgcaggcgcagtcggccgcggcggccaactcgtgggcgtggggagacgaggacaaggccacgctcggcgacgtcctggcgaacgcgacggcgaggttggtggcggacaagccggtggagagcgccgatgcgttgggggtggctggcgcggagaaccgcaacaggaacgacgggacggcgaggcccggaggcgtggcggcgtccatggctgcggccgcacggctcaaccgtaacgaggcggtctgggagtgaagcagctgcctggagaggagacacgtagcctgcgaagtaccgtcgtgtcaatgtgacggctcagaacgtgtcagtgtgtgtaactcgacatcaggcgatcgagctgtgtaaatatgtagtgttgtaccttcgtgcaatataataaagtaagatacgcgcgcgtcaaaagcgtgaccggtgtaagatatactccgtatgcacataattaaggtgcatgctgtatatggtgaagatgtgttaccc

SEQ ID NO: 22581 - DNA, 658 bp, Zea Mays
cagagtgccacctgccacggacacggagggagggaggtgtgccatcagcgcgcagcatcctccagccgatagcctctcactgcctcacttcagcctcggacctgaacagacctcaggaaaggggagacctggaacgaccgtcgagctagagcggctgcgcgctgcgccgagagctggggagtggggactggggaccgaattgaaggcaagaaagtagaaacgaaccaccacaggcggcgcggcaatggatgagcgcggggagaaggaggaggagcacggagtagtggaggaggagacggcggcggttgtgctcaaggaggtggaggtggagatggagatggtcggcggctctgaagaagcctcggcggcgccgctcctcctcgcgcacccgtgctcgctgctgcagctcctgctccgcgcctgcgccggctgcctggtgcgcctgctgcacggccactgcagcgacggcgccaacgacgacccaaaagctgctgccgacgacgacgacgctgcgcctgaagctgctgctgctgcggcggcggcggcgggcgatggcggcgacaaggcagccaccgaggtgtgggcagtgaggaggaggccgacgacgcccggccgtccgagagaaggttccggtggcaatggaggcagccacaactag

SEQ ID NO: 22582 - DNA, 2096 bp, Zea Mays
cgccgtccgcatcaccatcaccacctatcgtcggagaaccacagaatccaccgcatcgcagagacgagtagaggttagatttaggctgaggtaagatggtgtgcatccggcaggcgaccatcgaagacctgctggcgatgcaggcgtgcaacctgatgtgcctgccggagaactaccagatgaagtactacttctaccacatgctctcgtggccgcagctcctcttcgtcgccgaggactacggaggcagcatcgtcggctacgtgctcgccaagatggaggaggacccctccgagccctgccacggccacatcacctccctcgcggtcctccgctcccaccgcaagctcgggctcgccactaagctcatgtccgccgcgcaggccgccatggaccaggtcttcggcgctgagtacgtgtcactccacgtccgccgatccaaccgcgctgccttcaacctctacacctctaccctcgggtaccagatccaggacatcgaggccaagtactatgccgatggggaggacgcgttcgacatgcgcaagctgctccggcagccacagcccaagaagcaccaccaccaccaccatcacggccccggtgggtgctgctcccacgacgcaccagttgcggcgactggttcttctccccagtcttctggttcacccgataagaaggctatcacttgatgtaggacaactccaagtcgctgctctccagggagaacctacttggagtcctacaatcaaatgagatctgaggcattttctgatatgtattttttgcgtgcactgtagttcttgtttaaattttcgctgatgttatgttcagctctttcttatctttcactgttacatttgaaagattgtgaaacttggacgccttcaattttcaccatcacagtagccaatgacgagttgtcccaacatgtgaggtgtaggtaactccaagccctgtttcagggagaacctacttggggtcctacattcaaatgagatacctgggcatttactgatgtttataaataaggcctaatgttttgtcttggtttgttgcatgcattattctgtttgagaattgttctttgatgactgatttagtatgcttaggtagctgtgtgttattgttcatgtaatgattatttgttgttgagatgtttatgccttttcttgtgtctagtgttttatcagcaaaacaaattactttgtggcactgccagtgatgatttgtctgcaaaatggatgtcctgtggactcaagtcccctgtttcagggagaacctactcgaggaaacatggtacataatatgacatcatctgattaaactgaggcattacagaagaaccttatttccttgtcagtttttgcttcgtgctctttccttgtattctgaaagtttttctgcttggtcataaagaatcgtaaagcttggttgatgtcatataacgatccaagcagttgtctttcagtgatgtttctgtctgcaaaatggatgtgctatgtatccaagtccctgttttaggcagaacctacttggagaaacagcatcgaatgtgacatgaatacagagactgagattgtagtgctgctttattgttatgttctatttctctctttcagttgaagtttcgtggaatcgtagttattttttgtcttgactatgcatcgtgcaatttaaatattgattgatgaacctggaattcatttttttgtgcacctaactagcttctgaaccttgcagactcgtatctacagagaggaatcaccaagccaattgtactcatctttcctctcactgggtatacaatatagtagttgtagcggtctttccgtagtagaacggagaaagacctgtgcagtgagtatttgtgtacttggccgatggctcgaatcgtctgacctaatcagcgagaatggcaaccaaatatgcttcgtacttgaaacctgtgttgtttttagacatgtgcgaattttcacagttcatttgattggtgatgcctgacaatttggtcagatctgataccgcggaatatataatgcaagtttgaaacctgtaatgcaattgttttgttattggatcacttacagaggaagagt

SEQ ID NO: 22583 - DNA, 286 bp, Zea Mays
gggtaacactaggttagtgttgttagacgacgtccgcttgacgattagcttttggtctgacacttgttcagtttatctgtcttcatattcgtccatcagcttcactatgcggagtagctcgcgcttggggtcgacttggctcgtcttccacatcgcgcgatcagctagcgtacctaatgaaatgcattatgcatatgaatgcatatcaagacgggtatcgcaagataatattacgattaagtcatcatcataatcacgacaacctaattcttatgtatgtaccaac

SEQ ID NO: 22584 - DNA, 3096 bp, Zea Mays
ctgggctaggctagcctagcaggtacgtaggctgccctcgcagcaccacgcacaggcgcactagctctctctcttagcgagcggcaaaccactcttcttcctcctccatatccatctccacctatataagccgcgcgccaggcagggttgcttccgccaccactcctacataccggtccctgtccctgtcgacccctcgaggcggatcccacgatggtgaagttctcgcgggagtacgaggccagcatcatccccgagtggaaggccgccttcgtcgactacaagggcctcaagaagctcgtcaagaggatcaagatcgcccgccgcgaccgcgctgcccgtagtaccagcaacgaccacgacgacgccaccaccaccacctatggcttctccgtcctcgaccccgtccgcgccctcgcctcccacttcaacaacgccacgcccccggcctcgccagagggcggcagcgacgacgccttgaggagcttggaatcggattcaggggagctcgtgagagccacggacaagcatgagcaagagtttgtggagagggcggacgaggagctggagaaggtgaacaagttctacgcggcgcaggaggcggacatgctggcgcgcggcgacgcgctcatcgagcagctccgcatcctggcggacgtcaagcggatcctcgccgaccacgcggcggcgtcgtcccggcgcggccgcgcgcggctcgcccggaccggcgggaactcgtcgccgccgtccgtggacggctccaacagcggccggcacctcctctcttctcccttcgtggcctcgtcgccgcagtccatgtcagacgggagcgtgcagctgcagcaggcgcgcgtggcggagggcgcggctgtggcggaggaggtgatggcggcgctggagcgcaacggcgtgagcttcgtgggcggcgggctgggcaaggccaagaaggacggcagcgggaagcagctcatgggggcgcgccgcgctgctgcagctgccggccacggtgcgcatcgacatcccgcccaccagccccggccgggccgcgctcaaggtgtgggaggagctcgtcaacgtgctccgcaaggacggcgccgaccccgccgccgccttcgtccaccgcaagaaggtccagcacgccgagaagagcatccgcgacgccttcctcgccctctaccgcggcctcgacctcctcaagaagttcagctccctcaacgtgaaggctttcaccaaaatactgaagaaattcgtcaaggtgtcggagcagcatcggaaaggagacctgttttcagagaaggtgaagaggtcgccgttcagcagctctgacaaggtgcttcagctggcggacgaggtggagtgcatcttcttgaggcatttcgcgggcaacgacaggaaggtggccatgaagtacctcaagccgcagcagcccaggaacacccacatggtcaccttcctcgtaggcctgttcacaggcacatttgtgtccctgttcatcatatactcggtcctagcccatgtcgccggcattttctcttcgaccggaaacacagcctacatggagatcgtttaccatgtcctcagcatgtttgcgctcatcagcctgcacgtcttcctgtacgggtgcaacctctccatgtggaagggcaccaggatcaaccacaacttcatcttcgacttctccagcaccgccctgacgcaccgggacgccttcctcatgtcggcgtccatcatgtgcaccgtcgtcgcggcgctggtcgtcaacctgttcctcaggaacgccggggcgacctacgccaacgcgctgcccggggcacttctgctgctgtcagcaggggttctgttctgcccattcaacattttctaccgctccacgcgcttctgcttcatgcgcgtcatgcgcaacatcgtgctgtcgccattctacaaggttctgatggcggatttcttcatggctgaccagctaaccagccagatcccactgctaagacacctcgagttcacggggtgctacttcatggctgaaacattcagaactcacgcgtatggaagctgtaccagcagctcccaatacaagaacctggcatacgtgctctcttttcctgccatactactggcgagcgatgcagtgtctgagaaggtacctggaagaaggccacgacatgaaccagcttgctaacgccggcaagtacgtatcagcgatggtggcagctgcggttaggttcaagtacgccgcgacgcctacgccgttctggatgtggatggtcattgcatcatctaccggcgccaccatctaccagctctactgggatttcgtcatggactggggcttcctgaacccaaaatccaagaacttttggctccgggatcagctcatcctcaagaacaagtcgatctactatgcttccatgatgctcaacctcgtgctgcgcctagcctgggccgagagcgtgatgaaactccgtctcggtatggtggagtctcgcctgctggatttctcgctcgcttcgctggaaatcatccgacgagggcactggaacttctacaggctggagaatgagcacttgaacaacgctggaaagttcagagcagtgaagactgtcccattaccgttccgtgagcttgaaactgactgatgaagacggagctccatgttgaacagcaggaatttagggggaagaattccaggaatggatacactgtcccctgcaagaactggtgtttaagtggtaataaaacgaatcggagagcgtaactgcacaagaccgagacgctgcagattttaggatggaataagctcaggcgggtgcgccagggtataacatgaggcgttctggtcaggagagatgatgtgcatttaactagctagtggtcgattgagaattgttgcatgtcaatcgactaacaagatcttaattttgtcgatcgtttaagttgtgaaaatgtatctgggaattggtgactgaaaaaaattgcatggaacgaaacatatggtcgttaactaatttatcattccaggggtaagaactagataacatctgctagcaagtactacagtgaaagcaagatgcttgacacggcagatggcatcacatgtga

SEQ ID NO: 22585 - DNA, 559 bp, Zea Mays
actcgttgtcgcgcgccagggcaaaccaaatgaaagcctgtatgagcagaagcccgaagaaacagctcctgtcctgccatatcttgtttctctgcacttggttgcggcctgtggtactggtcgactatggcggcacaatgcctcagctacaagaaaatctttgtggactgctatatcttgcccgacagttcaagctctgcaaggtgaggtctgtttagtttggccagaaaggcatcccctacctgaacacctacgacggccgcaccatccgctaccccgatcctctcatcaaggccaacgacaccatcaagattgatctggagaccaacaatatcatggacttcatcaagttgtatttgcccatggacttcatcaagttatatacttagttaggctcaatgttagcacaaacagttgatgagcaagtttaaatttagagtacacttatgtatgagttatttgacaatgcttatttatgagatattgaatgttatttatctatattatattaattatagtgttattaaatatatgtgtatgtatttttctcttttaaatt

SEQ ID NO: 22586 - DNA, 1905 bp, Zea Mays
gtgtagcactctcctctgatccggagtcgagtcgattcgagtccactccgctgtccgctcgcaccaactcctccatccaattccaactcggcaactcctccaggcagcccggtgggggaggttggtaggcgccggggcgtgcctgtcggctggcggtttcgggaagcgctgccgcgatccttgcccggatctgggcgccacgatggaggacgccggccgcgagggcggcactgccgcggagaatgggaccgagggggagggctacgtcctcgtcaaggccgcccccgagggggagggggaccccaccgccgccgccgccggaggcgatcgcgaggatctcgctgcctccgccccggcgatggcgatggcggtggcggctgcggacgaggccgcggcaccggccaagaagggtggatccggggccacgaaggcgaggctgcagaacggcagggtccccgccggaacttccgccgccgccgccgccgccgggccgagggtgaagaagcccggggtcctctcacagagcgcctccttcccggcgcggggcgcggtggcggtcgcggccaagaaggccgcggcggcggttgctacgcccaagcaggccaagggcgccgtgcccattggatcagagacggcggcagcgcttgcaggccgggcggtggagaagaaggcgagtttggcgcggacacctgttgctcgccggccgatgcttgttaagtctggatcagtggatgcggctgccccaaatgacacagttgttgctgtccaagagtcagatgaaaatacggacaaaccattgaaacaaacacagccagggaaaacagaggatgatgtgcactccaccacatcaagtaccaatactccccgtgcagcagctcgtaagagtgctgctgctgctgctgctggttttagtttcagattggaggagcgtgctgagaagagaaaggagttcttccaaaagcttgaagaaaaaatccatgcgaaggagctggaaaaaacaaatttgcaggagaaatctaaggagagccaagaggctgagatcaaactactgaggaagagcctaacatttaaagccacacctatgccaagcttttacaaggagcagccacccaaagttgagttgaaaaagattcccccaacacgtgccaggtcaccaaggctcggccggcacaaggcagccagttctgctactgctcctgctcctgcagatggttctgtatcatgtgggagcccacggagcactgcaaattcgggcaaggtaaatgaaatcatggagaacatcaaacctcgtgtccctgctagaaaatctattcagaggccagtcacgaaaactccattgcaagtgtctgccaccacaaaggctgaaccaagacccatagctacaaagccgaaaatcgcaaactcgaaacctaaggtttcaagggcaaaggttgcgcaggcgcaaggaaactcagctgaagtccctccttcagaaccttctgcctcggaagagctagtagtcgaacatggcgttggagaagctacaggtcctgatctggcttcacaattggttgcttcgaatgaagtcccagtccatggttgatcaattgcgcattttgcctatttatttccttcttgcagttctgtgaatagtgagggtgtgtgcttcattgaaagttgaatcgctcaaagtgccatggtttatcgtttctggagtaggcatccaaatttttttttcagcttgtcattgagcatgccatgtatattgcttgatattgtgttcatgtttaaaattcccaatcttgtgtatattggatttatatgtctttggacatcctaggattgttgcaatacgtcaatgcaatttgtgcattattttgtagtcgttttacttttagccttttccctcattcttgttagttttac

SEQ ID NO: 22587 - DNA, 752 bp, Zea Mays
atggcgtcctctcctctggcaccaaccaggacctgctcgcccctagtgcccaagctgccccgccgcccctcgctcccatccccgtgtaggtctccccgtcgcagtgcacggtggccgcgcttggcgtcagtcagagcgactccggacagcagctggaccgcggcagcgacggaggagcagaaggagcggaagaggtgcctgagatgcggcggctcttaccgagacgaggagaaccacccgaccgcctgcgccttccatggccacgtcacaggcgagaaggggctgttctccctgtcgccgccgcaccagggcatcgacggcgagtggagcgacaagagcggggtcatcgtgtaccgctggaacgacgaggggagccggcccaacacaggccgcgctaactggaagaggcgctggagctgctgccaggagcgcgaggaggacgcgccgccgtgccagcgcgggtggcacgtctcctacgacgacggctacaccctcttctaggtctccctctacccgtggccgtggggagcagcaggagatataatataagttaaagcctgaggaggttgctggtatcataaaggactttgatgaacctggtactcttgcaccaactggtcttttcgttggaggtacaaagtacatggtgatccaaggtgaacctggagttgtcatccgaggaaagaagcatcagcggcgtggttgtacgtttgttgtgttgctgtatcactctgcgtctctgcaagtgctaa

SEQ ID NO: 22588 - DNA, 912 bp, Zea Mays
cccgtccgtgcggcacttcgtctatagccgctgtccgccgtcgagtctagctacccatcgcgaagtccctgctgtcagcctccgcacatgtcctaaactgtcatagccagtttgcctccatctcgtggaggcgttgcgctgccgtcgagtcctgatatcgatctggttgtcatcgaagtgaagcttagtttaatgctcgccaaggtttcgatcaaagattttattcggagactgtcgacgttctcgcaagttttaaatcggatttaatggacggtacgttaattaatcgcgtgatacggaagacgacccaagtcgacaccaagcgtgggctaatccgcaggatgaagctaatggaccaacctgaagatggttaaatcaagcaagtgctcggtcgagagatactcgtcaagtggacatcgcctaacaaacactaacctttggttactcaggcaaaccccggtgcatttgccacctcccttgatattttaaaatctttctcacttgattgctgcattaggtaataggagttgattgataaaacaattcctgcattaccttccttgaatttgattaccttccttgatcacctgttttacaaaagatttttgatgcttagcctttctttagaaaaacaaaatgttttgtttttacaaaatatgatgtggcaaaagtgggtgggatgttttcgaaaataaaacttgatggtggatctgtcaaaggccttgatgggttcaacatcggaaaagatgtacctctgccaggtaccaaactttgggttgaaatgattaagctgagaccggacgggtgacttgcacgagaaaggagtctcggtgtagtgtctccgtctgagtcgattaaggaccttgtcgatgtaggcctgctgaccgaggaccctttaactgatcacatgcc

SEQ ID NO: 22589 - DNA, 1325 bp, Zea Mays
gttgtacttgttgtagctgggtagcaattgctcctcgctctaggccacgattcatctagtagcctcgtggaagcttgttcccgcgcttgcttggatgcagagatgggttttgggtccgggtttgagggaggaagtgtacctcctgcttctaattctcggatgtcagcacttcctcatgaaccagctggcttctacaatgatcgtggtgcaacagtggacatacctcttgattcaacgaaggacctaagtaaaaaggagaaagaactgcaggcaaaggaagctgagctaaacaaacgggaaagggagctgaaaagaaaggaggaagctgcagccagagctggtattgtcattgaagataagaattggccaccctttatgcccattattcatcatgacatttcgaacgagataccaattcacctgcaaaggatgcagtacctggcgttttcttcactattgggattgacagcttgcctcttttggaacatcattgcaactacagcagcatggattaaatcagaaggtgtcatgatctggttgctagcaatcatctacttcatctctggtgtccctggggcctatgtgctttggtatcgcccgctttacaatgcgatgaggactgaaagtgctttgaagtttgggtggtttttcttgttttaccttctccatatcttattctgtgtctggtcagctgtggctcctccatttccattcaaaggaaaatccttggctgggattttgccggctattgatatcataggcaggagtgctattgtggggatattttacttcattggatttggaatgttctgccttgaatcactgctcagcatcgttgtcattcagcaagtatacatgtacttccgtggaagtggaaaagctgcagagatgaagcgagaggcggcccgtggtgctatgaggaatgccttttgatagagcgacctaggcgactggaagagacacggtgtgacaatgggtaactacgttatgtacatatgctgttcgtctctgagattacttatactagcttatagccttcttgccttcatgcaatgtataccacctaccaccggagcttgatctcttacctaggttcagatgtgcttataggtaactagttttttttatacatttcctacatgatttgtactcttaactcgcgagacaattgttgttgttctttggatctcgagtgattctttgcacggcctgaaaccacttggtcttgaactttgtcagattcttgctgaagtggatattcaggtcatctttttttttctgtctttgcttactatctctttctatcaaggtttggttcagatatg

SEQ ID NO: 22590 - DNA, 3468 bp, Zea Mays
cgagccgcagtccgcggcagcaggtccagcttcatcccccggagccccagcactggggttggcaggcaggctcgctcgccaccgccgcgtgaagcgaagcgcgcgcccccgcggacgctgacgctgggacccgcctgctgggggctgggagtgggcccgcccccctgatgggcgcctgcgcgccggcggcgaggggaagcgtgaggacgaggagcgccggcgggctccgcgcgaagcaggccgggcaagcgagccaccgcgccgcctagtgagggcgctcgccgcccgtctttgcttgttgggttgctcgcacgtcctgttccagttccaggccagagagagcggggcccggggctgcaggcggcggcccgcggaggagctagggttctctctcccactcccccctgcgtcgccaggatggcggttggggacgcgctgcgccggctctgcgaggaggtcggctggtcctacgccgtcttctggaaggccatcggcgccgccgaccctgtgcatttggtgtgggaggacggttcctgcggccacgcctcatgctataccggatctgatgctcctgaagctgggtgtgagccgggcaccagtgtgtgcacgcttgttgggaaggttatggcctcacaaattcatgttattggtgaaggtaccattggccgtgctgctttcactggaaatcatcaatggattgtccatgatcctgccactgccagtgatcacaatctcagaccggaggttgttgctgagatgaatcatcagtttgcagctggcattcagactattgcaattattcccgtgttaccacgaggtgtactgcagctaggcgctacaagtgtggtagtggaaaataccaaccttgtgctccagtataagaagctgtgttctcagctgaacaatcggtcgagtatggcttcatcgtcatctgttaaaaacgatttgaaccctaaagttcagtcacaccctttgaatggtcccacaagtatataccctgcagatacgcgctcaaagttttttagtggatccccaatgtcatatcaacagtgttatggtcctgatggcacaactgtgtctagtagtatattgacaaacatgggcagtaatgcttcaatgctcatggttgcacagagaaatgctcaagtgggtaaagaacacattctatatgcccctgacatgaggttcagactgcaaaacccttactgtgacaggagagttgagagtaacacccaaagtagtgttgtgagctctggttttatctcgtcgatctcagcatcaatggaaagacatccatggatgaccaacagtcaacagttagaacaaggaaacactggagaaccatcagatctcagaaatgttctcttgaaatctcttgcataccgtcaccctttgttcaatgacaacacaaacatggttttagtgcatggcaaaggccaggtgccaggttttgttaatggtcatgggggttttgattttctcccagaaggtactatggtattcaagggtaacctgtatggcagcacagcaaatcaaattttagaccaaagatgcagttctacttctgagatgtcagggcacagaccaactatttcatacaaaatgccccaatctacccaatgtgttaggaaaacagagtctccaaagagagagacatgcgaaacttctgctgctctgtcatctggctctgatattcaggtttctggtggcctgaaaacagtcatttctcaagagaataatatgagtagctcagatcttattagcccaaaaaaacccaatgaagtgcatgcccctactggtgcaattgttaaagctgtcaagaatatggatagccgcaggctcccagacatatctaatgagagatcacctccgcttcgtatggatgctgctgcagaaagtgatttgtttgacatgtttgattctgaagttcatcatttgtgccgcaatgtggataatgatcttacctgtaaagctgcaaaacccgagaattcaaatagagatgtacctgaatcctctgttcgtcttggttcctcttcatctttcaattcagtggatgacaagttcccttattctgggatcttctcactaaccgataccgaccaacttttggatgcggttgtctccaatgtcaatcctggtggcaagcagatctctggtgacagtacttcttgcaagacttcagcggcagatattcctaccacttcgtattgtcgcttaaaagaaccaaagcagtccgaatcatcttcacctttgctaatcaagaatgagttagccgtttcaaattttgtcaaacagtcatctttccaagaaaaggcagaggatggctgtctttctcaaaataatgcaatacagaagtctcagatacgcctctggatagagaacggacagaacatgaaatgtgaaagtgcctcagcctcaaacagtaagggcgttgatatgtcaagcaaggcaagtcgaaagaggtctcgaccaggagagaatcctaagccacgaccaaaggaccgccagcttattcaggatcgtataaaggagctccgggaactcgtacctaatggggcaaagtgtagtattgatgcattactggagaagaccattaagcacatgcttttcttgcaaagtgtgacaaagcatgcagataacctcaaggactcaaacaaatctgatattcttggtggtgagaatggtccactcaaagactacttcgaaggtggtgcaacttgggccttggatgttggtagtcgatctatgacgtgcccaatcattgtcgaggatctcgagcggcctcgtcagatgcttgtggagatgctttgtgaggatagaggtatcttcttggagatagctgacttcattaaaggactaggattaaccatcttaaggggcgttatggaagcacgcaaaaataaaatctgggcacggttcactgttgaggccaacagaaatgtgactagaatggaaatcttcctttccctaatgcgcatgctggaaccgagttgtggagcaggagagaattctaataacaacataaaaatgcctcttgggattgtgcagtatcccataatccctgcgacaggtcatcttaggtgagccagccagcacaaagataacaggatgcatctttgaaatgctaagagcggggggaggtccacccacttctgccatgactagcattgccaacccaggacgagctggaatctcgtgacatgcggtgcatcgtccctgcagtgtgcattcggaaagcctaacagtagacgggaacatcgacatggatagttggttcgccggatgatcgacgttttgactgtaatcttagtttatgtttgttgctgatgctttagccttttgttagtctgcatattagtgagtgaattttgttatgttctgctgctgaatggaaattctgagttgaattgtaggccttgttttggtactgactcgaactcggagttctctgttttgaatggtcggggt

SEQ ID NO: 22591 - DNA, 888 bp, Zea Mays
ggatctcttcttcttcactctggaagcgaagaacagggaagcaaggacatggatgctttcagtgcagtgatggacaaggtaaagagccacccagaaatgatggagaaggtaagtgcagtgatggacaaggtgaagaagagccacccagaagcggtggaaaaggtcaaggacgaggtgaagagccttgctgacgctctccacctgcggagacatggatccaaagataaagaacctgagtctgaagagaaggccgtagaaggcgaggcagcgcagagcgtcgaggaggaggagggtacctctgctgacaagactgcagaacctaatgtgttggagcaggccgtacaggagattcaggctgtcgccgcagctttgcagcagacagcacctgaaactgaaactgaaattccagttgagactgctgctgctgctgctcctgaaactttggctgaaggagacaagcctgaagaaacaaacagggatgtggagaaagacgacccaaagaagcggctcgatttcgccgggttcttcgccatgctgtttgagaggttctgctccccggccaacaagaagaaagactgagtgattgcaggtcagctgtggatttctcgttttgtgatcttggacgtggaaattacattttactgggtggtgtacagtctgcacttgtgttctattaagataaatctgctcttgcttttttactttcttctggtgcaatgactacagtttacttgatgtatttattgtcgcccttgtggaattgatttagtttatgtgaacgattgatttattttgggttaagataatgcagtgagtgtgtgatgccttgtatggacatgtgagaaccgattttgctcattgtgaacaaaattttagccctactcaagc

SEQ ID NO: 22592 - DNA, 978 bp, Zea Mays
aagcttttatcccaatggtacgtgatggtaacttgattgttaatggagtagttcaggaggaagaatttgtgttggaaccagccgactacgaaatggatccgctggtataataactaatcttcttaccacatgctactaaagagccactattttgtagtcctactgtgcctgaaggctatgtctttgtactgggggataacagaaacaacagctttgattcacataactggggtccacttccagttaagaacatcctcgggagatctgtgctccgatactggccaccatctaggataacagatacaatatatcagcatgacatggtgcagcacacagctgttgcatcctgataatacattgtggcaataccacgtggtgcacgccaatttctcctttccctgcatagctttattgacaattgatatgcttagccgtggggttctttatttatttgttgtagccttgcctcaaatgtcgattgggcagcttggctgacagattagtttttttttccctccctacgggcagatgcttgtttaaagacagcaattcttgtactccgtagctaagaatgaatgccatataaatgttgcagtagataagcatcaaggagtgtaggatgaggatggcagttcttttgttttatgagatgagatggtgctctaaacttacgtaaaggaaatacgaagcatagaagagtgcccaagttgtgttatgtatttttttcattccttgatcttggatcaaagattcaaggcaaagtcagcctggtgcaaaggttttggttgaatccttgtatcctgccagataaggttttttgatggtgcaattttggattagcatttgccctagtatttagtgttttttagttctgtattcatttatgatgtaatacaactttgtgagcatagttctgtttggcctgctttgttcaatcgcagtgcgggttcaatactacgttgcctgatgttattgtct

SEQ ID NO: 22593 - DNA, 3823 bp, Zea Mays
ggcactggtactgtcttctccttccctcgccccttccctccactcgcgatctcgcgccctgccctcccctcggctccctccgcctctcggacagagggtgagagggtattctaacagcccccatatacaccccaccggcgccggaacctacgacgtcgcaatgccgctccagttagagatcaagaggaagctcgcgcagaggtcggagagggtcaagtccgtggacctgcatcccacggaaccatggatcatgtcaagtctttattctggcagtgtctgcatctggaactaccagactcagacaatggtgaaatcttttgaagtcagtgagttaccagttcgttcggctaaatttattgcacagaagcaatgggttgttgctggtgccgatgacatgttcatccgtgtgtataactataataccatggataaggtcaagttgttcgaagctcatactgattacatcaggtgtgtggctgttcatccgaccctgccatatgtgttgtcatcatcagatgacatgcttataaagctttgggactgggataagggttggatgtgtactcaaatttttgagggccactctcactatgtcatgcaagtcacatttaaccccaaagacacaaatacttttgctagtgcttctcttgatcgtactgtaaagatttggagtcttggttcccctgatcctaatttcacattggatggtcattcaaaaggtgtcaattgtgttgattacttcactggtggtgaccggccatatctaattacaggctctgatgaccaaactgcaaaggtttgggattatcaaacaaagagctgtgttcaaacacttgaaggacatgcacataatgtctctgctgtatgtttccatcctgagcttccaataataatgacaggttcagaggatggaactgttcgcctatggcactccactacttacaggcttgagaatacacttaactatggccttgaacgagtttgggcattaggttacatgaagggctcacgaagagtcgtgattggatatgacgaaggaacaataatgattaagattgggcgtgaagcacctgttgctagtatggatagcagtggtaaaatcatatgggccaaacataacgaagttcaaactgtcaatatcaaggcagttggtgcggatgctgagattgcagatggagaacgtctgccattggctgtgaaggagctaggaagttgcgacctttacccacaaagtttacggcacaatccaaatgggaggtttgttgctgtatgtggagatggagagtacattatctacacagcgctagcatggagaaatagatcctttgggtctgctcttgaaattgtttggtcaactgaaggagagtatgctgcaagggaaagcacatcaaaaataaagatctacagtaaaaactttcaggagaggaaaagtataagaccagcattctctggagaacgtatatatgggggagtattgcttgctatatgtacaaatgatttcatttgtttttatgactgggcagagtgcaggttgatacgtcgaattgacgtgaatgtaaaaaatgtatattgggctgacagtggtgatttggtgacaatagcaagcgattcgtcattctacattttgaagtacaatagggatctagtttcttctcatctagatggaggggcatcagttggcgaggaaggtgttgaagatgcctttgaattgcttcatgagataaatgaacgtgtccgtactgggttatgggtcggagactgttttatatacaataattcttcatggcgcctgaactactgcgttggaggagaggttactacaatgtttcacttggatcggcctatgtatttattaggatatcttgctaaccaaagtcgtgtatatcttattgacaaggaatttaatgtggtgggttatactttactactcagtttgattgagtacaaaacacttgtgatgcgtggggatttggaacatgcgaatattattttaccatccataccaaaggaacaacacaacagtgtggcacatttccttgaatcacgtggcatgttggaggaagcccttgatatagccactgaccctaattacagatttgatctggctgtgcagcttggaagcctcgaagttgcaaaggaaattgctattgaggcacatagtgaatcaaagtggaagcagttgggggaactcgctatgtccactggaaagctcgagatggcagaagaatgtcttcttcaagctacagactttagtgggttattgcttctatattcatcacttggagatgctgaagggataacaaaactggcatccatgtctaaagaactaggaaagaacaatgttgctttcctttgcttgtttatgttaggcaaattggaagaatgtcttcaattgttggttgatagtaatcgtattccagaagcagcactgatggcacgatcttaccttccaagcaaagtttctgatattgtctcaatatggaaaaaggacctccaaaaggtgaattccaaagctgcagaatctctggcagatcctgctgagtacccaaacctgttcgaggactggcagattgctctgaatgtagaagctactgttgctcccaagaggggtgtctacccacctgctgaggagtacatgacttatgcggagaggtctaatgacagccttgtggaagttttcaaaagtatgaatgtggaagaagtaccaagtgataatggagatcctgttcatgaggtcactgaggatgacggagtcgagggaagtatggatgatgttgttgaagttgaacccgatgattcaacagatggcggtgtccttgtgaatgggaatgatgtgcttactcctgaccagcagtagagatatcacgacaacattctgcaccagcagattagttgcctattgtaaaaaagtaagtaccattatgtatacgcacaagtcaagaaaaaattaaattgacaaagaaccgtgctcccatacccttgaataaatctatgttgtatgtaatgttttctaggcctaagtagtatgtaatattcttcatgtttggcgtgtaagggcgagtttgagaaccctatttttcaaagggttttcattttttcaaagaaaattagttcatttaaccttaggaatatagtaatcctttggaaaaatggagttcccaaactagtcctaaaacaaattatctgcccgcatgccatggtagaccgtcaattttcctagtatattttgtggtttaaactttcttctcacagttgtaggtcgccacatgttcagactcgatagtcatgtaaaagaagttcctccccatttgtacaaggcgttgtgcgtggtctagtattgcggttacagaaacagtcttggatggtaattagcatttggtctagataagaaattttgtaattcgattcattttgggtgggcattgtagatttgtggtatgttatagattatctacccttgtatgtttaccacatgatacgatactaacattctttaaggttggaatttgttcaccgacacatgggctgcgacctgcatagcatgtgaaagttgtatttttggttccccagttgtcgataacttgatccttggtttctgccatgtattgtactgccttcttgtaacttattttgccttttttagatgtactgtttttagtatatagtgtatttagatacaatgtataaccagttgtataataaaaactagttaagtgtccgtacgtcgctacgacacataaattatacgttcttttgttcacagacaatgtttgagaagcatttcaagtaatgcattacttatatgcttaatagtaaataccat

SEQ ID NO: 22594 - DNA, 1440 bp, Zea Mays
agaacatgtcgtgctttgcatgctgtggtgatgaagatacacaagtaccagacaccaggactcaatacccaggacatcatccagcaagagccgacgcataccgccctgctgatcaacctcccaagggttcccaacctgtgaaaatgcaaccgattgcagtccctgccattcctgtggatgagcttagggaggtgactaagggttttggtgatgaagccttgattggtgagggctcctttggtagagtatacttaggtgttctaagaaatggcaggagtgccgcggtcaaaaagttggattctaataagcagccagaccaagaattcttggcgcaggtgtctatggtgtcaaggctgaagcacgaaaatgttgttgagttgcttggttactgtgctgatgggacactccgcgtccttgcctacgagtttgctactatgggttcccttcatgatatgcttcatggaaggaaaggtgttaaaggggctcaacccggcccggtcttatcatggttgcagcgtgtgaagatagctgttggggcagcaaaaggcctcgagtatcttcacgagaaggcgcagcctcatatcatgcaccgagacatcaagtctagcaacgttcttcttttcgatgacgacgtagctaagatcgctgacttcgatttgtcaaaccaagctccggacatggcagcccgacttcactcgactagggttcttggaacgttcggataccatgcgcctgagtatgcaatgaccgggcaactcagctccaagagcgatgtatatagttttggagtcgttcttctcgagctattgaccggaaggaaacctgtggaccatacattaccaaggggacagcagagtcttgtgacttgggctaccccaagacttagcgaagacaaggttagacaatgcgttgactcgaggcttggaggggactaccctcctaaagctgttgcgaagtttgcagctgttgccgcgctgtgtgttcagtacgaagcggacttccggccaaacatgagcattgttgtcaaggcgctacagcccctgctgaatgcgcatgcgcgggcgaccaacccttgagaaaaatgctagctcaaaagcttcgcattgctcctctccgccctcttgtatgatagataagtaagatacgagtcgccgatgtcgttcttgcggacacatggctggcagcgtgtgacatttgtgattatttgtcccctgaattgtaaacaagattcttgtatccccacaacacttgattctttctatcggttgcaagatgacctgccgttttcttcttaagaagtcaccttagcaaaactcacaaactttattactccctctgttcaattataggatgctttgattttgtctagtcgtatagtttttgttatataaatatcttacaatttggaatggtattgactattgagggcttgtttggatc

SEQ ID NO: 22595 - DNA, 1567 bp, Zea Mays
ctccgagctccggcctgcgcttcttcctcccccgttgaggagttggagcaggaaaagcaggagctggagtttattgcagatatgtacgtgaaagaaagttctgagtctaggacaattgctgatattgaagaatcagaaacccgagctcgcaatcaggctgaatatttgaggagcaatctagaggagcatagtcttgagcttcgggttaaagcagcaaatgaagctgaagctgcatgccagcaaaggctttcctttgctgaagtggaactagaagagttaaggaccaaagtagatgcatctgaaagagatgttgtggaacttaaggaggcaataagaattaaagaggctgaaggagacgcctatatttctgatatcgagacagttggtcaagcatatgaagacatgcaaacgcaaaatcagcatcttcttcaacagcttactgatagagatgactttaacataaagctagtatcagatagtgtgaagatgaaacaagcttgtagttcccttctctctgacaagcttatgctagagaagcaactccagcaagttaacacttcactggagtcatctaaactgaaaattgcccgtggcgaagagcagatgaagacttgtgtagcgcaagctataaaaacttcagctgaaaacagacatcttactattagcctggaaaggattgcgctggagttatccaacacagataaggaactcaagtggcttcggtcctccgttggatcctctgagaaagaatacgagcaaactcagcaaaagatatctgagctgagagcgttactggagcacgagaggagtgagaggcggcggcttgaagaacaatatgaagaggtgaaaaatgaagttatggagctgacctctgagactgaagagactactgtccggaaacttgaggatgaaataaaagaatgcaagggtattctcaagtgtggtgtatgctttgaccggcctaaagaggttgtgatcaccaaatgtttccacctattctgctcgctatgcatccagagaaacctcgagattcgccaccgaaaatgtcctggctgtggaaccccattcggacaaaacgacgttagggaggtgaagatatgaacctcaccaaagtgacagtgacaaaaccgacttgcgtgtgaacagcagcaacaaactcccttgtgaatatcgtctgttatgttggcgaacatctagatctaacttgctttattactgggattaaaattaggataagaactggaagaagtgaagttcctaatttatttgctatcgtgtgtgctatgtatgattacccttggcagcgagtggtgtatctgctgggtgtcaatatgctcgaattctagctcctccctgctagcgggtgcatgccagttttattaaggctattccatgtacatggtgtcacactctttaatacataccacataggatgaaaatctgatgtgacatgtgattgaaacatagggagacaccactcatgcaccagattatagacattgaaatctgaaccatctaaatgaactgtaactcatactcttatatatatctaacattttgtcttgtg

SEQ ID NO: 22596 - DNA, 185 bp, Zea Mays
cgcatatacatatatttgtttgtttgtttgtttgtttgtgtctgttggtattcgttgtgcgtcgcaaatagtttgcgatccgttttcgagcttcgagggatcgaagatcaagagttggtgaccaagtgatctggctcttcgagttccacgaagctgaagaccctgagcatctatttggtgaaggc

SEQ ID NO: 22597 - DNA, 1611 bp, Zea Mays
caaacagcgtgcacaatcacaactcttcctctgcatccacacacacttgagccccacccgtgccgccgccccgcatcccttagcgctgccgctgccgctgccgctgccgccgcccatgtccgccgccccgccccgccgcgtggtcatctgcggcggcggcgtggtgggcgcgtgcacggcctacttcctcgccacccacgccgcgtcccccaccgtcccgacgctcgtcgagaggtgcgccccggcgtgcgccgcctcggggaaagccggcggcttcctggcgctggactggtgcgactccaccccggcgctctccaggctcgcgcgggcctccttcgcgctgcaccgccgcctggccgacgccctcggcggcgccgacgcctacggcttccgccccgtccacaccctctccgtcctgctccccccgcaccccgccgcctcctcctcgccgccgcacccgctgctcccgccctgggtcgacccctccgcgtccgccgccccgccgagggagcccgggacccccgacaccaccgcgcaggtccacccgggcctcttcaccaaggccgtcctcgccgcgtcgggagccgaggtcgtcatcggcgaggtggagcgcgtcgccgtggcctgggacggccgcgtcgccggcgtcgtggtcaaggggcgcgacggcgtgctggacgccgacgccgtcgtgctcgcgctcggcccgtggtccggccgcctcgaggtggtcagcgaggtgttcgacgtgtccgggctcaaggcgcacagcatcgtgctccggccgcgcgagcccgagaaggtcacgccgcactgcctcttcctcagctaccagccggagcccggcgccaagatgctcgaccccgaggtgtacccgcggcccaccggggaggtgtacatatgtgggatgagcaaggacgagaacccgccagatgacccagcaacgataacaggcgagccagactcgattgcaatgctgcataagatcgcagggaaagtgtccagccagctgaagaaggaggagggcgctgaggtggtcgcggagcaggcgtgctacctgccgtgcaccgccgacgggctgccggtcatcggggagataccaggcgtgaaggggtgctatgtggccacgggccacagctgctggggtatcctcaatggtccggccaccggcgcagccctcgccgagctcatccttgacggcaaggccaagatcgttgatctcgaacctttcagcccggcaaggtttctcaagagaaggagcaggcgtggagtctgacagtgtgaatgttcagattcaagctcgctactgaataaaacactcttggttctcccttttgcatgactgatgagtgttgcaaaacatgtatgtgcgaataaatcatggatatatagtacttgatgttctgtatttgttgttaatcacagacggacaacttgccaacacccatgatcagattcagatgttcatttagctgaggttgagctcgacaagctgttgcatctgcagctattctacgtacaccatgtctacgcaatgtttccttgtggtcaagtgacacaagtaaccttataaaaaagagtgagacctgtgctcgatatggttcatttcag

SEQ ID NO: 22598 - DNA, 2688 bp, Zea Mays
gaaccgtgcacccttgtaatggatttggaaggaactgatggaagagagaggggagaggatgatacagcatttgagaagcaaagtgcattgtttgctttggccgtttcggacattgtgttgattaatatgtggtgtcatgacattggcagagaacaggctgcaaacaagcctcttttgaagactgttttccaggtcatgatgaggttgttcagtcctcgcaaaacaacattgttgtttgttatacgtgacaaatcaaggacacccctagaaaatcttgagccaattctaagggaagacattcagaagatatgggatgctgttccgaaaccccatgcccataaagaaactccaattagtgaatttttcgatgttcaagttgtcgcactgtcgagttatgaagaaaaagaagagttattcaaacagcaggtttctgatttaagagataggtttcagcattcaattgcccctggtggacttgctggggatcgtcgtggtgttgtcccagcttcaggtttctcatttagttcccagcaattttggaaagtcatcaaggagaacaaagatcttgatttgcctgctcataaagttatggtggctactgtacgttgtgaggaaattggtaatgagaaagttaccagctttatagctgatgaggaatggcaacaatttgaggaggctgtccaacatgactttgttactgggtttgggaagaagctcagcagccttctggatagatgtttatcagagtatgacatggaggctatttattttgatgaaggtgtcagaagctcgaaaagacaacaacttgagtctaaactgttacagcttgtcaatcctgcctatcaatctcttctaggtcacttacacactagaactttagaagcatttaaggagtactttggcaaggccctagaaaaggagggatttgctgttgcagcttgcaattgtactgaaactttcttggagaagtttgatagaggatctgaagatgctgctattcaacaagtgaattgggacacctcaaaagtgagggataagcttagacgtgacattgaggctcatgtagcttcagttcgggctgctaaattgtctgaactttgtgcgaaatatgaggcacaacttaccaaagctctggtggaaccagttgaatctcttctagattcagccagtgaagacacgtggccagctattagaaagcttcttcaacgcgagacaaaaactgctgttttaggtcttgaatctgctgtgtcagcttttgaactcgatgaagcaactgagaaagaactgcttgcgaagctggagaagcatggaaggagtgttgttgagtcaaaggcaaaagaagaagctggaagggttttgattcgcatgaaggacaggttctcaacattgttcagccgagatgctgactctatgcccagggtgtggacaggaaaggaggacataaaagctataactaaaaccgctcgctcagcttctgtgaagttgctttctacaatggctgcaattcggttggaggaggatggtgataacattgagaacactctttcccttgctcttgttgacacttcaagacatgggactacagataggagtatccaattgtccgatccactagcctccagctcatgggaaagggttgctgaggagaagactttaattacccctgtgcagtgcaaaaatttgtggaggcaattcaaagctgaaactgaatatacagtcactcaagccatagctgctcaggaagcaaataagaggaacaacaactggctcccacctccatgggcacttgctgcaatggctatccttggattcaacgagtttatgacattactgagccctttgggtgcaatcagaaattggcagggaattccaacatggatttcttcctgccatcctttcactgtcgacgaaatttgttcccactgtaatgaacatcctgaagagattagctgacgcgggtcaagaacctgcagcagcccccgagaggcaaagagagatggagctccaaccaaaatccaccaggaacggttccttatacagcaatgtgacatcggcagggtcatctagcgtaaccacttcggagattggacctgaatattcaagcccggttgtgcaatgattttgctgatctttagctttttggctggaaacatactctagcagttgagaaaaacagggtgcctcaagaacgtacgaagattttggtgccttgcagtttttgtaagcttgcccttcccagactgattcaaggtggcactgcccctcgttgttattcaaggaattttggggctggcggggttgtttgtaagagcattgtaaaataacttgtttcattttttggtttctgtaacatgaatacatgacatgtgatagttgtatataagatctgtggactgggggcgtatcagcgcattctacacagctaagggttgcatagttgcgagaactgaagcatgtaaatgtctttaaactgccatctgattgagatgcagtagtactgctgttctggaataagacatgtctgcttttggggaaaatgattcaaaaaatgtttcgtttgaactcagcgtctgctgaaaatgaatttggttcccgacccctgttctggttggccgaaattcacaagtttggtgttctttttgtgtactgtccgtacaataatacagtccaggcaaaggacaccagacg

SEQ ID NO: 22599 - DNA, 1482 bp, Zea Mays
cagaatgtgagtccgagtgcgacctatacccgtccccaaccgcccccattgaatccaccggtgaatctatcgctccgccaccacgaggcctcggccctatattaactccacagcatccatgtgtccgagcctgtctgtatacctgtcactcacgctaccgccgtgaccgatcatctcccactctctcgtcagatcctctcggctagctagctagctagctaggacagaggagggaggggaaggcgctggctatggcgactgcggcggcggcggcggccatggaggagccggacgtcgtcaacggccgcgacgtggtgagctgggtggcgtccggggtggtgctgtggtcgaccgccttcttgctggtgcgggcgctgttccccaagcgctcctacgacttctgcaaccgcgccgtctccaccatgcacgccgtcgccgccgtgtgcctcgcctgcctctccgtcgacgactggtcgtgccccgtctgcccgctcgccgccgcatcctcccctcgccagatgaaggcgctggcggttacgctggcgtacatggtgtacgacgcggcgtgctgccacctcaacggcgacacgcggctggacaacgccgtgcaccacctggtcagcatcgtcggcatcggcgcggggctcgcctaccagaggtgcgggacggagatggtggccagcatgctcgtgacggagatgtccagcccgctgctgcacctgcgggagatgctcaaggagctgggcgtgcgggacacggagctgaacctcctcgtcgacgtgctcttcgccgccaccttctccgccgcccggatgggcgtcgggccgtacctcacctacgtcaccgtgacggccgacaaccccatcctcatcaagctggtgagcgcctactggttcctgcggatcctccggatggtcaggtacaagctcgccggcaagaagaagccgacgccggccaagctcgccgccgccgccgccaactgacgtaataagcgccggcgacgaccttcacgagctacgcacatttatgataccgggagttggattcgacagaggccgtgctgtacatatagtacaaatacacacacacgcccgcctctgaagcaatgcaatgcaatgcaatgcaatttctccactgccaaggatgtgtctgtcatctctcatcaaccaagtgtcggtgcgtaccaactgtacgcgcgttgctagcgcaaaaagaaaagaaaaaaaagaaagaaaaaaatcgttcaatgagtcctgttgaatgtggcggcactttaactgcaaactgctgtgagtgcgccaaaacgattgatggtgatgaatgatgatgatgatgtgcagcactgtgaccacgtcaacctttcaccaacgtggcaactaaatggcgatgaatgaatgaaggccggtacagtacagggtacagcagtaagaacattgaaggcgtcggtcctgtctgtccctaataagcagctagaacggggcg

SEQ ID NO: 22600 - DNA, 2005 bp, Zea Mays
gtccagataccatcgggcagtcaagaacagatgaacggtgatagttgtgattcccagtaggaaccctcttatccgttctcgtctcctgtcccggactcccgggaccggggaggccgggatcgagaagggcaacgagcgcgtcccgtgctcgccgctcctcgccgatggcgtcctccactctgccagcctaccccttccgtatgtctcttcccggactacgagccccggaccctgctaaggttaagcacgtatccgttcgagcccccgctcgccgtcttcccgttgcagcctccgcggcaccatcaggcgccgcggcggcggcggcgagggagcgcaggcgtttcctggagagctacgggctcaacccaaacgacttcgaggaagatgcagaggagaatccgagggaagagagaaaggacaggcggagacgtcggcagtcggggagaggggagcaaactgcggaagcggcagtgactccagcgaaggtggaggagcctcgggagactcacaaaatgctccaggtgctaggtggaaaagtccgcagaaggaaattactttcacccaaagataggaatgtccgtccaatgatggaagttgtccgaggagcagcctttgacattttacagtcagctggtggttctcctgcttcactcagaccgggtcggtggctagacttgtatagtggtactggatccgttggaattgaagctatgagccgaggatgttcagaggttgtccaaaaattcatactgaaacttcagtcatgatagtctagacatgaatgcagataatccctcaaaacacccattcatctaattaccttttatttttttatcacaattcaaataagctcattgttgacaaattactcatgatgtttttatatatccaagtaaggactactgcatacttgcaaacttttcatcattcgtgcccacaagcacatcaagtgcagtgtatttttatgttcaatttccatgatgatcttttcaagggttgactgagctaggtgtgggtaggcagaagtcttcttcttttttcccatgattgtcgcatgatgatctattttaggaaatgggcttagtcttctgcagtagtaactccgacaacctccaccacttaggtttgagtcctcatccacttgaatttttgacacttattcttcttatttacagtgacacctagttcctcctaggatggttgatttatttttgtctagtcttatagctatcagattgatttcaaatgctgacaaatgaaaagtgtataagaccttcatgaagctgctaattctgaaattggatttggcgattgatgtgaactagaagtaatgcaatataatcattgatttctttgtcttttttttttcaaggcacatttcgttgagatggatccttgggtcatctctgaggtcctcaaaccaaatctggagtgtactggatttattgacgtgtcacagatacatatgctccgcgttgaaaaattcttggccaatgccgaaaaatctcatggtaaatatccttcattcgattatatcagtgtaacaccaccatatctggaggtcaactatagcacactgctcgcccaacttgcaaggtcaccattggttggaaaagactgcttcatcctagttgagtacccgctgaaaacagacatggctgaatcatgcggaaaccttgtacagatagctgacaggaggtttggtaggaccaacttgctgatatatgggccaacttggtcagagaaaaagaagaaaagatgatttctgaagggggggttcaggcaaggtttgcatgcagggtgtcatgataatcacggttgggaatggttaaggtttcaagatttgcacaggggatatttggcctagtgtaaggcataagaaggtggttgatcttggttcactgggcctatacctgaataacttgcacagcacagagagctcgcatttcgctttcctttgtggtcagagatccacatccgacaagagggggggggggggggggaa

SEQ ID NO: 22601 - DNA, 558 bp, Zea Mays
tggccatcgaatctgcttatccgcaactgcatttcccacgaggagcctaaagtccttgtgccggagtatgcattgagctatggtgattcagtagaagatgtatgtctttggtggaaaccataatggtcgttactttggcgacattcaggaggagttcttcagcgccttcaaggaggagatggagatcaagcgacaactcgagaaggtgcaggtggcatagagggccccctggtgctttgccatcatctctgcttggatatgaggcactgacaggttccctagatgattctagatttgaagattatcttcacagactgaaccaagattgtgagcacattgtattgctaagacaattttgtcgtacaactgagttggtgatctggagacgatcgagtgtagagtgttgaaggcacatctccaatattcctacacaaaaacacaatgcacatcaactaacagaagtgcaataccctctcatttattagcctcatcaaactgaattgaaagacaacaaactgaactgaaagtcaacatacatgccaggtaactgtattgcaa

SEQ ID NO: 22602 - DNA, 1055 bp, Zea Mays
cctataaatagtgaacagtattccgttactgttcaggcattcgattaattgcaatcgcatctctcggaattcaactctttgccaaggcaaaggtataattgtattcaatgattcagtatattaagtaaatgcaatgtaattcatctatgacatatttattcctcttatatcttttattttatgtcattttataatctttaccggaattttatcacgaaggttcgagcttcgtaattatgcttttatcaaccttcgtccaggatcctaatgtttcatagacgaaggacattaacatttaacattttatgttgccttgttcttaattctaagcatttgagaacaagtccccaacacttctcatgtccgaaataatctacagtatttcgaacaatcaatttagaatacttgtagatgaacttatgcacctgtgcaatgatcaactaaacaaactggttagtccagaaggtttgtgatagtcgtcaaacaacaaaaatgattataggaaatgttgagataatttccctttcactgggcaaggcaccagagagaggtgaccgcgccatctagtggccgcgacgcaggggacgagcttgaggacgacggcaccatgggtgagcgccatggaaccccgagcagatgggagcgcggccacagaggaactttgcgcgcaggcaaggagaagatagagggagcagggaacttgggcgccgagcaccatggggagaagaggccgagaagggggcgcggccagcagagaggcgttgggagcgctgagggagagagagctcagccgggagaacgcgtggtcgagtagagggcagggagtaacgccggtgagccaggggcgcggcgcagagaaccggagggcgcgcagccacgaaaaaaatagaggctgggcgcggcgggaggaaggagaagcagagcgcgaaggtgggagctcggctgcggctgggagcttctgtcggcgagcaggatttttaacagcctagagcggtggctgggaaaaatcaggcgagggcggctgcgaggataaggctgtgcgctggagatcgaag

SEQ ID NO: 22603 - DNA, 138 bp, Zea Mays
ctgtcttttcacagatgtaggtgtcactgtctttagaaggagtgatgattcaatagcatttaagaaagtgttagagggtcagctatacttagtggattttgatagagctgaactcgacacttgcctaatttctaagac

SEQ ID NO: 22604 - DNA, 2774 bp, Zea Mays
tggctagcgaaggcccagaatattgaaccgtgcacccttgtaatggatttggaaggaactgatggaagagagaggggagaggatgatacagcatttgagaagcaaagtgcattgtttgctttggccgtttcggacattgtgttgattaatatgtggtgtcatgacattggcagagaacaggctgcaaacaagcctcttttgaagactgttttccaggcaacatttgaggtcatgatgaggttgttcagtcctcgcaaaacaacattgttgtttgttatacgtgacaaatcaaggacacccctagaaaatcttgagccaattctaagggaagacattcagaagatatgggatgctgttccgaaaccccatgcccataaagaaactccaattagtgaatttttcgatgttcaagttgtcgcactgtcgagttatgaagaaaaagaagagttattcaaacagcaggtttctgatttaagagataggtttcagcattcaattgcccctggtggacttgctggggatcgtcgtggtgttgtcccagcttcaggtttctcatttagttcccagcaattttggaaagtcatcaaggagaacaaagatcttgatttgcctgctcataaagttatggtggctactgtacgttgtgaggaaattggtaatgagaaagttaccagctttatagctgatgaggaatggcaacaatttgaggaggctgtccaacatgactttgttactgggtttgggaagaagctcagcagccttctggatagatgtttatcagagtatgacatggaggctatttattttgatgaaggtgtcagaagctcgaaaagacaacaacttgagtctaaactgttacagcttgtcaatcctgcctatcaatctcttctaggtcacttacacactagaactttagaagcatttaaggagtactttggcaaggccctagaaaaggagggatttgctgttgcagcttgcaattgtactgaaactttcttggagaagtttgatagaggatctgaagatgctgctattcaacaagtgaattgggacacctcaaaagtgagggataagcttagacgtgacattgaggctcatgtagcttcagttcgggctgctaaattgtctgaactttgtgcgaaatatgaggcacaacttaccaaagctctggtggaaccagttgaatctcttctagattcagccagtgaagacacgtggccagctattagaaagcttcttcaacgcgagacaaaaactgctgttttaggtcttgaatctgctgtgtcagcttttgaactcgatgaagcaactgagaaagaactgcttgcgaagctggagaagcatggaaggagtgttgttgagtcaaaggcaaaagaagaagctggaagggttttgattcgcatgaaggacaggttctcaacattgttcagccgagatgctgactctatgcccagggtgtggacaggaaaggaggacataaaagctataactaaaaccgctcgctcagcttctgtgaagttgctttctacaatggctgcaattcggttggaggaggatggtgataacattgagaacactctttcccttgctcttgttgacacttcaagacatgggactacagataggagtatccaattgtccgatccactagcctccagctcatgggaaagggttgctgaggagaagactttaattacccctgtgcagtgcaaaaatttgtggaggcaattcaaagctgaaactgaatatacagtcactcaagccatagctgctcaggaagcaaataagaggaacaacaactggctcccacctccatgggcacttgctgcaatggctatccttggattcaacgagtttatgacattactgaggaatccgctttacctgtttgccatatttgtgatttatcttgttggaaaagccctttgggtgcaatcagaaattggcagggaattccaacatggatttcttcctgccatcctttcactgtcgacgaaatttgttcccactgtaatgaacatcctgaagagattagctgacgcgggtcaagaacctgcagcagcccccgagaggcaaagagagatggagctccaaccaaaatccaccaggaacggttccttatacagcaatgtgacatcggcagggtcatctagcgtaaccacttcggagattggacctgaatattcaagcccggttgtgcaatgattttgctgatctttagctttttggctggaaacatactctagcagttgagaaaaacagggtgcctcaagaacgtacgaagattttggtgccttgcagtttttgtaagcttgcccttcccagactgattcaaggtggcactgcccctcgttgttattcaaggaattttggggctggcggggttgtttgtaagagcattgtaaaataacttgtttcattttttggtttctgtaacatgaatacatgacatgtgatagttgtatataagatctgtggactgggggcgtatcagcgcattctacacagctaagggttgcatagttgcgagaactgaagcatgtaaatgtctttaaactgccatctgattgagatgcagtagtactgctgttctggaataagacatgtctgcttttggggaaaatgattcaaaaaatgtttcgtttgaactcagcgtctgctgaaaatgaatttggttcccgacccctgttctggttggccgaaattcacaagtttggtgttctttttgtgtactgtccgtacaataatacagtccaggcaaaggacaccagacg

SEQ ID NO: 22605 - DNA, 240 bp, Zea Mays
ggggcgccgcacgtggggtgtcgcgcccgcgctgtgccgcgagaggccgcgtgctcgtgcgccggtgccgcctgcaccgtcgccgggtggccgcgcgcttgcgccgggcagccgcgcctacccggcctgcgccgagccgccgtgaggccgcatgcccaagccgccgccaggcgctaaccgccgctgctgtggaggtagtggccggttagggtttcatgtcgtccctaatgagactgcgcc

SEQ ID NO: 22606 - DNA, 2453 bp, Zea Mays
aaagccagagccaagtaataacaactctcgatctttcggaaaaaggtgaggcccaacacctctgcctcgcaccagtaccacaacgccacgacacgccggcgaggtggacgagcggcggcgatggcgggcggcgaccgggagcgagacgcggacgaggagacgaggaatcagatgatgcagaaccttttcggggaccagtcggaggacgaggacgatgcggacgacgacgacgtcgccgagatggtcgatgaggacgacggccaccagccgcagtcgcccccgcagtcgcccccgcagcgccaccaggagctggacgacgatgcctacgacgatgaggaggaggacgcccgcagccacgcgcccgcccgcgcaagcggataccactccgaggaagtggatggtgaggcagagaatggaggggaaggggaaggcgaaagtgaagggcaagttgtaatcgaagaggaaagtgaaggtgaagctcatggtgccgatcttgatcaaggagaaagtgatggggacaaagtccagagctccccagaaagagaactcgatgaccagaggatggaacctgatgcaagaggaatggacagtgaagatgaaggctaccagcagaggacagtatctggcagaagaaggggagttattgcctccgaatcggagggatctgaagatagttactatgctgctggagctcaagaagacgaggaacctcgccaaacaaggaaacaaagctctccgttggaggaagaaagagatcatgaagtagttcgtgatgtgtttggtgatagcgatgaagatgaaccagctccatatcgtgttcgccatgaaatcgatgaagattctcataggtctcacatggaggatgaaggccattatgagaaggacatgcaaccagatgacgttgtggctgacgaagatatgcgatatgaatctgatgataatcgtgaactgaaaccaaaagagaaaccagtcggtccaccactagacttggtggttccatttaagcaaccaccagctcgacctgacaaaatgaatgtgatcaaggtatcaaacattatggggattgaccctaaaccctttgatccaaaaacatatgtggaagaagatgtttttgttacagatgaatctgggactaagaaaaggatacggctagaggacaatattgtgcggtggagaaccattaggaatgcagatggcactacatcttgtgaaagcaatgcacgctttgtaaaatggaaggatgggactatgcagcttctgattggcaatgaggttcttgatatatctgtacatgaggcgcatcatgaccagtcccatctgtttttgaggcatgggaagggaattctacaatcacaaggaaggcttttgcacaaaatgcgatttatgccatcctccctgtcttcaaagtcgcatcgcttattaactgctctggttgattctcagaataagaaaactgttaagatgcaaaaatggtttgagactaaggatcctgagaaagcgaaaatggaaaaagaaagggttttgggccaaaatattcgagcccattcaatccttcaacgcaaaagagaaaaagtgaaccgcaagtacacacagcctgcccgtccaaggcggcagctttctccagggttcttggaagacgctctagatgaggatgatgagcctggctatgattctcggcgaatgccaggccgtaggcgttttgaggatgaattggaggctgaagcactagctgagaggcgtatcattaacgcgaagaagaaatgttccccacaaaccaccgtaccctcctgcccgtccaccgagacgtcaagcggatgaatactcggggagtgagagggaggagtcagagtacgaaacggatggcgaggatattgaacattcactgcctcgtggaagaagggaggacgagctggatgaggaggaagaatacgaggaagatgttgaagaagaagaagcgcctctgtcggatgaagaaatggaggcaccgaaacgtaagagagaatcagggggtggtgggcaaaggcgcgaggagctggtgtctgaggaggacgacgaggaccacgacgattctccgccaaggaagcagccggctgtttcgcatcgtagaaaggctgtcgtgtttgatgacagcgacgaggactaaaatttgtaaaaccgtatgacgacctgacatgatacgcttgctttttctccccatttgtttaagagaatgattagttatttttcgtcatgctggtgtaatatggttgcaattctacctacagaggtgagattgtacatgctttaatgatgcgtgggctacagtgaaaggaaacgcaagcatgaaacgatttttttttctttttggttagaaaggaacagcgaaacatgaagaaatcgataattggattggagcacgttcataatagaaccacaataacgtactggaaataaaaaaaaaaactgaatgctgg

SEQ ID NO: 22607 - DNA, 1197 bp, Zea Mays
ctagtagcctggcagttccgacgctgcttgcggcggcgcttggcaaggccgacaaacggcgaccaggcaggcgagctcgtcgcctcgggggcagggaggaccggagcccctcgcctcggaggaagggaggacctgagctttatgatcaagcaggagctctgattaacagaattttttgaattctccccaaattgaagggtgcacctgaagggagttatggatcggaagaatcaaactcctcaaggtcaaatagcacaggtggttgtggaatttcttgaggtagcaatcagctgcatcgtcttcctcaaaggcttctatcctcctcgtgcctttgagaggagaaggtacatgaatgtggtggtccagaaagcactgcatcctgagcttactagctatattcactctgtgactttcggtcttctacctttcattcagaagggattggtagagagggtcgtggtcatcttctatgacaaagggcatgtaccgaccgagaagttcgtcttcaagcttgcagtcaaccagtcataccgttccaagttagaggaggcgaacctggagttcgctctgcgagcattcttgatcaagctgactgttgctgagcctgttaccagaccccttccaccagatggtagctgggaggtgaccgcctacttccggtccctccccggcgacggtgaccgagaagctcagctgtggattcctacggacgccgagctgtggatgcagcctccgcagatcacccccatcaagtcagtcagctgtgaccctctgacgatgcagctctacttggagcaccctagcgtcacggaaccgaaggagccaccggcataatgacaggagcctgcacctgtgggctgtgatacactgcaatgtatagaatttttttttgcaaggcaactttggcacgaaccctcgagtcagtgaaaccttttttgttcagacagaggcaaggaaactacttctatccagtggcttcaacttctggctagagaaggcgacactgtaacaatcttgggccttgggattttggctgaggctgaggctgaggggggtggcagagacggacgacacatgggtgagaagcacatggctagaagaagagtggggaggaaactgcctgactgaaagatagaatagagaccaaacagaaccctgccaaacatggcattttgccgtgactcgtactctcactct

SEQ ID NO: 22608 - DNA, 2458 bp, Zea Mays
cgtgagtcggggactcgggaaccggagcacacaccaaaacccccagtgccgccggcggacgccctccagtttccggtcttcactaactccccgttttccgtactgctgcggcgcctcggcagtcggcaccacagccggcaagatgccccccttccgaatgccttcccacttcctcgcgcttccgctcctactcttgctgctcctccaggcgccgtccccggaggcggccgagtctacgccggggacccggacgcgcaagatcggcagctcgggggcgtcctcggtgttctcgctctttaacctcaaggacaagagcaagttctggactgagtcgatcatccgtaaagagttcgatgacttggaaggttctgcgtcgcgggactctagcaaaaacggcctgctcaacttcacaagagctggtaatattgcaaactatttgagcctggcagaggttgattccatatatcttccgatccctgtgaacttcatctttattggatttgatggaaatggacggcatgagtttaagttggggcctgaagaactggagcgctggtttacaaaaatagatcacatatttgagcacacaagaatccctccagttggtgaagttcttaccccgttctataagactactgttaagaaacttcagcattatgatcttcctttagtcagccatgtgaaccacaatttctctgtgcatgccatacacatgggagaagatgtcttatctgtttttgagcatgctataaaagttctatcctgtaaagatgatctcgtggattccagagaaaatgaagagatttttttgcaagtggatagtgctcaaatggaacatatattttcaactcttgttgatcaccttcagatacaagaggcttacaatatctttgttctgaaccccaagcctattggcaagaggattaattatggttatcggaaaggcttctctgagtctgagatcaatttgctcagggagaacaagaccctgcaagctcggatactccagtctaaaagtgacaacaaactcttccttgatatcgagaagggagtcaatagaaggccgttatatgaaagtcatcctctatcatcattttcatggacccgaactgacagtatggatatgggggattggtcaaagaaatgcaaggaagcattaagcaagtttgagctgctgaaggaagggaagagtaaagaggacattgtttatgaaaaggctgttcagatattacacggtacaaaggatgaggtgcatgacattgttcaaagtgctcttaagtccagtgatttgaagggtctccatgcccaatgtcttacagatatatggataggcagagagaggtttgcttttgttgatctgagtgcagggccatttgcctgggggccttctgttggtggtgatggtgtccgtacagaacttagtctgccaaatgttgcaaagactgtcggggctgttgcagaagttacagaagaagaagctgaagaaaaattgcaagacacaataagggagaggttttcgtcctttggtgaggattaccatgctgttgatattctattagcagagattgatgtgtatgaactttttgctttcaagcattgtgtgggaagaaggatacagcttgccctttgtaaagaacttgatgagaggatgcatgacctgaaaaaggaactggagggttacaatactggagattttgatgaaactaacaagaagaaagctcttgatgcactgaagagaatggaaagctggaacttattcagagatacttcagtggaacatcatagttacacagtggctcatgattcatttcttgcacaacttggatctatgttatggggctctatgaggcatgtaattgctccttctgcctctcatagagtgtaccattactatgagaagttatcgtttcagttgtattttgtgacacgagagaaagtcaggagtataaagcagttacctgttaatgtaaaatccatcagggagagcctgaattctgtgctattacatcatcaaaactccatgtttagccaaaacatgctgtcattgtcagaggatccatcattgatgatggcattttcaatggcacgtcgtgcagctgcggtgccgcttctattagtcaatggcacctataagtcaactgttagcacataccttgattctgctattctccaacatcagctacagaagctaaatgagcacaattcactgaaaggaaggcattcaaatcacaggtcaacattagaggtcccaatattctggttcatacataatgaacccatattattggacaaacattatcaagccaaggctctctcaaatatggtcgtagtagttcagtcagatgatgattcctgggaaagccatttgcagtgcaatggaagacccatcttatgggatttgaggtaaaaagaggatcagtcaccttaccgcctaaaaagactcgccttacgctttacc

SEQ ID NO: 22609 - DNA, 163 bp, Zea Mays
ctaatgaagctacacctgaaattgataatctcactaccacaatgtcagaaattgatagacttatatctgatgtggttcctgagaaaaacgtagccgaaacgtctactaataagggaaagaaaactgaggagacctcttcggaagataaaaatttcgatcttcg

SEQ ID NO: 22610 - DNA, 3451 bp, Zea Mays
gctgcattcctcccacattccaccgcacccacacgtttctttaccctaaccccgacagccgccgccgtttcttcatcttcctcgcagcgccggcgctccatcttccgctccctccccgactcgcgatcggcacgcaggcgacgtcggggcagtctcggactcggcggcggcgtcagcggctccccctcccgccctcgccagtcgcttccggtcctccgcacaccaaccggcgactctgcgtgcgcgcctcctgcttccggtggaccgtcgacggcgcccgggccccggtggccggcgggcagcgagagccagcagcctggcagttttcctcattggaaaggaaggacaatcagagccaagagtttcttcataaacctgaataaaaggacatgcgattacggaatacagacagggcaccgcgtagctcaggtcgtcgcaataatgttctttcatggatctctgaagttaaagacacatctaatgtgggcgtaagaaagaaaagggggagaagagcacctccatctgctaaaagattgcgtgataaaagggtggataaggcgattgaaagtgatggtgctgttgacagtgacagcgatgatacagatggacaggttgacaagaatcagcctagtgcacacattgaggaacatgttgatgggagaactggtgatgacttagcaacagcaggccactcaggcaattcttccaatggtccatcctcagcttcagaagaacaggaccattcaacaaactctaaagacaagctccaaaaagctagctctcaaaacacaaagaaggtttttggaaactcaacaaacggcaagcaaggtgcatctaatttggaacaggaatgtgcaaatgaagatgggtctcatgtgctagttgctgctgtgtacaaggatattgataatgaaagaagctctcaaaagattagggatgatgtatcagatgcacaactggatacagcttcatctgatgacaaaagttcagaagaagtcgaagacgtgaaggtttgtgacatttgtggagatgttggtgaggaggagaagctcgctgtctgtagcagatgcaatgacggcgcagagcacacgtattgcatgcgggtaatgatggaagaggttccagatagtgagtggttgtgtgaagactgccaaactgctgtagaatctgaaaatgagaatagactacaaaagtctcaggtgaaggctggcacttcaaaagagctttccttagaaggggagattaacaaacctgccattgctgcaaagggaagaagttcatctgactgtgaattgaaggctgggaatatagaaaacaaagagtcaaataccacaaatgagaggaatggcacagtcaaaaccaggacggaagaagatgctgtgacgacatcctcaactagagatattttttctgaaactggtggcttgtacatgggggctgactctagaaagagaatggaaccatcacacgagacattcgtgtctgatgctgacaaaggaaagcaacctagccatcaagtatcaacttcattggtggttaatgctctgaagaatcaggcaccacagtctcgtggtcaactttccaaatccacttctttcaataactcaaaggtccccaaagtgaaacagctattgaatgaagttcctcagaagccaaaatttttgaaggaatcttggtcctctattatcaataaaaaggaaggaccaatcagcatgactactaagtcagcgaccttcaaaaagcctaagccttgtgagccaacaaacaaggcaaagtcttccgtcttgtcacctgtcgaggagccaagggtgccgaatcagttggcgagccacaatgtaacaaatggtcagtgttctatattggggcctccctctgccacatcatcaatggttgctcctgttctaagaactgatagcacaactcagctgctctctacaagaaataacacagttgactcaaataatttaggttctgttcatctacaaggaaacagtgagctaaagaagcctcgtttagcaaaagtgccgggaagtatgatgctatctaatgctgaaagatccgcaggtgggattcttggttccggtgctcatcgagaagtgattcaaaattcagacccttcacatagggatgctaaaataaaggaccaaactggcttcagacagggtgcttctagcagcaatcggacaatccgttgccaaagatgtaatgaatatggccattctacacatttttgcgaagttgaaaaacttcgtttgtcttcaggaaaacctttgagtgagcgaaacttgaaggatgcatctgccaaaagaaataagacatccgaagttagtacattggcttctagtgaaaaaactccttccagagaaccagagcatgtcgtaaagtgtgctattaatcagaatctgataaatgggcctaatgatggtatacctgccccattcagccatgtaaagaagcactcattatcacctcgagctaatgtgtccatccctgggagcggagtagattgtagcaagcctaagttcaaaaataatgatccatctctatctggcacagcaggaatctttgttcataatggtcgcattatgccaaatgatcatagggatgaacctgctcaagggttttcagctggtgatgaaccaacgtcttcaactgtccctgagctgggctggatatggcaaggtggttttgagctgcagaggactggaagttcaccggagctgtgtgatggtttccaagcccatttatcatgttctgcttcacagttagtgctggacgcagttaagaaattcccttctaaagtccagcttgaggaagttcctcggaagaattcatggccaacacagtttcagaaaaacggtccaacttatgacaacataggtctttttttctttgctagagatgttcaaagctatgaaaatcactacagtaaattagttgagaatatgctgaagaatgatttagttctcagaggaagtgttggtactgttgagttgcttatattcccttccaatatcctatcaaagaacttccaaaggtggaatatgttgtactttctatggggtctattcagagttagcaaaaaagattcctctaacctcccatcttatctatccacaagtagagtagaacgaaattttaatgatgatctccaggccatggattggatgccatctacccattcattctcacagaacaggagtgatttagctgaaccggaccctgatttgttaaagtcaactaattttgaaccgagtttggaagccagtcgtgaggtgtgtttggatggagagaactctttgaatcaacttgtacgcagaagagctctagatgatcacctagattcagatgcaaaagcatgttcaacgattagcaatggtgccatgggttcctctgccatgtctatgcaaagaaaacatcaggagagccgtgtatcagtgcattaagagaa

SEQ ID NO: 22611 - DNA, 2052 bp, Zea Mays
tagaattccaacatgagcaagtaatgcgtttagatgattccgacttgaacaggcctgctatgtggtgtttatgtgattggttcggatggctatgcgaaaagaaaaccctgtgcttaatgcttgtcaagcatccaatggccggatcacgcgagctcaagctgctgcaaatcgtcgaagctttggaactttcccttctgttccattgcctgcaaaaaccgaacgaaaacagactgcacaagggaaggcaaaacgaggttcttcatatgacaacaccagtgcaagtgttgcactttcaggcccccagcctaaaaggcgcacagtactcagggatgtgaccaatttgagcaatgctaactctaacaaaagttttgctgctgcaccgaagcttcagacaaagccctctctaaggactggaagaaccgtgagcaaaagcaagccgtgcgcaaaaaagattcctaaaaaaccaccaccagctggtaatggaagtgcattgactaatgttttgaacattgctgaagaaacacaagcggagaagattttggcagagagagtggaacccgttctgttgcttgagaacagggggccactttcattgcagaatgttgaaaggaacagggacagtgcttgtcatgaggtattctttgaggaaagaaacctcagggataaatgtgaaccttctgtgtcaaagaatggggactcttatgtgttagacattgtagatatcgacaaagataatggcaatcctcaaatgtgtgcttcctacgttgtggagatatactcaaacctaatggcttcagagcttatgagaagaccaagtccaaattacatggagggtttgcaacgggacatcacaaagggcatgagagaaatactcattgattggcttgtggaggtttctgaagaatacaagcttgttccagacacgctgtacctaactgtatatcttattgaccggtttctttctcggaactacattgaaagacagagactacaacttgtgggaataacaagcatgcttgttgcctcgaaatatgaagagatatgtgctcctcgagtagaagagttctgtttcataaccgacaatacatacacaaaagcagaggtgctgaaaatggagagccagctgctgaatgacctgggatttaacctttctgttccaactacaaaaacatttctcaggagattccttagagcggcacaagcatctcgtaaaactccttctatgactttaggatttctggccaattatctcgcggagttgactttgaccgaatatgagttcttgaaatttcttccgtcgttggtggcagcatcggccgtgtttcttgctagatggacgcttgaccaatccgacctcccatggactctagagcactacacctcttacaaatgctctgacattcaattgtgtgtctgtgctctacgggaactccagcataacaccagtaactgccctcttaacgccatccgcgagaagtacaggcatcaaaagtttgaatgcgtagcgaacctaacttcaccggagttccctcggtcgttcttcagctgacacgccaatggcaccgattggtgagcaacgttagcagcagccgtagcgcaggttgcgttaacattattgtagcatccccttttaccccccaatgtctgatttggctgtgtgttgttatcgagctgctgtgtcccagcctggcctttttcgagtcgcaagtgagatgaagaaggacagagagatggctccttggcttttcttttgtttgtttgacgtaaaaggttcacccggttgtaaacaacactgtgtgtagggctttttgcttgggctgttgttaattaactgtaaggggagatggtccggctggcttgtatgacgacaaacgacgggatgatgtttgtgttgacacaattcgttcattggtagcctcggaatggaaattagtttattgccagtgattactctggatggaatgactgattgagtgtttgttatatatacatgtgcctgattttacaggatctgtaaagtttttttggatgactagggaatagggatctctg

SEQ ID NO: 22612 - DNA, 1406 bp, Zea Mays
gttgccctggtctgcaaactgttcgatctctggtccggtcctaataactgtgttgtagattgcttgcctccttttccattgcaccttacttacatcctgtttggattgactaaaatagcttgctagctctagctgttgaaaaagagctctagctgatccaaaaagctcagcttatagtccaacttataaccagtttgaactattcaatggcccagcttataaaaagttatgagccggttttctccagctattgcagcttagagcaagtttgataatacggcctcctgccacctagaatgaaaggtttgcctcttcgtgtttacctggatctggaggccagtaggaagccaactggttttgaggacatttttgtcggttaccatgccagtgatgatgtgcaagtaacatatgctggaaaatcatttcacaccagccgaagttaccatatatcaactgaaaagagaaacgatgcacttatctactggtcatcttcaaggtgtcttcctcatagagataagctcgcaaaagacttcctctcgctggttcctcaccattccttcggaagatgtttgaacaatgtcggcggtcctgacatggcgctatccatgtatccagtctgctccaccaacgataacggcacgccacactggtgggatcacctacactgtgcgatgtcacattacaagttcgttcttgcaatcgagaacaccaagaccgaaagctacgtgaccgagaagctgttctacgctttggaggctgggtcggtgccgatatactttggggcgcccaatgtctgggatttcgtccctcctaattctatcatagacgcctccaaattcagttcactcagaaagctggcatcgtatgtgaagacgctggcaaatgaccccgtagcctacgctgaataccacgcgtggaggcgttgtggtgcgttgggtaacttcggcagggcacgcgagatgagccttgacacgctgccttgccgactctgcgaggtggttagcaagagaggtggtaagggtgcagatgcattgtgagatggatcggtgttttgtatggcttgtataccttgatccggacatgtgaaatagatgtaaatggtacgtcgaacgaagtgctcatgctattccgttcaggaaaaaagtgtctagtgtgttattcatgtcaagatcaagcacacattgtcgaaagaaatagtgcagctattcttttttttacaccatctctcttttatctgttgaatttggagggttgtacagttgttggagcagagagagttcgtgtttttaggtagagaagtatacagatgggatttcttgctgttgctatgatatgaaccatataaccatgtgtgagctccgcacttaaatttgtgtagatgccatggttgtctttttgttctttgc

SEQ ID NO: 22613 - DNA, 682 bp, Zea Mays
attcattaggccctctgtcgtcgaaatagaatgaaaagtggataataaataggctacaaactcacgatataggactactttgcatatttattcatgtccaccataaatacgccaaggttttccaatgggacaagccaaaaaaaaatcatccacatgaccatatccatccatctacagctactcaaactcaacatgtctggcttttgcgcgatcctcccgcttgcactggtgatatgatacatgcattactatgatattgtagggttgtaatctccacctcacatcaatggggagcagagataacaaagctcgacgtccctcctgaatggaaagtgtggcagatctggctggcgctgctgagcctcttcgtgtcgtcggccgtcctcttctacgccttcttcacgcacgcgaggctcaacctgaggccgtagaagaagacagccagtcacctctcaaaatctctgatggcgagtcctcaaggcatgagggctgttgccgactgcgaccacacctcgctgtttgctgcggcgtgctttgtacctgaacccgttcctggttttcacaccttgtgttacagatagacaacagatgagattgctcttgacctctctcaataataattgacggaagaagcacggtgcattctgccctgcttcgctgggcagcgtactattcaacccga

SEQ ID NO: 22614 - DNA, 2806 bp, Zea Mays
ttttaagaaagaaactaccaatatgaatggagtttttctccaacttctcgtcggtccgcttcttctcatggatccgtccgcccaggcctccgccgcctagccgcagtcgggctcctcctctgttccaccgcaagctcctcgtccacgcgctccattcgtcccgccgtttctcctccctgcgccgacgccgggcccaccttcgcacgcggctgtggggcccgcctcctccagccaccgccgtcggggtcgtcttcctcgccatcaactgcgccgcgccggtcatctcgtcttgttgcgtctgggtgtcgcggcagctgctggacggcggcggctacctcatcttggtcctcgtcgttctcttcttcctcaacgggaaggacaaagcggcggcggatttggggtcttgtctcccaaattcaattcctccccgaatctaaccgccgacgtcgctaccacggatcaccgtggaaccctgagtctgtcgcgggttttggcatgctatagccgccagcctgcagcagcgatcgtctcggtcttgggcccccgggctagccatgtcgtggggacggttcagcttcactcctcagcaggggcccacgctgacgcggcgaacgcgggtgttccctgcgcacaagcccgcacctcgcaacgtggtggtcatcgatgaggacgatgatggtgatgttatcattatggagcgcgcagctgcgcgaggttcaccttctgcggcggcggcaccaggatctgaagcgaggaaagggggcggcttctctggtgatgtgatcaacatagatgatgatgaagatgagaaagatggtaccagaggggataaagcaggtcctagcatgtcctgtgcctctgggtctccagtagcgatgaccccaggccggggttctcccaggaaccgatatgggtttgattgctcgtatgacagctctgagagcaatttgaccaaaggatgggactctgacactgatgacggctctgattgtgagattttggatgacacggctggtacagcccgtgagatgtgggagacggctgcttccagaaaaaagccacctcatggtgtcgacgagtgtgaggatggtggtgctactgcattcgcgtcatgtgctgggttggagacacaaccaggtaaatactctgagcatctctttggtgctgaacgccatccagacgagagtatgtcttggttttacagtgctgcaagcaagtatggctctcaaaatagtagtgacagtacaaaagaaagccctgggcatgctcaaagcagttctggcactgaaaagggtgtccatggcccttctgtgccaaatactgaagaatgctctaatggagatttttccagtataaatggtagagaaagcgcacaaaatcgaaatggcagtggaaaggatatccctactgaatgccatctcaatgataacatatctcaaagttttagcgatgcccgtaaggaaggtcttcaaaataataccggcaggtcaaaggatcaccatgaccagttttcagcaccaaatgtcaaagaatgttcaatggttggttctgaaaaagcttcaagaggggttcaattacctcgccctgatgaaagctctgcctataacttcgctcctgcaaataggtttttttctggaatctggtcagtggataggaacgatggaagtcctccaatttttgtcagtactcctgaaaaggttgatgagacaatacctgatgatgtatattcacaaaagtatccatcaccacctgaagcttcctacaacacaattttttattctgctcaagataatggtctggccaagggtaaggatttgcttcaggatcctgaggaattagggcggtttgcttcagtgatcggtgaacgtgaaaaacacaaagaatctgttgagtacaagcgagcagcagaggaggaatgggcttcaagacatcggcaattacaaatacaggccgaggaagcaaagaaattgcgaaagagaaagaaagctgaagctcaacgattgcttgacatggagaagagacaaaagcaaagattgcaagaagtccgtgaatcgcagagaaagaatgaagaagctatacaactgaaggagcggtatcgggcaacggtcggaaaggagctggaagatatagaaaggagacattgtgatatgacttcaatactgcatgcgctaggcatctcagttgaaggtggtgaggttaaagccttcaagcaagctcttctgaaattccatcccgacagggtatcaaggaatgatatttatcaacaagtaaaagcagaggagacatttaagttcatttcgcggctgaaggagaagctacctcggctatcctaatagccatcccactcttttttccacatgccttggcgcatcctccattcacctgtagggtcaaggtacagaattcagaggatgtttattggcgttatttacaagtaactagggctttagcttgttaaatgtgtttttgtgtgtgtgtgtgtgtgttgggggttgggttgggtaggcattcgtgtcagctatgacatgggatggtaaccacttcgatttgtgatggcgaaatggttgtacatcaccgatggcagaaagatcattttttaagaccatctttattagtttattcgacagaataccacggtgtcgtcctctggttttcatacatctgcattttgtactaaaaggtgtctaggagacatcagaacatcgcaattaaatcagatgtagccctttctctattgatgttacatatgcagctgcatctttaatctgtacgtatttttgaacggccatgaagatatagaagttgc

SEQ ID NO: 22615 - DNA, 3587 bp, Zea Mays
ggcttgctcgtccagtccacccacgataagccaagtcatccaccccactccctgcctaccaggagccaagtcatccaccccctcccccgacgaggcaggcagggacagggcaccacgccattctcgcgcgaggagagggcacaggaaagaaaaagaaaaaaatcacctccttcaacctctccccctcctccaccgaaatcatcctccagaatctcccgatctttactccgcccaaagatcctatacacgcgcggctatttgtagcgtctgccctgccctgcccggcctcgtggaaaggcgctccgctcttggctctccccacctgcgggcgggggctgttggttcgggggggaggcagtcaaatccgcctgcggctgaatcgggggagagggcccgcatggcggaggaggacaggcagcggcggtggcggcggcggcggttcgcgaacctgcgcagcgtccggtggcggatcgatctcggcatcctgccggcgtcgcccggggcctccgtcgacgagctccgccgcgccgccgcggattcgcggaggaggtatgttagtttgaggcgccgccttatggtagacccgcatcttccaaaggaggaggacagatcatccaaccttgttgttgacaacccgctctctcagaacccagatagcagctggggccgcttctttagaggggctgagttggagaagacagttgaccaagacctgtctcgattatatccagaagatggtagttactttcaaacgcctagttgccaggccatgctcaggagaatactgttgatgtggtgccttcagcacccagagtgtggatatcgccaaggaatgcacgaactactagctcctctagtgtatgttcttcaagttgacattgataaactatctcaagtaaggaagctccatgaggattgcttcaatgatgattttgatggagtggctttcccagatacagatatgcttttcagttataaacctagaaaggactcaaactggcattccagggctgacaatggcgatgattctgaaagcgcttccagagttaacactcttgatgagcttgacctggatacgaaggaaataatttcacttagtgatgcatatggagccgagggtgaactaggcattgtattgtctgaaaggttcatggaacatgatgcttattcaatgtttgatggtttgatggacggaggtagtggagtggtctgcatggcagagtttttctctacatccaaggttggatctagctcaagtctagcacctgtcattgaagcctcagcatctttatttcatttgctttccattgttgagccatctcttcatagccatttcattgagctggatgtagaaccgcagtatttcgctcttcgttggctgcgagtcttgtttggacgagagttctgcctcgacgatcttttagttgtatgggatgaagtttttgcttgctccaatgatatgctacttagagaaaatgaagaatgcaactttaagatattgtgctcatctagaggggcattcatcgcagccatggcggtctctatgattcttcaccttagatcatctctactagccactgaaatcaatacgttatgtcttcagaggttattgaattttccaaacaacgttgatgtgcataagttaattgagaaagctaaatctctacagtctactgctattgatgcgaatacattatccccatctcttttatcaaagaaggatagctgtgattatgatagagtttatagtaatcttgctacttcaactcctccaaggactccgttgcatccattagctgagagttactgggaagagcagtggagaaacctgcataatgacggaactgctcttaaggagagtgataataagggtctttcttataagagatcattaaagcaatctttgagtcagaggcttggtttatctaggacagagtcagatccttctccagttaaggtagtcagtgtgaataatgacgcgaggaattcagtgagacggtgtcttctaaactcttattcagataaagtagtacaatccaatgaagttattggaaaatttgagcaagataaatttcctatcgtgtcgattcacaaggagactattttgagttctgaaaggtcttcacagctaaagctaaaggcggctagtgagaatttaacagtaagtccaccaccaagtgtggcgaagttcaatccacttatagattcaccggtgaagcctgctgacgagagttcagcgaaaaggacagaagattgttccagtggtgaaaattctccagtgttttatacagctagggctggtaatgaacatgagaattgtcatgataatgattccgagaagagcagtattacttcaaattcatgcgccggtgatgattatagagacgaagtcttgccagacgagtcgtccagctgtaactgcgaggataaaaccgtctcagaagcaatagagtctggagcaaatgtaggtcaaactagacccttggagaaaaccatggtacctaatgaaagaaagccatttattaacaagctgcagtggctgttgaggtttggcagaccatcagctgaaggcaatgtggtggagaagggcagtggtcaggcatcatcggatggtaaacatgacgcggttcctccctgcccttcacctgctgatgcgagttcagataactcttgcagcggcataaatttggcttatggcgataataagaaggtgatgggcacgctgaagaatatcgggcagaacatgctcgaaaacatccaggtattatacttgaacccattttgtcgcccttgggcgtctctgtttgccaggttgctcctgctgctagcagagtccatatatcggtgatggtaccttctatgctgagagatcggtctgtaaccagtcaggcagtgaccatgtatttttatattttttagaataaggcagctcgcactttgaagtcccccccatgcattgtttactttactttcccttgtccaaaaagtcatctaagacacgagaatgacattaccatctggctgccatatgtgtacaggtgatcgaaacggcgttccagcaggaccgcgcgcagcccagcgccatggagaacttgtcgaacaacatcctgggaggcaaagggcaggtcaccgcgatggctgccctgacagagctccgcaagatcagcaacctgctgcgcgagatgtgacccatccaaggcgtgtgcaggctcctcctcccccattctcaccccccccccccccccccccccacaaatcattagctcctcagaatcagataagcaaggcctccgtagttgaagcccaggcacctagccaccccccaaaccccccttgtatatatagaccccattcgattattccattgagcctctgctcggcaggtatgctaaggctctcgttctttttctttctttcttgtaactaaggattggtcagctgctgtcaactgagttgcgggaggtgagggagtaaaaaactctcttgtctcctgcgttaggagcaactttttgatggaacaattttggacgcgaaaatgtctctcgaggttcagtaaataaatggaataagctatgtcgaaagcgcgt

SEQ ID NO: 22616 - DNA, 1225 bp, Zea Mays
aagaacagcgcaagtggagtgatgcagccgagggggccagaccagaggaagggacggcggggaggtggcaaggcgcagagagcaggttcgcttggcggacgcaccgagggaggcgtgtgggagccatgcttcttccctcttcgtcttcgtcttccgcttccgcttccaaaggtaactcctttgggaaaaccgttaacgatcatctgaggtcaactttgagttttgataacaagcaacctccatttgcgagtcaaaactttgactacggtcaaacaatagcttgcatttcatacccgtacaatcgttctagatcaggagatgtttgggcagcctatgagtcacgcaccagcactgccactgtgttccgttcccaaattgctggtgggggttcatccacaagaattcccttgcctttggaattagcagagaatgaacccatatatgtgaatcccaaacaatatcacgggatacttcgcagaagacagttacgtgccaagctagaggctcagaacaagctagtcagagcccgaaagccttaccttcatgagtctaggcatcttcatgcaatgaagagggcacgaggttccggtggacgattcctcaacactaagcagctccagcagtctcacacagccctcaccaggtccaccaccacaagtggcacaagctcctcaggctcaactcatctgcggcttggtggtggcgcagccgcagctggagatcgatctgtgctggcacccaaaacaatggcctcacaagacagtagcaagaaggccgtttcttcagccctcgccttcactgcgactccaatgctgcgcagagatgacggcttcttgcagcacccaagccatcttttcagtttttctggtcattttgggcaggcaagcgcgcaagctggcgtccataatggaagtcagcatagggttccagttatgagatgaccggtttgcgaaccatagctggtgatccaggcgtctagggtcaacttcgctgtggtgtcttagtctctcaggcaattcatccttggcttaatttctggctttttattagaaggtaccaaaatgtgttccataccgttgtggccacagagcccataaaccagggggtttgatggttggcactcctacccaaactattgttgcagtggtgtttgttagaataaaccttgactattattctgtacaatttgcctttatcttgtactgccaattattgtgtaaacaaa

SEQ ID NO: 22617 - DNA, 1624 bp, Zea Mays
ctgggttcttgactcccgtgcagtttctaggggaaatctattgaagttagacaggcagctggtctattactgaaaaacaatctgcgaacgacttacatttccatgcaatcttcatcccagcattatgttaagtctgagctgttaccatgtataggggcaaccaatagggcaattagatccacagttggaacagtgatcagtgtgcttttccaaattgtacgagttgctggatggattgagttgtttcaggcactccataagtgtttggagagtaatgacctggatcacatggaaggtgctatggatgcgatatacaagatctgtgaggatgtccctgaagagcttgatgttgatgttcctggtttgtctgaacgaccgatcaacgtgtttatgccaagaatactgcagtttttccagtcaccacatgcaagtttgagaaaactatcattgggtatcataaaccagtacatagtagtgatgccatcggcactctacatgtctatggatcagtatattcagggattattcaaccttgcaaaggactcttcagcagatgttcggaaactggtttgttcagcctgggttcagctcattgaagttcgcccatcaattttggagccacatcttaaaaatgttactgaattgattctgcaagctaataaagattcagatgatgaagttgctctggaagcttgtgagttctggtctgcatactgtgatgtgagcatgcctcctgaaggtttacaggagttcttgccgcacttaatcccgactttgttgtcgaacatggtatatgctgacggcgatgagtcccttgatgatgctgaggaagatgaatcctttccagacagggaccaggatttgaagccccgcttccatgattctcgattgcatggatcggaaactggagatgacgatgatgatgctgatgctgtaaatgtctggaacctgcggaagtgtagtgctgctgggttggatgttctctctaatgtgtttggtgacagcatccttccaactttaatgccattgattgagcaaaacttggctcgaacagatgatgattcttggaaggagagggaaactgctgttttatgtctaggcgctatagcagaggggtgcattagtggtctatacccacaccttcctcagattgttgcctttctaatcccacttcttgatgataaatttcctcttatacggagtattacgtgttggacgctctctcgatacagcaaattcattgttcagagccttgatcatccaaatggacgcggacaatttgataagattcttatgggagtgctcagaaggatattggatactaacaaaagagtgcaagaggctgcttgttcggcgtttgcaatccttgaagaggaagcttctgaagaattagtaccccatttggaagtaattttgcagcacctcatgtgtgcctatagaaaataccagagacgaaatctccggatactctatgacgccctcggtaccctggctgatgctgttggagcagaattaaatcaggcaaaatatctagacatatttatgccgcctttaatcacaaagtggcagcaactttccaattatgacaaagatctatttccactccttgaatgctttacatcta

SEQ ID NO: 22618 - DNA, 4261 bp, Zea Mays
cccaacccaaaccaaccaagccgaaagaactctcgctcgaggggtggaaaagaagcggaaggagagacgagacgagaggaaaccctcgcctccgccacacgccatggtggagactcgccggagctcggccgctgcgaagcgcccgtccccgtcgccgtcctcttcgtccgtacctcccccgaagcggcccaaggcggagtctccggggtcaccgacggcctccgcgcccgcgagagcggaggaggattccgtggcgggagcggcacccgcgaggagcgacggctcggccgacgacgcggcggcggcggttgcacagaaagatcaaggagcggataagccttcttccgccgcggccgagagttcaaagaggagaaaggagccggagcaacagcaacccgcagcgccatgggcaaagctgctctcgcagtgctcacagactcctcactatcccatcattgccgctcagttttctgttggtcaaagcaaaaactgtaatttgtggctgaaagaccagcctgttagcaaggtgctttgcaagctgcggcgccttgagcatggaggtccatgtgagttagaagttcttggaaagaagggtatggtccaattaaatggaaggtccataagttcaggcacaaaagttccccttacaggaggggatgaagtcatattcaattcatgcggcaagcatgcttatatttttcagcatcctttgagtgacaaagctcctaaaacggtgccatcatctgctgttagtcttatagaacctccggttgctagcgtaaagcgcatccgtacagataagagaacaggagacacttctgctattgctggtacagagatgttgccatctacatctaatcaggcaaaggatgtagcagcagcacctcccgcgttcgccggagagaacagccaaagagtaatgctgccaatggcatcatctgcgtctgataaatcaaaagggcacactgtgagccctgataaggaatttgagaatggggaaaatgctaatgaggttaattctaacattgaagactctccaatggatgctgctgcagcccccatatctcctgatgctgctgcgaacgatgcatgtcaacaaaatggctttttgcctgatgctcatcttggtgcggaaatcgctcttgaagatcagagggatctcatcagggatcttaacgcttcagccagtgtgcctccgagtagatgtcaagcctttaaggatgggatgaaacaaggaattattaatccaagtgatattgatgttacctttgaggattttccttattatgtcaggttctgagatttatcaggaaacattggtaaaggcacttgcgaaacattttggtgctagacttcttgtcgtggattcacttttgctacctggggcacctttgaaggatgcagagtcccagaaagatgttgggaaggggtgataaatcaggggataagggaactgctgagaagtttgcaatatatcagaagcatcgttcttcgttggcagacactgttcagttcaggaggcccagctgctccaacttccagtgtgaatgctgatattgtgggaacatccactctgcagtctgcatctctaccgaaacaagaatcctcaacagctacatccaagagctatactttcagagaaggtgatagggtgcgttacgttggtccagctcagctatcctcattgtcacaaaggggaccaagttatggttatcgaggcagagtgatgcttgcttttgaagataatggatcctcaaaaattggagtccgatttgacaagcagatccctgatggtaatgatcttggtggtttgtgcgaggaagatcatggcttcttctgctctgctgaatcacttcgcccagacttttctgctggtgaagaagttgagaggctagctatgaccgagttaatagaggtcatttcagaagagaacaaatctggacctctgattgtgttacttaaggatgtagagaaatcattcactggagttaccgagtcactttcatctttgcggagcaaatttgaatcgcttccatctggtgttcttattataggatcccacactcagatggacagccgcaaagaaaaggcgcatcctggaggttttcttttcacaaagtttgccagtagcagccagacactttttgaccttttcccggatagctttggtagcaggtggttgcatgaaagaagcaaagaaagtccaaaggcaatgaaacatctgaataagcttttcccaaacaagatttcgattcagcttccgcaggatgaagctctacttacagattggaagcagcagttggatcgtgatgttgaaacccttaaagccaaatcaaacattggtagcattcgcacgtttctgagtcgcaatggaattgaatgcaatgatattgaagaattattcatcaaagaccaatcactgagtaatgaaaatgtggacaagattgttggatacgcagtgagttatcaccttaagcacaataaaattgaaacctccaactcgaaggataataaacttgtactcacaagtgaaagccttaagcatgggctcaacatgctgcaaagcatgcaaagtgataacaagagctcgaaaaaatcactgaaggatgttgtcacagagaatgaatttgagaaaaggcttttggtggatgttataccacctaatgacattggagttacctttgatgatattggagccttggagaatgtaaaggacacattaaaggagctggtgatgctccctttacaaagacctgaattgttctgcaaagggcagctaacaaagccttgcaagggaatattgcttttcggacctcctggcactgggaaaactatgcttgccaaagcagtagcaactgaagcaggtgctaatttcatcaatatatcaatgtcgagcattacgtcgaagtggtttggtgaaggggagaagtatgtaaaggctgttttctcactagcaagtaaaatagcccccagtgttatatttatcgatgaggtcgatagtatgctaggaaggagagaaaatccaggggagcatgaagcgatgcgcaagatgaagaatgaatttatggtaaattgggatggactgcgcactaaagataaggagcgtgtgcttgttcttggtgctacaaatagaccttttgacctggacgaggctgtgattaggaggttcccccgcaggttaatggtaaacttgcctgatgcatcaaatagagagaaaattctgaaagtaattttggcaaaagaagagctgggatcggatgttgatctcgactcacttgccaatatgactgatggttattcaggaagcgacctgaagaatctgtgtgtgaccgcagcgcattaccccattcgagaaatcctagagaaggaaaagaaggagaagagtttggctaaaacagaaggtaggccagagcccgcattgtatggaagcgagcacatccgtcctcttagcatagacgacttcaaatccgcccatgagcaggtttgcgcgagcgtttcatccgactcggcaaacatgaacgagcttctccaatggaacgacctgtacggtgaaggcgggtcgaggaagaggaaagcgctgagctacttcatgtgacggcgagagacataaaaccagaaggatcacaaccgcgccataaagccagaaggtatcgcagttgcgccatattgtacagccgccatagtacttcccccctccctggccctaaatccagccagggttttcctcctccctcctgggtagccgtggccgcctgtagtccctccctcgtgtaattagaaccgtgtaccgagtcgagttcatttacccactgtttgaggttccagagagttgagatttaaattttaagtggcgccattgcccttcctttcttcctcccctcctaagtattaactttgttgcggccattgttgtcgtgactctggccatagatccttttatgtacatgcgaaatgtaaccaagggatatggaataagaacatgttcatcctgttgtagacagcatggtggtacaggaattctttttatttttcatagttgattggtgatgaactggatcggtgccagcataagaattatgataaggtaccttttctgccgctgaattttttggtgtatgtcgatttgtcgagtggatttagtattgagatgaatgatatgacatcacatggatttttatgcgtctcatgttgttaattgtcttctaattgcgaaatgcgcatgatgcagagctgaattttgtctatttactttttacaacaa

SEQ ID NO: 22619 - DNA, 130 bp, Zea Mays
ctcgcatcgatgaagaacgtagcaaaatgcgatacatgttgtgaattgcagaatcccgctaaccatcgagtttttgaacgcaagttgcgcccgaagccttctggcggagggcacgtctgcctgggcgtca

SEQ ID NO: 22620 - DNA, 437 bp, Zea Mays
aacacccaacacgatgcccttggggaagtactactgcgactactgcgacaagcagttccaggacacccccgccgcccggaagcgccacctccagggcgtgcagcaccaacgcgcccgcgccctctggtacgactccattcgccaccaagaccagcatggcggcgcttcctccctcctcctgcctgacggcaccctcgccaagggcatctgtcaccacttcgtccgcacgggggcttgcaagtatggggattcatgcagatacttccatccgaagccaaatggtgtcaatccagcattagctgcaccagggcttgggtctgggcctgcacccatggtgcagcagtctgatattattgggaaccaacccaattttgttgtataccagggagtagacataaattcttcctcagaaagaattgtgatatacgacaagctag

SEQ ID NO: 22621 - DNA, 535 bp, Zea Mays
tgattccgtagcatatgatgtgttgggtcgcatgctagaccagccgtttgcaaggccaggctacccaggggcgctacttcgtggtggcgaacgccatggtgtgcctgttctcggcggcggcgctggcggcctgccggagccgcgccgccatggtgcccgtgatggtgggcgacctgctggcgctggccctgctctactcggccgtgggagccgccgcggagttcggcatcctgggcgagcgcggcaactcgcacgtccgctggcctaaggtctgcaacgtctacggccgcttctgcgagcgcgccatggcggccgtcatcgtctccctcatcgccgcattcgccaacctcgtcctcctcatgctcaacatcctcaccatccacaagagctcttcctactactaagctagctactatagtatagagaaaagaaccatatacaatgtgagctagctactcatatatagctgttgctgtttgcaattgcatgcatggggattaactaaagatcgaccccaacttgttgaaagagtcca

SEQ ID NO: 22622 - DNA, 1279 bp, Zea Mays
atcggcatctcggcaagacgacaacacatgccacagccacacgcgacacacctgtctcggctgtggcgagcgcgatggccgcaaacgtggcgctggtgctgctatcctcctgctcgccctccacttccgccgccgccgcctcgctcctccctcgccgccgcttcctgccctcccgccgaagaagagcaagctcccgagccaccaccatcaaagggaaggccacgcagataaaagggatcaggtccattggtggtggctgcattaactccgctcagcgctatgataccgacgcgggccccttctttgtgaagaccaacagccgcattggtccagaaatgtttgaaggggaggctcttggtttgaaggcaatgtatgacacaaagtcgatccgtgttccgttgccatacaaggttggttctttacctacaggtggttcttttatcatcatggagtttattgaatttggtcgttcaaggggagaccagtcagatttgggaaggaagcttgctgaaatgcataaggctgctaaatctgataaaggatatggtttcccggttgacaatactattggaagcactccacaaattaacacttggactgatgactggattgagttttactccaagcatagattgggttaccagttggagttggcatcgagacgatatggagattcggccatactcgaaaaaggtcagcggttgatcaagaatatccgcccactttttgatggagcggttattgagccatgcttgcttcatggtgatctgtggagcggaaacataagctctgatagcaatggggatcctgtaatattggatcctgcttgctactatggacacaacgaggcagagtttgggatgtcctggtgtgctggatttggtggggacttctacaacgcctattttcaggtgatgccgaaacagccagggtttgagaagaggagggacctctatctcctctaccactacctgaatcactacaatctctttggctctggctaccgttcatcagctatgtccataatcgaagactacctatatgtgctggcgatttagtctcttctgtctattcccacatggccacatggaaacgaaaaagatcttcatttgtgtaaataaatatctcactgcccatccatttggacacggttcggtggctcaaagaagaataatgtaatagtatagtggactctgattgaatttggcccgtcctactaaactaacaccaggaggcgcccgggggggctatattgttaacaacgttagtgaaaagccca

SEQ ID NO: 22623 - DNA, 558 bp, Zea Mays
tgcgcgagtgccattgttagttaaatgctgctgtactgcatacgattcatttacttgtggacagcttttctttggctgaggacgaagacggcgaagctgaggatgacgagcttgacgcagacgcagaagacaaggagaacatcgaaagcaaggcaggatcttccctgccaaataagaggaaaaggaataacgaggatgatgccaatggatacaagtaaaacggtgagggaaagtagtattttcctgaacttcggaaacgttcctgtgcactgattattatttgtatgcttttcgagtcttttttttcccgcacttgtaatagactagagcatagttttttttaggcggttccacttctgaagtatcgtttggattctggaagttgtctgactctgaaaccatgagtaggatgtgtccccagcacgtatatacgctttgtttggtgtgctttgtttggtgtgacttcctgatgctactaatcgagatcccagtttatattatgctgatgtaaacatggaatttgtgaaacaaattcaagggtaggaaaatttcaatgaa

SEQ ID NO: 22624 - DNA, 2889 bp, Zea Mays
cggagatgttgtatacatggtgtttaatcgaaggaggcgcacgacacagtgcgccggccctgcctaccactgtctcggccccacgcgccgaccgctggacgctggtcgacccagccgctgccctggtccaagtccagcacggtagcaacaccactccagctcaaactgcagccgctggcccgcagccgcctctcttggctagttggcttcagcctctccgctgccccggtccaggtccagcacggcagcacaccagtgacatcactccagccgcagccgcagccgcagccgcagccgcagccgcttctcttggcttcggccgctcccctcctcccccaactatccccactaccaaccatccccaaaaccccacgaggaatcccgtaaattcgtcctgtttccccgcagatcgcaccatccgcgcgcatttccgtccaattcgacccggttacttggcttctttgattggggaggggagatgggggagggggtgaaggagatgctggctccgccgatccagctggccgacgaggtcgccaagcagtgtgctgccgcgcggagcttccgtgccgagtgcgcagaacttaaggcccgcgcggacaagctggcggcgctgctgcggcaggcggcgcgggcgcaggaactctacgaccgccccgccgcccgcatcttggccggcgccacccaggcactgtccagagcctccaccctcgccacgcggtgcgctcgggggcacccgcgcctgcgcagcctcttcacgctcagccccgccgccgggttcccccgggccgtggcggcgctcgacacggcgctcgaggacgtcgcttggctgctccgcatctcctcgcctggcgccaccggcgacggggacgacgactcgctcctgggcctccccaacatcgctcagaacgagcccatcctcttcttcatctgggaccatgtcgcgcgcctgcacacaggctcccctgccgcccgcgctgactccgccgccaatcttgcctcgctcgcccgcggcagccagcacttcgccaagctcattatcgaggaggatggcgtgccgccgctgctcaaacttctcaaggacggcaccgacgagggccaggaggccgcggcacgcgccctgggcctcctgggctgtgacggcgagagcgtggacaagctcgtgcaggccggggtttgctcctcctttaccgccgcactcaaggagctgcccatgcgcgtgcaggtagcagtggctgaggcgatcgcttccttggctgaccagagctccacctgccaggaccttttcgcgcagaacaatgccgttcggtaccttgtcgggcaccttgcttctgggactatccaggagcacagcaggtactccgtcagctccagcagctacaagagcagcgcagccactgctgccacgacacagcagcccatgaagtttctccactctgtggtgcttgccaagacgctcagcatgcgccacagcagtgaccgtgacaccaccagcagtggcgctgatgagctgccaaggatgtccaatggtacaccaggagaaaggaacccccaaatgcaatcggtggtacactcggctatggctgccaagacaaacacaaatggcttattggttccgttgttcaggcctcagctgggcaccagtggccgtggtgctcgagaggtcgaggatcccgaaaccaaggcacatttgaaggctatggcggcaaaagctttgtggaagcttgctcataaccatttgggtgtgtgcaagagcattacagagtcacgtgcgctactgtgctttgctgtgctccttgaaaagggtgatggcgatatgggcactaacgtgcagtacttctcagcaatggccatcatggagattgcccgtgtcgctgaacacagcctcgtgctgcgccaatcagcattcaaacccagttccccagcagccaaggctgttgttgatcagctgcttcgtgttgtccgcaggggtgaatacgatgcattgcttctcccatgcatcactgcccttggctgccttgcccgtaccttcacagcaagtgagaccaggatagtgcctcctcttgtgcagcttctcgatgagcgtgagcctccagtcattaaggaggctgttgttgcgctcacaaagtttgcatgcactgagaaccacctacatgtgaatcactgcaaggccattgttgatgatggtggtgcgcggcaccttgtccagcttgtctacctgggtgatgaggtgcaaattgaggcgctcatactactctgttacattgcattgtatgtgcctgagagcgaggaactcgcacaagctggtgtgctggctgtgctgctttgggcatcaaagcaggctcacatggttcaagacatgcgtgttgaggcactgcttccagatgccaaaggaagacttgagctgttccagtctagggcctccaggtgatgttggagatcggatcattgggcatcgatccttaagaagtgcaacttttttatgtggatggatgagtacatcgaatggttgcgcttgagtggtatgactaaacagacatggtccagttttgagcaagaacaaggtgctacgcaattgatggtgaataattgtggagcagagttatgtggtgcagataaaggagatgtgtctgtgaagttggacattctagcaattgaattgatgaagataaatggcaacctcaacaaaattatttacattttagtcatttgtgcttttatgatatttgttgttttactttttattatgaaccaaggtggtaagcactagaaatttgtaagctctatgcactatggatgaactatggatgaagtaagttgtaagcactatggatgaactatgacatcaaatagctaactaatgaagaatccaataatatttatttaggt

SEQ ID NO: 22625 - DNA, 1187 bp, Zea Mays
tattgccactttatgtttttgatggcaagcctcctgatatgaagaaacaagagcttgctaaaagatactcaaaaagagatgatgcaaccaaagatctgactgaggcagtagaggtaggagataaagatgcgattgaaaaattgagcaagaggactgtaaaggcaccttctgaagcagaagcagaatgtgcagccctttgcataaacgataaggtgttcgctgttgcttcagaagatatggactcccttacttttggggctccacggttccttcgtcatttaatggatccaagttccaagaaaatacctgtgatggaatttgatgttgccaaggttttggaggagcttgaactcaccatggaccagttcattgatttgtgcatcctgtgtggatgtgactattgtgatagcatcaaaggtatcggggggcaaacagctctgaaacttattcgtcaacatgggtccatagaaagcatcttggagaatcttaataaagacagatatcaaattcctgaggactggccttaccaagaagctcgacgcttgttcaaggagcctaatgtcacattggatattcctgagctaaaatggactgcacctgatgaggagggtctcataagtttcctggtaaaagataatggtttcaacgaagatcgggtgacaaaggccatagagaagatcaaatctgccaagaataaatcgtcgcaaggaagactcgagtcctttttcaagccaactgccaccacatcagcaccgctaaaacggaaggagacttcggataaaacaagcaaggcagctgcgaacaagaaaacaaaggctggtggaaagaagaaataatcttggatgcttgatgtacaactacgactacgaaagcagcggtggcgtgatcacttcgcttagattatttaactccctgttttaactcagagctttggtaaaagtttgctcatgtttcaagctggggtaagttagttgtgtttgaagagattggtgtaccaagtaacaaaacttatcgctgttttttacttcttgtcctttgaagtatgtatgccagtcctcgtccttttaagtatctgtgttgcaacaaaaatttaaggccttgttttgatgcataggctcactttaagatttagtttaaatttcacaccaagctactttaacacgcatggattacgaagaatatatgag

SEQ ID NO: 22626 - DNA, 687 bp, Zea Mays
agcttgtggtgttattaaaacaaatgtctactattaagttcaatgaccccatatagatggacagtaatttatagatcgctatcaagatctcgatccccaatttcttctccttctcatgcaagatatgcgacaagccctaggagcagaagcgcatcccgttctcggtctcctgtgagatccgattgaactttgagagcccttgaagcagtgagcagccccagggagaagaaaggaacttgagagtatgccgtgccatcacaatggtccgagtgattatgctgttgccactgctccctcacatttaagaggtttcctcttatttagacggagcatttaattaacattatcttgctaaagagagacttatgcgtagtctacttgtgtactcgttcgtttgtcctcatgttcttggcttcaggaactctggttttttatcattgtacccatagtaaaacctagatgtagttggggtatgccgtatgcgtctatattcggttggtcgaatgtaaatctggatgcatatatgcatctgtttggtttcatttaggcctttccttggtttcgtgattaatgacaacataagcttattgctgtgatcaaagtatattttgtagaggtaattaaagctagtcacacaataatggagattgcttagacaacgtatggtttttatgcctctaattatgg

SEQ ID NO: 22627 - DNA, 1055 bp, Zea Mays
cttgcacacaatacatcttgatctattccagggttgtacataagttattgtgctgaagaagggcactagagctaaaggaggctagtgcaatcccgtttgctgctttgactgcatggcgcgctttacatggtacggctcgtatttctgaaggacaaagagttcttgtgattggtggaggaggagcggttggattagctgctgttcaacttgcggtggctgctgggtgtgtggtttctgctacctgtggaacacaaagtattgagcgagttatgggagttggtgctgaacaagctattgactacactgctgaggatactgaagcagcaattaaaggaaagtttgatgctgttttagacaccataggagtacctgagacagaaagaattggcatcaatgttcttaggagaggtggacactatatgacccttcagggagaagcagctgccctagcagataggtatggattggctgtagggcttcctgctgctactgctgttttactaaagaaacagatgcagtatcgttattctcatggaatagagtattggtggacatacatgagagctgacgccgaaggccttcacgagatccaaaggctatctggagctgggaaactacagatacctgtggagaagacctttcccatcagccatgtaagagaagctcatgcggccaaggagaaaaagttggctcctggcaaggtggttctggaattcgattaatgttattaagattttgtccattgggacctgaagggctgtgcgtttgcaaatcatgatagttttttttgtaaaaaaataaatctgaatctctctgccgacttcaggttccattttatcgttccgtttcagtagaaatacggtaaataatcatatcagctatggcctatgggcacgattttcctgatgaaattcttctgtcacagtgtatccatacttgcatcgagatactcgatgtttcgcggtgcatcttcaccacgcccatgctgttccacagtatcaaagcgccacagtgccacgttcaccttcgcaggcaattttagtgctccgtttatt

SEQ ID NO: 22628 - DNA, 1688 bp, Zea Mays
gaaagaagagatgttattgcactgcagtgaatataggttcacaaattggatccgctagttcagcgtgctttagctgctgctttacgatccaaagatcttcgaggtttgtatgacaggattccccctcatctcgagtcaaagcttatgccatttcagcgtgaaggcatcaggtttgttttacagcatggtggcagagccctgattgcagatgaaatgggtcttggaaagacactacaggcaattgctgttgcttcttgccttcgtgatgcctggccagtccttgtaatctctccatcttctttgcgattacattgggcatctgcgattcagagttggcttaacatccctgtggaagatatcttggtggtattgccacatactggaggatcacataaagcaggattcagagtggcttactcaaactcgaaaggagattttcacttggatggggtgttcaatgtgatatcttatgatgtagttcccaagatacaaagcacacttctggatttggatttcaagattgttatagctgatgaatcacattttatgaagaatggccaagcaaagagaacagttgcttcacttcctgttttgcagaaagctcaatatgttgttttgcttagtggaactcctgctttgtctcgcccgattgagctctttactcagatccaggccttgtatcctacagtgtacaagagtgttagtgagtatggcaatatatattgcaagggtggttttttcgggttgtatcaaggtgctagcaatcatgaggagctgcataatttgatgaaagcaactgtcatgattcgtaggttgaagaaagatgtcctttcacagttgcctgttaaacgtagacaacaggtctttctagatttaagtgagaaagatgtgaaaaatgtccgcgctctgtttattgagttggagactttgaaggtcaaaattgagtcctctgactccaaagagatgatcgactctctcagatttgcttaccagaatattgtcaataagatctatactgattcagctgtagccaaaattccagctgtgttggatttcctgggtactatgattgaggaaggttgcaagttcttaatatttgctcatcaccaacccatgattgatgccattgagaaacatctcttgaagaagaaagtaaagtgtatcaaaattgacggcaagacacctttaactacaagacaaaccttagtcacagatttccaaaacaatgatgacgtcaaggcagcagtgatgctggacgggcaggagaagacgctggaggtttcccagagggactgcaggccaagcccctcgaagaagcagaagacactggtcggcttcctcaagcggcccagcgcgtccacgtccgcggaggagggtatgcccagcacttaatgaagcagcctcggatctgaggcgcggtcgtggcttgtgagcgaaccagatcaggtcataggcagccagcagccacaatggtgttcggctctatcacgttgtaacacttctccctccgtatttgctcgctctttcgtttcctgagagatgacagatgtatgcgtttggctgacgaagggaagaaaaatgagcaaaacttgaagtatttgttagggaaggatcctaaacactgaattatatgataaatttaacataattgcgtttgctaaatcagaatttggtgtaagccagccaat

SEQ ID NO: 22629 - DNA, 2214 bp, Zea Mays
ggaacatacaaaaatgttactggatcttctaaatctttatgctttccatgccctcctggtgaactccctcaccgtgctatatacataaatgtcagaggaggtgctgctgaaactccatgtccctacagatgcatgtctgacagatatcgcatgcctcactgttatacagctctggaggagttaatatatacttttgggggaccttggctatttggtctttttctttcaggcctccttatcttgttagctcttgttttaagtgttgctcgtatgaaatttgttggcactgatgagttacctgggccagcaccaactcagcaagggtcccaaattgatcattcctttcccttcctagaatcactaaatgagatatgaagatgcatttaatagatttgtcgatgagataaacacccttgcagcttatcaatggtgggaaggatctatttacagtattctttgtatacttgcgtaccccgtggcttggtcatggcagcagtggcgtaggagaaagaaattacagagacttcgtgaatttgttcgctctgaatatgatcattcatgcttacggtcttgccgttcacgtgcactctatgaaggcctcaaggtgactgcaaccccagatttaatgctagggtatttagatttcttccttgggggagatgaaaagaggcctgatcttccacctcgtcttcgtcaaaggtttccaatgtctcttatctttggaggcgatggaagttacatgactccgtttttacttaatagtgatagtgtgcttactagtcttatgagccaggctgttccctcatggatatggcaccgtcttgtagctggattgaatgcacagctgcgtttggttcgctgtggaaatctgaaagtaacgtgtcttccagtcatcaactggcttgaaactcacgcgaatccttctttagctgagaatggtatccgcgttgatcttgcctggtttcaagctacagcactagggtactgccaatttggtcttcttgtttatgctgttgaaggagatgctgcacttactgaacctgatgggagccctagaataaaaacagagcaacagacaccaacacaaaacatgcttgttgagactcaactcagtcagtccaggattaaggatgctctaatgcgcagaaggatcactggtggagttctcgatagtaatagcttaaggacgctaaacgacaggagagatttattttacccattttctcttatcttgcacaattcgaaaccagttgggcaccaggatcttgttggtctggtaatctcaatactgcttcttgcagatttcagcttagttttgcttacttttctccagctgtattcgtattctatggtcgatgttctcttggttttgttcattctacctcttgggattttgtcgccttttcctgctggtataaatgctctatttagtcatggaccgaggcgatcagcaggccttgctcgtgtatatgcattgtggaacataacttcactggtcaatgtcgttgtggctttcatatgtggttttgtacattataagtcatcaaccaaaacacacccaagcgtgcagccctggaacctgggaacggatgaaagcagttggtggctcttcccaactggactcatggtgttgaaatgcattcaagcaaggcttgttgattggcacgttgctaatttagagattcaagaccgtgcggtatatagcaacgacccaaacatcttttggcagtcatgacacctggtgtaactgaggtccttctggaaagctttttacaactcgattttttgtgagttgataaaaggaaagagtgcgggcagcaaggcctttctttattgaccagaccaaagaagcagctacagaggttatatagacgcatacttccgcatcccccgctgataatgtgcagttgcaaccggtgttctgttgtatatataaaaggtgttcttgatccattctttgtaggatttagacaccatagagtttataaacaatgtcaaaagctaacctaagagagacatcggagggatgtggatttgttgttctattgctaccgtgccctggcccttgatgtttgttgagatgggcagaggggggcaactaaaagtcagggagacgcaaaagcctcttgtatgtgatcagatgggtaaaacaagttattatattattaacatgctccagggttttcactaacagcaaggctgatagactgagaa

SEQ ID NO: 22630 - DNA, 2215 bp, Zea Mays
acacacacactcccattcgctcccatccgccaggacactcttctccccggcgcagtcaggacactcttctccccggcgcagtcaggacactcttcttctcaccgccgcgagcactgctctgggcgcgcgccgcctaccctcccctcttccctccctcacctctcgtcctcgaagcaagggtttccctgccccaggctgcctctcgtccgttctccttctctaccgccgccacaactcgcccgccgccccgccctcaccgccggcaacgtgacacgacaagcccacccctttattcctgcagctatactccgatggccctcgtgaagtccgacgctgaggaggagtggtccgactctgacttcgatgatgcctccgactccgaggtcgccgaagctctggactggctcgacgccgtggagggccctgacggctcagctcgcccccacgtcgccttctcggcctccggaggcggggctgcggcgcggaggcctaacgcacacggcggcgtgctgtctcgcccgctccagccgctgtctaaccggacccagaagctggcctcgcacattagtgctactcccttggaggagtgggaaggtaggatgaacgttgcgatgtcaaattccgtcacaactgcaatcagggatagcataagggacacagctattgggaaaataaggaacactgagaaggctgatcgtgctacagtggaacaggctattgacccaagaacacgcatggttttattcaagatgttaaaccgtggtgtctttaataacataaatggctgcatttctacagggaaagaggcaaatgtctatcatgcaacaaagacggatggccaggagcttgcaattaaagtctacaaaacctctgtccttgtttttaaggatagagaccgatatgtccaaggagattatcgttttagacatggttactgcaagcataatcctcggaaaatggttaagacctgggctgaaaaggaaatgagaaatcttctacgagtgagggcagctggaatccgatgccctgcaccattactcctaaggcttcatgtactggtgatggaattcatagggaaaggaggctgggctgctcctcgtctcaaggacgctgctttgtcagatgacaagttgcatgaaagttactttgagataattacaacaatgcggactctttaccaaacgtgcaaactggtccatggtgatttgagtgaatacaatattctatattttgagggtcacttgtatattattgatgtttcacaatccgtcgatcttgatcacccttcagctttggattttctgaaggaagattgcttgcatgtttcttaacggatttgtttaattttgttattgatcaaagcatttctgatgaagatgttgatgattacctggaaaaggctcagcaaaagattttggaaaatggtggtgcggttccaaatgatgatgaaattactcctacagtcatggtgcagacgttggactacgtgaagcaatgtgaggcagatattgtcaacatgtcaataatgcaacgttcatcctctggctatgagccaaccgcagataagctttatgaccaaccattgttagggtttgtgcggactaaaaacacaaacactgaaaaggagcaaggacaaccggcacgaaacttagttgaggttgaagaagacgagagcgaatcttgcttgagttctgatgaagatgattcgtggcacgaggatgatcctaaggtgggacccgaggaaaggaaggctgctcggaaggaaaacaagaagaaagtgaaggaagagaagagggaggcccgcaagaccaagatcccaaaagctgagaagaagaagaggaagaaaatggcgaaggcaaaatgcaagcggtagcgaatatctatgaacaatccagtagttaactccgtcagtagagatggataacttcgtcgtgaatcaaacaagatgatggataacttcattgtgaatcaaacaagatagcctttatgagggagtgcaggttggaagtttggttcacagcgctactttacacatcacaagattattcacgatgttttcaacctttttgttcgtttcaattttgtagagaactactgtacgtaatgtgaccacatatatgtttatcttgagtggaaccgtatagtattttttagagaagagtacaaatggtactttgtgccgctggattctttgacctagtgcaacttaattagg

SEQ ID NO: 22631 - DNA, 1448 bp, Zea Mays
tggcttgctgagaataatcgatgttggacagcggatcgtcttgccaaacgtggtctccctcacccagagatgaaaggtccaaaattgatgatcacaattcaaagtttgatctcggggtgccagatgatcttgatgtatcaattgaacttagaaattggctatttgcacttgaaggaactgaagaagtaggataccttttttctcctcgtggaggtgatggtatcagtagagaagaaaaatgctggcattcaaccttcaggaatctacatatctctggcaagagcagtgaccgacttaaattgggaggcagaagaaaggtgtcacccgaaaaggcatttccagtggaacgctttacggctggaattgaaggtttgcaggcaataaaacctcgtctgagagatcagtgcactaaaaaaggaccatcaaacaatcatgagatgggcagagattttaatagttcaagttctgttggtgaccatggagttgatgtcgaagctaccatggtcattggcgaagacgagattgagggtgccaaatggacaatggataatgtcaaattttctgtcaaagaaccaatcgaggcggttgcaacaaaagaagaactagagcaccttgtgatgctttgcagatctgaggctgatgcaatggggaggatcactgctggaattcttcgtctccttaaacttgacaaatctcttgggcaaggaactatagaacaactacgtaacctaggaagtggaggcatggacaatatcttttcacccaggaggctcagcaggcagaacagttttggtagcataggcactcctcggactccaactatgcaagccattgcagacgtcatgggttcgaaaaccacactggaagcaactatttcctcattacaaggcgagatttccgaatccaaggccaaatgtatggcactgatttctcaggcaagcagcactgaggatcaaaaccgtgccgaggacatcaggcagcttagcgaaaagctcgagagcatgcaatcgttggtgacacgattgagaactttgatcatttgatctgactatctgagttgtgcatggttttttttgtgtacagtacacaaggtcgttctgttcaaactcggaagtggcaaatgctgcttcctggtggctggttgagttattcttttgtgtacatttatatatcttgggaggcggtgtgtaaagattaaggggggtggaataatcggttgataggcagctggaggaaattttgtaggcagctggtactggcaaatatgctttgtagcacggcatcatatgatcaaacgggtcactaagaagagtgcagtgccatttatatcattgtatgtataaaatgtgcacagaacgtgcttttcgcgcacaaaaactttgttcctcctaagtcactgaagtgtttatatgccacttgtgtcaactatcgaagtgtttcttgccgtg

SEQ ID NO: 22632 - DNA, 1157 bp, Zea Mays
actttttagactctaaattcactcagggctctgagaaagttgcagcaacagaaccactcggtagatgctccttacttattacaccaactgaagatagaactgatggtattactgagcctgtggaccttgcaaagaataatgagaatgcaccccaagaataccaagctgcatctgaaattatccctgataaagttgcagagggtaatgatgtgtcttccacaggaattactaaggatactactggccatagtgcagatggtaaagctctcacttcagaaccgcatataggggaaacacatgtcaactcagcttcagaatccataccaaatgacgcagctcccccaacccagagcaaaatgaatgggtcgaccaagaaatcattagtcaacggtgttttggatcaaccaaatgccaactcagggctagaatcttcgggaaatgattatcctagctacactaactcgagcagtgctatgccacccgcgagtaccgagttaattgggtctgcagctgctgttatagatgttgattctgctgagaatggcccaggtacgaaaccagaacaaccggctaagggagcctcgagagcatcgaaatccaaggttgttccacgaggacagaagagggtgttgcgaagcgcaacaagaggaagagcgacgtaggggcattgctgcgctacattgttgtgtactaatatatgttgacggcccagaagggcaacatgatccctaggttaactagagctagcgccgactggtcgtttccacgtacgatgcactgcgcatcagcctgtatccatgttgtattatcgtagggcttgtaatgaccacatgccctggttagagttgatcattaggaccagtagctgcttgatttgtgtctcggtgatctagctttgggtagtttgtgcagttggaaggagacagtttgttggttgtattgtattgcagcgcacagctagcaagtgttgttgtagccatcaggtacgtgttgtgtagtgaatccaggtccagggacagagctgttcctctgtatggtggaccctgaccctttgttttgtgccatggggcctttctgtgttgtgcttacatgagctggagctgctttatttttctttttttatacgattaatacgctgctgatgagtcttttttttt

SEQ ID NO: 22633 - DNA, 2533 bp, Zea Mays
cccccgataccttctctccccgacttttccttcccttcctcgcacgacgagtgacgacgaccatcccccaaccccacgccgcggagccgcaccaaatctcaccccgcatcctttagggttagggttctgcccgcacctgtgaattccgttgcgaaatctctcatctcctgagtcgagaatcgcagtttcccgctcggctcgtttggggaaatcggttattttcgtccggccgcgtgggctctctgaagcgtttgggctgtcggctatttgccccgagttttcaggtttgaaaaatcgtcgtaatttgttcatcacgcggctgccgaactttaagtggtggtggaagtttcgtgcctcggcgtggcccccgtgctccgattcctgatcacctgcccgccccgcacgctatgagcgcagggcgcgcgggctggggctcttgctgctcgggcacgcgcgcggggtccccgtgttaatgcctcggttgtcctgcaagttcgcggaccccgacagcgccgtttcctccgctccggtggcgcgccgcgtgcggtcagacacgatgagctgcggcagcgacgtgtgccgggacggcggcagcagcagcggcagcgaggagttcaggcggccgcggcccagcaaggtcgccgctgatgattcggtggcgcccgcccggagctcggatgccgcggcgccggcgtcgtggatcgacaggaagctgcttgttgatccaaagatgctgttcgttggggacaagattggggagggagctcatggcaaggtctacaaggggaagtacggtgatcaaattgtagcgataaaggttcttaaccgtggcagcacccctgaagaaaaagcaacacttgaagcccgtttcatccgagaagtaaatatgatgtgtaaagtgaaacatgagaatcttgtcaagtttattggagcttgcaaagaaccattgatggtgatcgttagtgagctactaccagggatgtcactgaaaagttacctgcatagcatacggcctagccaattagatacacacactgcaataagctatgcactggacatagctcatgcaatggactgtttacatgccaatggcataatacatagagacctgaaacctgataatttattgcttacagcaaatcgcaagaagctaaaacttactgattttggacttgcacgtgaagaaactgtgactgaaatgatgactgctgaaactgggacttaccgatggatggccccagagcacagtcacacttcgacgtggtgagaaaaagcattacacaaataaagtggatgtgtacagctttggcattgttttgtgggaattattgaccaatagaatgccatttgaaggcatgtcgaatctacaagctgcatatgctgctgcttttcaggtaaggatggaaaaattgttgctcatacttgcacaagttagtaatgccttcttttgcggataaagctgttagcctcttactactagatgccatggctaagaaattgtttgtgcttgtatgctgaaattccacattgaaggacttgcttgtctgcctaaagtgtgaaggctaaaatgttgaacattaattgacaaagaattgtttccaaagaagcatcgttttgaatttgatcttgccatggaaggaagtattggaattgcaaattcttagccttatgtgtcacgatgatgactggtctgctgattttttttacatacatcgtttggaattgaagaaccaggtgctgacatatcttggtagtagtttccatgggaacttgtatcatagcatcattcaactggtttacactctctaacaaatctctccattttatcttgtaatacttcgaacaagggcatacctacagtgaccatttttacattgcttttcagttgcactacatagttgttctcgattgcagactactgatgtcgataatatcttctcttgtttgtatcaacagcaaaagcgcccagctctccctgaggagaccccccaggagcttgtgttcatagtacaatcatgctgggttgaggatcctgccatgcgacccagtttcagccagatcatccgaatgcttgaaactttcattatgacaatacatccacctccgctttcagagccaaacgaaggcgaggaatcggaagaaacgaggtcgtcactgagcagtaggagctcctctggctcctcgctcgtttctcgcgcgacaagcaagctctcggtcgtccgccacctcttcgtctcaaagaagacaggcaatgggaaggcgtgatgcgccatgccctgagacgcttttcttcggtgctgtaaagatgctagcctaggtgatgcgcaatacaagagggaacttgttcagtgtagagtagctgttgtattgatgttacaaaaggggaaagttgaagtgcagcttttgcaagctatgtatagctcgcagctcctttactttactgaaagtccaaacagccggctttaatccgaagcgaaccgagatatatattaaatcaaacaaccgactttaattcgaagaacagagatatata

SEQ ID NO: 22634 - DNA, 953 bp, Zea Mays
ttatccaccccgtcgcagtggttcctttccaaacggccaaaccactcccctcttccccagttccccttgtcctttgcgcaggggaaaaggagcgccgcagaccgagggacggcgacgaggtatccaatggccgaccctgacgtgatcgaagtgaccttcggcaacgacgtgattaacaccaccgtcacatcctccggccaggctgtggagcgctggatcgcggagatcctcgcgttgcaccgccccggcagcaacggctacagcatcatcgtcgggcttgacgttgagtggcgcccaagcttcggcccgcaccagaacccggtggccacactgcagctctgcgtcggacacagctgcctcatcttccagctcctctacgccgactacgtccccggcgcgctggcggagttcctcggcgaccgcgggatccgcttcgtcggcgtcggcgtggaggcggacgcggagcggctcagcgacgaccatgagccgctgggacgcgtcctgcctcagctacgagcagatcaagtacgcctgcatcgacgccttcgtctctttcgaggtcgcccgcaggctgcttggcggcgcgtactgatcgacgcgacaatttgtgctagtgtgctcagacttcagatttggttgttgctgcatttcgggctacaaggttgtaggggtttctgtgatcgaggagaattattcagacagtcatgtactgcgttcctggtttgtcgctgcttttggcgtacagagtcgcattgagcatttgagatcatgcttgtgatttggggcttttgtgtcgatcgaggctggacagccttaaaccttttgctgattactgagttgccttaaaccttgctgaccagttgtttttcattttaccatcgctactagctactgtatcagtttatctctcttcgttttcgtttccgattatttccaactcggtcggaaactag

SEQ ID NO: 22635 - DNA, 2761 bp, Zea Mays
attgaatcggcgttttcatataacgaatcgaattcaatgtgcgcatccgtaattatgctaggcgttaccgagaaggctgagaaagatgaaatcgtgaaggccgcgatggagttgaaaaatgctgggatagaagatggatacacagctgaggtctccactttcagacaggctctcctagtagatgtcagagataaacttctgttcgaacaagattatgcaggaaacataaaagagaaggttccacctaggtcctctcttcatataccttggagctggttgcctgctgctctgtgtattttgcaggaggttggagaagagaagctagttttggaaattggtcaggcggctctacgacgccctgattctaaaccttatgttcacgatgtgcttcttgcaatggcattagcagaatgctctatagcaaaagccagctttgagaagagtaaagtgtcccttggctttgaggctctggcacgcgctcaatatcttttgaggagaaaaccatctttggagaagatgcccattcttgaacagattgaagaatcacttgaagagcttgcgcctgcttgcacattggagcttctaagcttgcctcagacacttgaaaattctgaacgcaggcgaggtgctattgcagctctctgtgaactgcttagacagggccttgatgttgaatcatcttgtagagtccatgactggccttgtttcttgggtcaagcaatggacaaactattagccaatgaaattgtggatcttcttacttgggatactttggctacaactcgtaaaaataaaagatcgttggagtcccagagccagcgggttgtagttgacttcaattgcttttacatggcgatgcttgctcaccttgcatttggatttacaacccgccagactgagttgatcaagaaagctaaaaccatctgtgaatgtttagttgcatctgagagcacagacctaaaatttgaggaatctttctgctcatatcttcttggagaggaaactggaaccacagtatttgaaaagcttcagcagcttcaaagtactggaagttcaaattcaaagaactatggattggataaaaagaaagacagcagtggcaaggttactgtcaaccaatcactggaactgtggctgaaggatgtggccctttctcgttttgcagatacaaaagattgtccgccatctttgaccaacttttttggagctcctaaacgtgtccttaacacatccaagcagaaactgggatccccaagatcagtccttttgagctctcagccatcttctagtgcttcattatgcaacagaacttcaacagaacagagcccaagattgagtcccaacagccatctgggggaggctgttaagcaacttgcacctgccaacttggggctccaatcatcaatggataggcaagtaaatggttcagggacagcatctgttcccctgaagcgcaatcctggatcccatatcagaacattggaattatggggactaagtggagatgttatgggaaagcttgcatgtagcgcactccttggctttgttgtatttagcacattaaaattgaccaggtttcagtttgggcatgtgagatacacggacccaagtagagagtctgcatccatgttgtccttgaatgaagcgtctgcaaaagaaggctcttttatcaccagtcgtgtcaggaagcattttgaaaatatatcaaaatttctttggctgagtgataggcctaattcaaatagcaaaggaagtgataaacacccagcggttaatgatattactgctgcagtttgcaagcaaaagatggatattcaagaagcagaaacacttgtaaaacagtggcaagacataaaatctgaagctcttggccctgactatcaaactgacatgctacctgagattcttgatggttcaatgctctctaaggtgtgcttatgtatcaaatatctatttgcatgtgctattgctttgcctttatgtattttatgtgtaatcaattccaatttttttggagcagtgggaagacttagcgttattagcaaaggaccagtcttgctattggagatttgtgctgctaaatcttaatgttgttcgagccgagataatcttggatgaaataggtgctggtgaggcagcagaaattgatgctgtacttgaggaagcggctgagcttgttgacgattcccagcccaagaaaccgagttattacagcacatatgaagttcagtacgtattgaggaggcagaatgatggatcttggaaaatctccgaggctgctgtccgggacctgacgtgatttcggccaactcggcaaacgggctacacaaccattggcgtataggcggcatggcaatcttaacctattaggaatgtgtagtggcactattaggttacctgcagttcaatttgagttctttgcattagttagctgagctccgttgggatgctttgaggtcttgagctgctctcatggtgagcttggccctttggattcaggatttgacacaatagttgctggcagtacagatgctaaccagtgctgattccacattcttccttttccgatatgatgtgaattatgttatctagtttttgagttttacccacgtgtaattgaaatccgtgaccgccattgttcaaagaacaatgcaatttgctgaattgatgtttgcgtttcacggcacctgtctgttactactttgtgtgactgcaacctttagttcaataaagcaagagcaagcatatttttactcataat

SEQ ID NO: 22636 - DNA, 1372 bp, Zea Mays
aggcccagcacgcgtcctgagggccgcgccgtccagtcctcgccaattcccattccggttccggcttccgccgccagcggcagcaatcccctcctcctcctccctgtccctggacgccggcgccggcgtcggctcctcatcgtccgcgggagactgaagtggtgaacgcggaagaaggttgtcattttgctaagttaaagttagatcattggagcaatgccgccccataagatcgagacggggcaccaagatgtggtgcatgatgtcgccatggattactatggcaagcgcctagctacatcctcctctgataatacaataaagatcattggcctacgacggccgagtgatcatctggaaggaaggaagcaagcctgatgaatgggcactggtacacacctttgctgagcacaagtcctccgtgaattccatcgcgtgggcgcctcatgagctgggtctatgcttggcttgtggttcatcagatgggaacatttcagtcttcactgctcgttctgatggaggttgggataccacgcgtattgatcaggcgcatccggttggtgtgacctcagtttcttgggctcctgcaatggcaccgggagctctaatcagcgcggggtcttctggtcagtttgagtatgttcagaaactcgcttccggtggctgtgacaacacggtgaaggtgtggaagctcaacaacggcagttggcggatggactgtttccccgccctacagatgcacaaggactgggtgagagacgtcgcgtgggcgccaaacctgggccttccaaagtccaccatcgccagcgcctctcaggatggaacagttgttatctggacagcagcaaaagaaggcgagcagtgggaaggccggttgctgtatgatttcaggacccctgtgtggaggctgtcgtggtcactgactgggaatatactggcggtgtctgacggcaacaacaatgtgaccctgtggaaggaagctgtggacggcgaatggcagcaagtgacgactgttgagccataggtctctagagttgtccctcgtctatattgccttaatacttgtagtttttgtgtacctatggccctgtgtgggtagcaagcaggccacggtgcatgactacttgagacgtgatttcaggctcgggcagaagtgaaaaatgaacttgttgtatatgtggagcattctgtttctcgattcagtgccttttctttcccatggttaattcgttgctcactcaggtgttcatatatcagttattctgttcaggataatggttaattggatatatttggtgctctaatgcaagctttgcacttgtagcgcaaagttttttccggtgaaagttgaaactgtggccagacagaagat

SEQ ID NO: 22637 - DNA, 2676 bp, Zea Mays
gaaggagaaagatatctgatgccataagagatggcgctgaaggtttttttaggacacaatatggaactatttctaaaatggcatttattctggcctttgtcatccttggcatttatattttccgcactaccaccccacagcaggaggcatctggcttgggaagggcaacattagcctatattacagttgcctcttttctccttggagcgttatgttctggaatagctggttttgttggaatgtgggtgtccgtacgtgcaaatgtacgagtttcaagtgctgctcgtcgctctgcaagggaatcattgcagattgccgtccgtgctggtggtttctcagccattgtggttgtttgcatggctgtatttggcgtggcaatactgtactcaacattttatgtttggcttggagtagattcacctgggtcaatgaaggttaccgacttgcctcttctccttgtgggatatggttttggtgcctcttttgttgccctttttgctcagttgggtggtggaatatacacgaaagctgctgatgttggagctgatctggttggaaaagttgagcagggaataccagaagatgatcctcgtaacccagctgtcattgctgacttggttggtgacaatgttggagattgtgctgcccgaggcgctgatctttttgagagcatagcagcagaaattatcagtgcaatgatacttggaggaacaatggcacagcgctgtaaaattgaggatccgtctggctttattttgtttcctcttgttgtgcattcatttgatttggtggtgtcatcagtcggaattctctcaatcagaggaacacgtgactctgggctcatttcccctatcgaagatcccatggcaattatgcaaaaaggctactctgttactattatgcttgctgttcttacatttggagtgtctactcgttggctcctgtacacggaacaagcaccttctgcatggctaaattttgcattgtgtggcttggtggggatcatcacagcatatgcttttgtttggatttcgaagtattacacggattataaacacgagccggtccgccttttagctctttcaagttctacaggacatggaactaatattattgctggaacctctggcttggtggacgagtctggcaacccaactggtggtctttttgggacagctgtagcgacaatggggatgcttagcacagcagggtatgttctcaccatggacatgtttggtcctatagctgacaatgctggtggtattgttgagatgagccagcagcatgaaagtgtgagagaaatcacagatgttctagatgctgtgggcaacacaactaaagctactacaaaaggatttgccataggatcagcagcactggcatcattcctcctgtttagtgcatacatggacgaagtagcttcttttgctcaaatgccgttcaaggaggttgacatagcagtcccggagatttttgttggtggtttattaggctcgatgcttatattcctgtttagtgcatgggcttgttcagcagttggcaaaactgcacaggaagttgttaatgaggtcaggagacaatttatcgagaggcctggtattatggactacaaagagaagcccgattatggacgctgtgtcgcaattgtggcctctgcatccttaagagaaatgataaaacctggggctctagcaattatatcacccatggccgttggcgttgtcttccggattttgggccactccactggtcagcctcttcttggagctaaagttgtagcctccatgcttatgtttgcgacggttgctggtattcttatggcactcttcttgaacactgctggcggcgcctgggataatgcaaagaagtacattgagactggtgcccttggtggcaaaggcagtgagtcccataaggctgcggttacaggcgacacggttggagacccattcaaagacactgcaggaccatcgctgcacgttcttatcaagatgctcgccacgatcacactggtcatggctcccatattcttgtgattaaccaaccagatttatcaagcttgccattaaccctgcggagatgtatctatgcgacttgtagatgaggtgtttacctgcatgtgatgtaatgatccaatcggttttagtgtgactacatgttgtacccaaagaaagaaagaaagaaagcagcgatctgtacccaggttttaatggtccaatcggttttagtgtgactatatgttgtacccaaagaaagaaagaaatcagcgatctgtacccaggtttgacggtagatattattctgaatttctgacgggtagtgatggtgcaaatgccatattttgtgacggacgtcactgaactagtagcccaagtgttttgtatttgtttattgctgggaacattatgacatccgttgagcttagctgtaagaaaggaacgatccacgatggattttaggatcgtgactgggtctacaccttacctttgactcttcacattaacaaagaaactgatgttatgtaatggtgttaatatgaccgattgtgagcacttctaagaggattaatatttaatagcttccagcacagaaaacatgcgcagataacaaaagaaacttcatatcaatctcaacagaagctgcatccttaaccatcctgcatttgtggtgcttgtt

SEQ ID NO: 22638 - DNA, 915 bp, Zea Mays
cgaaattcgctgcggaaaggatccattgccatctaacccatccccgttcctaggtggcgtagggcgtagcatccatctatgttcgtcttcctcgatcctgaacgaaaaccagtagccaaccttccccgcgtgctccgtgctcattcattccccatcccgtctcctcccaaaccagaagacaaaaccctagcctcctcctccgtgtgatgggatgccgtccaaaccctacccccactccctgacctcctcttcctcctccgccgtcgcccccgcgacctggatgtccgcatccgcatggacggtgcccgagtcctgatcgccgccggtgccaccgccgtctgctgcttcgtctgcgccttctgggtcttccgttcctcttcgtcctcctcccccgcatccccaaagaagcaccaatccccttccaccaactgctgtggctgcgcctcctgcggctgccgcgacgccaagcccgccaacggcgagatggccgtgggtggggagaacaagaagaaggcgccggagccggatccgccggaggcgccctccatgatggagcagctcgtgcccgagatcaccacccacgcgctcagctacctcgactacaccagcctctgccgtctctccatgaccaactccgccatgcgccgcgcagccaacgacgacggcgcctggaaggcactctaccacaaggattttacggtggaacagggtactataaatcctcctaatggatggaaggcatactatgcagctacaaaagccatcattaatcttaacgcggagttctacaatatcatcagggaagggtccttgccagcaatgagtcgtttttggcttaatgcagactatgtcaagtgtattcatgcgactggggagttctgccctgggccttactggtgtgaatgcgcccaccca

SEQ ID NO: 22639 - DNA, 2068 bp, Zea Mays
cccgaattcagccaaacctctctctcccacctcctgtcaccaccaccacacccctcctcctcccctgtctttctccctctccctcttgacaaaatttcctccacccattctcttcctcctcttcttccccaccgactccaccgatccacctctttctatctgaatttcctctcgtcttgcccaccgctccatctgtctgttgcctctctctctcgcaaccaatcggttcttgtttcctccgtctgctgggttgattctctctctcttcctctccgtggagaggagaggatcgagaaacaggagacaggaaagaagagaaatcagaacggagcctgttcttttgcctggattgcggttctcgcgagttgttcagaaactctgggccagtttctggtcctttaaaatactggaacgaggaaccatcagagatgctaaggcaacagaccaattgatgttatctcgctaccctagtttggatcatcacaatgcaaggacagaggaattctgtggagcattttgctgatgtttttggattcgacattgcatctagttcaggcaaccctgtgatggatcagcagtcatattggaacaatgttcttggatcagtagaatcgcagaatcttcaaggttatcagatgaatcacagtgatgctgccatgccatatgggaatgagacacagcaagatggtacatttcttggtttctgggaatcaggcgaagcaagtgcaagtggcagctctaacaatgccaaaacagagcatcttagtattggcggtggtctgaggattggtgaaaggcgactggtagctgacaatggcatttctctggatgtggatatcaaccttaacgccaacgttaacgatctatgtggtcaaagttcaaatgttaactgtacatctcagggccctgagcactatggtggcggtgatcgtagtgttgtaaattctcagccaactgacctgagattacacccatacaggactttcctactagatgcagagcaagcagattcttttactttgaaccctagtgaaaaccctttgtgtgatttttcactgatgcaagaaagcattgaccaaagacccggtagttccctggatggacgccggctagcctgcaagagaaaaaatgttgaaggacccaatggccagagttcagcaggtgctagcactagtttttcccacaggaacgacaatgctttccataacattgcttcttcaagttacaatcctgcacctatcagaaatccgtcctcacccaattgcttgccggttccaagttctatcgatgatcaactcccacgatatggaactaatgcagggctctcagccggtacctatgaccttaatggaggggtcaacaatgctgggaattcgcagagaagtttccgggcaagaattactacgtctcaacagattgctccctgtagtgtatggccctcttcaaatgctatcagacttcctaattcatggaatcatcagccacctcattttcaaagtgcatttgatgatacccaggaggttattcctgtggtcagcagcctcaacttgcaataccagcatccagtgaatgtttctagtgtgccaccggctgcaaaccgtttcactggccatggagcttcatcatcgagagctggcagtttggagaacagaattcttggtagtcaagaggctcctacaaggaatgtggtgcctgccaactactctgatttagttcccccgtctgtagtagacccgagacgtttgctgccagaaccatctaattggagttctgatgtccgaggcactgcaatatcaggaagtattcctcctgtatcaagagctaataacagtgcaactgttaatccgccagcaggattcagtcaccaaaacctcacccggcgccatcctcgaaatttatcagaggagattggtcggctatctggagcacttcgcggccatcaacccccacgcttaaggccggggtttctgttggagcgccagggcgatggtgtttggggtgttcctttatcaacaaggggtagagaaggaagaaggttaatggagccttgcttgttcttgcttgcgtt

SEQ ID NO: 22640 - DNA, 203 bp, Zea Mays
acaacatatataataacagtgtatagagacaaatgtcacaataacatcagagtacttattacattgcggaagtcttacaaaataaaagataaatataaaacgaactaaggatcatcctttggcgccataaagtcaactgagaaacgccacctagatcagatcaaactcctcgttgtgtggctcctcctgaaccaactgttttt

SEQ ID NO: 22641 - DNA, 1196 bp, Zea Mays
ttggagcaaagtgggaccatacaacctctggtgagtgcaattcagtttgatgttacttgcctcgatccaaattgacattaactggtgatatcacaagtctcagactaatcactgcagtgaaaacaccttatttgccagatggaagattcgatcttgaagcatatgattctttgataaacatgcagatagagggtggttctgaaggcgtaattgttggtggaacaacaggagagggtcacctaatgagctgggatgaacacattatgcttattgggcataccgttaactgctttggcactagaattaaagtgataggcaacacaggaagtaattctaccagagaggctgttcacgcaacagagcagggatttgctgttggcatgcatgcagctctccacatcaacccctactatgggaaggtatcaactgaaggattgatctctcattttgaggctgttctgccgatgggtccaaccatcatttacaatgtgccatccaggagtggccaggatattcctcctcaagttatcgagacactctcaggttatccaaacatggcaggagtgaaagaatgtgtcggacatgagagggtcaagtgctacaccgacaaaggtataacagtatggagcggtaatgatgatgagtgccatgattctaggtggaaatatggcgccactggagttatttctgtagcaagcaaccttgttcctggcctcatgcgtagtctcatgtatgaaggggagaatgcgttgctaaatgagaagctgttgcctctgacgaaatggttgttctgtctgccgaatcccatcgcactcaacactgctctggctcagcttggggtggcaaggcctgttttcaggttgccgtatgttcctcttcctcttgagaagaggattgagtttgtccggatagttgaagctattggacggggaaactttgtaggacagcaagaggcacgtgttctcgacgatgatgattttgttttgatcagtaggtattagtaagcgagcttgtttactttggtgaataaaatataatagcatcatgttatgaggatttttcagtcttttgtaaagaaataaaacagctaatcctgattttgcttacagtttcctgtagatctaggtggccatttcatatgcggaactgccctatatcattagggaataaagtaagagatgtatagcatcacttat

SEQ ID NO: 22642 - DNA, 1443 bp, Zea Mays
ggctgcatttgccgttgcctctagatggcgcagagggttcaacttcactgtgaatacgctgacgctacgagaagtcatcacggaaggggtctcgaagcaaggtgcaaagactcacctgccgtctctgatgggctttgctggctgggtatccatgctgctcttcctcctggtcgccggtgctgtagcaaatgaccagatcttcaccacttcaggtgtgccatttgggcggagttcgcgtgagccaagttaccgcgtcgaattccatcctgttgattcaccattccatccagagaatggtcaagaatcggtaccaatggctagtcatgatgggaaacgttataaatgctttctaccagttgaagaaactaaaaccatgaagtcaatgcttccgcaaaatgcaactaatgttataatagaaagtgaaaggagaattaagccaaaggagccagatgagttacttgaggttctcaaggaccagtgcttctacaggcatgaaggttggtggtcgtatgaattctgttatcatgggaaaatcagacaggtccatgtagacgacgataaggttatccaagaatttgttctaggcgaattcgatgacgacgcgactgctgcataccatgaaaatatcacttctgagttagttgacgatgaccatcatgtgaaagatatatctcagaggtatcatgttcacttgtatacaaatgggactgtatgcgatctcacagatattccgcgggagacagaggttagatttgtctgctcggagcctactgtactgattagttcagtcaaggagatctcttcctgcagatatgttgtaacgattcaaagtcccatgctttgcaaaaacccgttattccaggaagaaaaacgaaccctctccatccactgcaatgagttgcctgctagagcggaatccagcgcggaggatgactcgcttccaaaagaagctcagatttccatcatccccgatcaggatgagctacatgatttcccagcctatgctacttgatttgcctccaataattatgtttgatgtagaaaaaaaaacaccattttggaggcgcaggggcaactgagcaacactatgtattaactatctcgtagatactacagcagaggctccttgtaaagcaggttgagacgatcattctgcagttcttattatataggatgattacgaaggtaacatgtttgggacagtaacatttgcttgaaatgtatatagtctacaacaagaataatgccagcattcttgaaatgtaggtgtgcgagcacttttacacgaagtaatattgctctggtgtgacgaacgatctgttgtcggttgagatgaaaaggcgttcgccttctattaagaatgtaaatggtacaaaaggatgtaaatggtacggatattatctgttcgtatttgaatttaatccggtttgagatgtatccgag

SEQ ID NO: 22643 - DNA, 4018 bp, Zea Mays
agtaaacaaacatggttgaaagctcgagcgcgtcggtgttacgaattgagctgcctccaaacaaaaggcaaagataaaaggcaaaagctggagagagagagggacgagggagggaggccattgatagagaccacgagctgttctagaagtcaccgcgctgcagcctgcagctcaggggggcctgttccctggatctcgccatcgccattgccgctgccccccacctactactcctgctcctagtcctacacccctcctactccaatccaagaggtgctttggatcgcattgcttcgtgctagagttcggtggtcagcctgcgtgtgggacagtgttcaactctttgaggatttggcaactgtattttaagcattaagcttcaacgcagaatttgaaattggcggggctgttgttcaaagaattggagatggacaggaagaattgtcctccatcgccatcgccaagatcgaccgagaagtctggaagagaattgagatctggggaggccaatgtcagcacaaataccaatagcaacctcatcgcaaaaggtgacaaggagaaaggagtcaatgtgcaagtcattctaagatgcaggccgttgagtgatgaagaaacaaagtcgaatactcctgtggttatttcgtgcaatgaccgtcgccgggaagttgccgccactcaaattattgccaataagcagattgatcgcacatttgccttcgacaaggtttttggcccatcgtccaagcagaaagatttgtttgaacaatccatctcgccgatagtaaatgaggtccttgaaggttacaattgcactattttcgcttatgggcaaactggtaccgggaagacttacacaatggagggaggtgggactagaaagaccaagaatggtgaactcccaactgatgctggtgttatcccaagggctgtaaggcaaatctttgacattctcgagtctcagtgcgcagagtatagcatgaaagtcacctttcttgagctttacaatgaagaaatcactgatctgttggcacctgaagaaccaaaattccctgttcttgaagacaagacgaaaaaacctattgcccttatggaagatggaaagggatttgtttttgtgagaggtcttgaagaagaagttgtgtactcagctggcgaaatctacaagattcttgacaagggttctgcaaagaggcgtactgcagaaacattgctgaacaagcaaagtagtaggtcacactctatattctcaatcacaattcacattaaggaactcactcatgagggtgaggagatgatcaagattggaaagctcaatcttgtcgatctagctggttcagaaaatatatcacgctcaggtgctagagatggcagagcgagagaggctggagagatcaacaagagtttgctcacgcttggtcgtgttattaatgctctagtagagcactctggacatgtaccatacagagatagtaaactgacaaggttgctgagggattcattgggagggaaaacaaagacttgcattattgctacaatatcaccttcagtatattgtttggaagagacattgagcacacttgattatgcacaccgtgcaaaaaatatcaagaacaaaccagaggtaaatcaaaggatgatgaagtctgctgtgatcaaggacttgtactatgaaattgaccgcctcaaacaagaggtgtttgctgcaagagagaagaacggtatctatattccaagagagcgctacctccaagaagaagctgagaaaaaggccatgacagagaaaattgaacgactaggagctgatatggaggctagggataagcaattggttgaattaaaagagctttatgatgctgaacaacgtctgagtgcagagttgggtgaagaacttggaaagactcggaaagatctggaggacaccaagagagctctgcatgatctagaagaacaatacaaagaagcaaagtctactattaaagaaaaggaatatgtcatatttaatcttctgaaatcagaaaaatcattagtggactgtgcatataaccttcgtgcggagctagaaaatgcagcagcagatgtttctgggctattctccaaaatagagcgcaaagacaggatagaagatgggaacaggtcgatggtgcagagatttaggtctcaactgacccatcagctggatgcattgcataaaactgtatccagttctgtcatgcaacaggaggaccaccttaatgaaatggaacatgatatgcaatcctttgtttcttcaaaagatgaggctgcacaagggctaagagagggtgtgcaaaagctcaaagtcttgcatggttccggtatcactgctctggatgaattagcaggtgaaatcgacatgaactcgcggacaacatttgagagattaaattcacagatacagtcacacacatcagcccttgagaactgtttcggaggaatcgcttcggaagcagataacttgttagatgagcttcagcgcagcctatcgaaacaagaagagaggctagcccatttcgcagtgaagcagagggagggacacctgagagctgtggaagcgtcacgttccatctcaaagatcactgctgggttcttccactcgctagatgtccatgcatctaggctcaccagtattctggaagacacacacagcgtgcaagaccaacaacttcttgaccttgaaaagaaattcgaggagtgcgcagctaatgaagaaaaacagcttctagagaaggtggcggagatgctggcaagttccaacgcacggaagaagaagctggtccaaacagcagtgggcagcctccgggagagcgccgtgaacagaacgagccacctgcagaaagaaatctcgacggcccaggacttgacctcgtccgtgcgcgagaagtggggcttttacatggaagagaccgagaagaattacgctgaggataccaaagcagtcgacagcggaaggtcttgcctggccgaagtgcttgtagaatgcaaggcgaaggccaccgtgggtgcacagcaatggaagaacgcggaggattctctgttcagcctcggcaaaggaaacgtggagtcagtggattctatagtcaggaccgggacagaggccaacgaattgctgcgttccaaactgtcgtctgcggcatcggcaactcttgaagatatcgacgttgcaaacgaggctctcctttcttcaattgacagctcgctgaagcttgaccgcgacgcgtgcgcgaacatcggggcggtcctcacgccgtgccacggggagatgagggagctgaagggggagcatcaccacaaggtcgtggagatcagcgaaagcgccgggaagtgcctggaggaagagtatctggtggacgagccgtcgtgttcgacgcccaggagaaggcggatcgacctgccgggcgtggagtcgatagaggagctgcggaccccgggctacgccgagcttctcaagtcgttccgggaggcgagggggagctggaagctggcgaatggagacgtcacagggcatttgccagaggcggctcaggatccggcatcatcgccgccgccggccgtgggttcaagaacccctctcgtaggaagaaactagatttaccgaaaccatgtagaaagaaaaaggaaaaaaaaaggaggaagaagaggaaggcatgtgtctactagagtacctttttcgtattggtgttgatagtggtgttggttaactactgctgctgcttggttgattgtttgttcgttcttaggtggtctccttgtatagtgattagtgagtcatatatacttgccgtcacacatatgccggtgtacatcaggtgtgctcagcatgtctattctaaagcactagtgtttgtctctctctaggacccatcagttatttatccaactcttagagctcatttggtgacatgagaattagaggggattttaaaatttttaaaaaatcttctctaattttgttgtcaccaaaatagtcttttgggattgtttgtactaaagctaatagtta

SEQ ID NO: 22644 - DNA, 2310 bp, Zea Mays
attaacgtcactaaaacaatcaggcttgattggttgctgcagcagctccaaggcattctagactggaggtctcaagttcgattcctcttaaatgcatctttttttgtgcaattactaggggcaacaacgtccaaatcccagacccacgcgcgctatgacttctttttgtgcacgctcggtcacgcgcaggatgacttcttttactgcaccggagggagtactcaaccaaccactttctacttttcaaatttagtccatctgtgaatcatttaggcgttttttatcactccagttgacagagaatactttgaggatgttgaccgaacatgggaaacctttgagaaaacattatggagccatatctctaactttttcaaactttcaaaagagagtcctcagacattggttcgagctttgagggttgttgaaatgcaagagatcttagatcaacaagttgcagaagaagcagctgaggctgagggtgctggtgctatggcgacaataacaaaccaacgtagaactgcaaacagaaaaggtgcaggggcaacagttaccccaagaaagggcactcaagaaaaatcgaaggttcagggaaagggctacaaggacaaatgctatgagtctatcaggatggctgttgaggcccgcttcaacaagttgcttactgagcttgtttttgtggaggacttgatggaagctttggaggaagccaaagctattggagatgagcttggcgatatatatgattatgttgcaccatgctttcctcctaggtatgaaattttccagctcatggtaaacctgtatactgagagattcattcagatgcttcgacttctcagtgatagagcaaacgatattcaaaatataaatatcctgaaggtgactggttgggtcgtgcaatatcaagaaaacttgattggtcttggtgtggatgaatcacttgcccaagtttgttctgaaagtggtgcattggatcccctcatgaacatgtatgttgagcgtatgcaggcaacaaccaagaaatggtacagcaacattttggaggctgacaaaacacaaccaccaaagagtacagaggatggaaaactatatacacctgcagcagtggatctattcagaatattgaccgagcaagttcagatagttagagacaacagcacagacgtcatgctatatcgaattgcacttgcggttattcaggtcatgcttgattttcaagcagctgagaggcaaaggcttgaggagccagcttctgatgttggtctggaatctctatgtgcattgattaacaataatctgcgttgctatgaactttcatcagagctaagtagcagtacattggaggcgcttccacaaaactatgctgaacaggttaattttgaagacacctgcaaaggatttcttgaggttgccaaggaggccgtcctccaaactgttagtgttatttttgaagacccaggtgtgcaggatctactcgtgaagctttaccagaaagactggctggagggaatggtcacagaatatcttgtcgcaacatttgctgattactttggtgatgttaaaatgtatattgaagaaagatcatttcgaagatttgtggaggcttgcatagaggaaacaattgtggtctatgttgaccatctcctttctcagaaaaactacataaaagaagaaacgatagagaggatgaggttagatgaagaggtgcttatggatttcttcagggaacacatcaacgtgacaaaagttgaaagcagagtgcggattctggcagatatgagggagctagcttcagctgagagtttggatagctttactctcatttacactaatatactggaacatcaacctgattgcccgcctgaggttgtcgagaagcttgtggcaatgcgggaaggcattccaaaaaaggaagcgaaggaggttgtacaagaatgcaaagagatatacgagaactcgcttgtggatggcaaccctcagaagtccggttttgtgtttggcaaattgaagtgcttgacagcaaagaaaggcatatggaggaagcttgggcagtaagtgtggacttgagcagagtggacagaagtaccacctaggcaaagactgtacgtttcacttctctatgatcattcttttgttcttttgtcgatgctactgttgggtttcacgtttagactatcagtgtgtactcagcttgaggagcaaaaatgtatattccactttgcttagctacagaggattttggtgtaagaatatgtaatttattcaataaaatggttgctatttgcaataagttggcccaagtcatcg

SEQ ID NO: 22645 - DNA, 2782 bp, Zea Mays
gtttttttcggcttgcctcgtcctcgtctctcacagtcacagcatccttccttgcttctcgtctcgtcgcctctcggagatcagaaagagaacaccggacacctagcctgcgcccttgccttccctccgcgcgcgcgtgctatctatggcgatggaagacgtcgcgggtgcctcctcctcctcggtggcggccgccgcctccgaccccacgcacggctggcagacggtgtcgtaccccaagcgccaccgcaagcaggcgcatcagccaccccgcgccatggctcccgatctggcgctgcaggccaacggcaaaggctccggtgtcttcgacgccgtcgagaagcgctcccaggagcgccaccgcgcgctgcagcagcagctcgcatccagggcggccgacctcgacgacgcgcggatcgccccggtcacaggcggcgcttactccgacgactccgactccgacgaggccaccgccccgcgccaggtgggggaggtgaagaagcctaagaagcctaaaaagcctaaggtgacggtcgccgaggctgccgccctgatcgacgccgagaacctcgcagcgcacctcgtcgagatctcgtcatcatacgagaatcaacaggacattcaactcatgaggtttgctgattactttggccgggcatttgtagctgtaagcgcatcccaatttgcatgggcaaagatgttcaaggaatcaacagtgtctaagatggttgacatcccactgtgccatattcctgaggctgtcatcaagactgcgagtgattggatcagtcaaagatcttatgatgccctgggagactttgttttgtggtgtatagatagcatcatgtctgaattgtcaggcccatcagcaggacctaagggttcaaagaaggttgcccaacagtctccaagggcccaggttgcaatctttgttgttcttgccatgactttaagaagaaagcctgatgtacttgtaaatgttatgccaaagataatgggaaacaataaatatcttggacaggaaaagcttcccatcattgtctggtttattgctcaggcatctcaaggtgacctagtgactggcatgttttgctgggctcattttctatttcccacgttatgtgcgaagccaagtgggaatccccttgcaagagatttggttttgcagttgcttgaaagaattttatctgtcaccaaagctcgttctatcttattgaatggtgctgttagaaagggggaacgcctagttccccctgtttcatttgacttgttcatgagagccacatttccggtttctggtgctcgggtgaaggctacagaaaggtttgaagtagcttatcgaacaatcaaggagttggctcttgccggttctcctggctctaaaactgtgaaacaagcatcacagcaacttttacctttgtgtgcaaaagcaatgcaagaaaacaatgcagagctcaccagggaggctgttgatgtgttcatttggtgcttgacacaaaatgcagagtcctacaagcagtgggaaagaatttatcctgaaaatactgaagccagtgttgctgtcctgagcaaaattgtgattgattggaaggatgtgtctcctaagctcagttctgaagctctcaaggcaacagtgaagaacttgaaggctaagaatgaggcagcgctggagtcagcaacagatgctggaaagcaggcatctatcaagaagcagacaagcactgcaagacttgagcaggggtcagagcagctgctcggaggccggcctggccctgccctgggtgtgctcgccactgtcgcagagtgctcagtggaacccgcggcacaaactacaaagggacctgactcgaatggcagctcgtcacctctcccacctgtcctccccagcgtctgcttccctcctcggccccgagccatggcgccctgcgcgtccccgtccgccctcgcgctctccgccagcacgcgggtcagcagcttcccactgacgctgcgcccgcggccgcggccggaggcgcgtgtgccgcgcgcgcccggcggcgcccagctccgcccggcgaccgcgtgctcttggccgcgccccttgctgcccgagctcgcgccggcgttccctcgtgccggcgcccgcagcgccggcagaccgcagccgctgttccggccccgcgcaatgatgacgacgtctcagatcgccagctgcgccttcaccgtgggcacggtcgccgtcctccccttctacacgctcatggtcgtcgcccccaacgccgacatcaccaaacgcacggtggagagcagcgccccctacgtcgccctaggcctcctctacgcctacctgctctacctgtcttggacccccgacacccttcgcgccatgttcgcgagcaagtactggctccccgagctgccgggcatcgtcaggatgttcgcgagcgagatgaccgtcgcctccgcatggatccacctcctagcagtcgatctcttcgcggcgaggcaggtctaccacgacggtctcaagaacaacatcgagaccaggcattcggtctcgctgtgcctgctcttctgcccggtcgggatcctggctcatgtggtaaccaaggtattggcaggggcagctggccgctcacattgatgattggaattgggtggttgtatctaggattcccgttttgtttagctggtggagtttatgagatctggatatgaataaagcttgttcaaggcactgattctttcaatgtggggtcaccttaaaggaaagaaattagttagacaaaaaaatagtttaaat

SEQ ID NO: 22646 - DNA, 7374 bp, Zea Mays
ggcttataatgaaaggcgacagtatggagatgaatggaaacatacttggtttaaagatggagagtaatggcatcagagttatagaaccatttgacatggtcgtgaaatattccaatgcgtctggaaagacaaatttgcatctactagtttctgaaatatatatgaatttttccttcagtattctcagactgtttttagcagttgaggaagaaatttcagcatttcttaggatgtcgtcaaagaaaatttcactggtgtgttaccagtttgacaaagttgcaactatgcaaggtaatgctaatgatcaagtgttatctttctggcgaccgcgtgctccatctggatatgccatttttggcgattatctcacaccaatgaacgagcctcctactaaaggagttcttgctctgaacacaaacattgttagggtcaaaaggcctttatcgtacaaactagtgtggcaatctggttctccaagaacaaacatttttcatcagaaggacttggaggataagatctctaatattgaccagctctgctctgtttggttacctgtggcacctgcgggttatgttgcaatgggttgtgttgcttcatctggaactgctgaaccacctttgtcttcagctttctgtttaactgcttctttggtttcatcatgtaatctaagggattgcattgcactgagggataacactaacatgatattctggcgagttgataatgcttttggttcctttttacctggagatcctgcaagcatgagtgtggatgggaatgcttatgatcttcgacatatgctgttcgacagtgcagactcatcttccaagactgtctctagaaggcaagatagtagaaatgatttctctcaactagagagatcagaattgacctcaggtcggctatttgatgctgtggcaagctttaaactaatttggtcaaatagtgggacctcttcaccaaaaaagctctcaatatggcgtccaatgttgtctgaaggaatgttttactttggtgacatagctgttaacgggtatgaaccaccaaattcaactgttgttcttcgtgatactggtgaagacacttttctcagagctcctgaaggttttgaccttgttggtcgaattaagaagcaccggggcactgagggtgtatcattttggtttcctaaagctccttcaggttttgtggcattaggatgtgttgcatctaaaagttctccaaccaaagaggacttcagtttgttaagatgtattagaaatgacatggtggctggaggtcaattttctgaggaaagtttatgggattcatctaatgctagaacatctgaaccttttagcttatggactgttgataatgatgctggtacgtttcttgtgagaagtggatatagaaaacctccaaagaggcttgcactgaagcttgcaggtccacctacatcaagcagttcagatagcatcattgttgatgccaaaattaaaacattttctgctgtttcctttgatgattatggcggaatgatggtgccattatttggggtgtcctttgacagtgttggactaagttatcatggaggtcctcatcatcttaatgcaactgtgagcttgtcttttgtggccagatcctataatgacaagtatagctcgtgggagccctttattgaaccaacagatgcatttcttaggtaccaattcgacatgaatacaccaggttctcctagacaactccgtattacctcaactcaagaccttaatttgaacatatctgtttccaatacaaacatgttatcgcaagcttatgctagctggaataatattagctgtggtgatgaattgtataagaaggaaaccttttcttctactgagcgaccagttcttgatgttcatcaaagaagaagttattatgttgtcccacaaaataaacttggacaagatatttatgtaagaactactgaaaatagaggttcacttgttactctgttgccctctggggatgataggtccataaaagttccggctttaagggatctatcagattctcatttaaatggaagatctgttaaaccatatcggttgatgataactgccattcttgcggatgcagaggtcaaggatgatgaaggattagaaactggtgaatatatgactgctgtgcggctcttttcagaaaaccattccatatctgttcaacaacagagtgcccgtacttgtgctgctattggagaacacttgtcacagaacaccagaaaggtgaactggaacgaaatgttctttttcaaagtcgaacgtgtggacagctatactctagagcttcttgtgcttgatgctggtaaaggtcaaccagttggtatatactctgctccattggagcaagttgtgcaaaagctccctcctacctctaatccggactctgtcaaatttgatttggctttaggagaccttatgtcaactaagacagtggaacaggaaactgttaaacctagtggaaaaataagatttgcggtacttgtttctggtagagctagtgtacaacaagggaacagagccagtcctgaaagcaagactggatatattcagattagcccttcaaaagaagggccatggacaagcatgaagttgaactatgctgtacctgcagcatgttggaggtttggtaattgtgtgattgctagtgaagcaacagtcaaggaaggcaacagatacgttagcatacgttcccttgtgtcagttactaatacaaccaatttcattgttgatttacgtctaaaaggaagaatttctcaaagtgcacgggcagatgaacagggagacagttttggtaaagaggatcaaatcctgattggaacgctggagcccaattctactattccagtcccactatcaggcctctcacatcctcttatgccctatatgttgcagttaaggccggcaaaacatcatgatcatgaaaattactcctggagtgatgtccaggagaggcgcagtcaaaccgagtttagaaaggaggagatcctagatttatgtatatcagatctgtatgaatcggaaaacttgctattctgctcacaggtagatggcacctcgaattcttgtcatggactgtggttttgcttgagcatagaaggcaaggaaataggcaaagatgtacagatggaaccaatatatgattggtgcatcattattaagtccccgttgtgtttgacatactatcttcccattgctgcacattatactgtcagttctagccacctcgataatgaagattcaagttgctcccttggcaccttaagtccgggtgaggctgtaaaggttcacaatgttgatccaagaaaccctttgtacttatccctggttccacatggaggatgggaactgatgcatgagcctgttgttatatcacatccaacccaagcaccttccaaatttatcaatctaagaagctctttatcaggaagattgcctacacttactctgcgtctcattgatatttctggaaggaaagagaagaggcgccttctttcacgttcacatctggaaaggggtgagaagcaactctatgatataaaacacgatgaattggttgagggatacactatagcgtctggattaaattttaagggattaggacttctatcatctgttggacatggtggacggtttggatctgtgaaagaattgtcgcctcttggcgatatggatggagcagttgatctttctgcctatgatgatgatggaaaatgcatgcatattcttctttgttcaaagccatcctcgtatcaagctgttccaacaaaggttatccatgtacgcccgtatataacattcacaaacagggccggacaagatttgtacttaaaacttagtattgaggatgagccaaaggtcttacatgcatatgactggagggtttcctttatgtactccaaggggactactgacaaactgcaggtccgactagtggatacagaatggtgccaacctctggagatagtaaaagaagacactattgttatagcaatgagaaagcagggtggtactcagaaatttgtaaaagctgagatacgtggttatgaggaaggttcaagattcttgattgtattccgtctgggcccagcatatggaccaatcaggattgagaaccggacgagtcataccacaatcagtacttgccagtctggtttaggggaggagagttggatccaagtgaagccacatgcaaccagaaaatattcttgggatgacccatatggacagaaagttattgatgttagcattgataaaggcgatgatacttgtgtcctatgtgttgacctggaaaatcctattggaagttccaccagttttagggaacatggcctcatgtttactgttgataccagtgacattaagatattgaagtttgctgattacataaggaaagaggaagtatatggattgcctggatctgaactgactgatcaccaaggatcgtcattgaaggaaaatgagacagagccaggtgctggacccttggagctcattgttgaacttggagttgttggaatatctttgattgatcataagccaagagagcttttatacttgcatctgcagaaggttttcgtttcatacttgactggttatgattttgggaccactagcaggtttaaattaatccttggcgagttgcaactagataatcagttgccactgtctacaatgcctgttgttttgtctaccgagagcaggcctgattcaaatcgttctgttttcaaagcaaacgttgctgttagcaatgtaacttctaatggcattcaagtttacccacatgtctatatccgggtaactgatcaaacatggagactaaacattcatgaacctattatttgggcactgtttgacttctacagcaatcttcgttttgtcaccaccatcaacagcacaactgtcacggaagtggatcctgagatacgaatagagctcattgatatttcagagataaggctaaaaatatctctggaaactgcgcctagtcaaagacctcgtggtgtcctaggcatatggagccccatcctatctgctgtgggtaatgcactcaagattcaggtgcatctgaggaaggtcatgcacagaagccggtttatgcggaagagctccatcatccctgctatcacgaaccgaatcaagagagatctgattcacaatccgctacatctaatcttttctgtggattttcttggagtaacaaaatcaactttatcatcacttagtaaaggatttgcagagctctctactgatgggcaatttcttcagctgagatcaaagcaggtttggtcaaggagaatcactggtgttggtgatgggctagttcaagggactgaagcatttgctcagggtttggctttcggggtttctggtgttttaagaaagccagttgagagtgccagacagtatggtgttataggtattgcacctggcattggccgtgcttttgtgggtttcattgtccaacctttaagtggggctctggattttttttcactgacggttgatggaatcagtgctagttttatgagatgtgttaacattttaagtaacaaatctgttccgcagaggataagagatcctcgtgctatacatcgtgatggtatagtaagagactatgacaaatttgaagctgctggccagatggccctttatctggcagaagctagcagatattttgcatgcacggatttatttcgagaaccttctaagtacgcatggtctgattactatgaagaccattttattttaccaagccagaggattgctttagtaactaataagcgggtgatgctgcttcagtgcttggatctagataaaatggacaagaaaccttctaaaatactttgggatgttccttgggaagaagtactttcattggagctagcaaaagctgggtatcagaggccttcacatgtaatcatacatctgaagaattttaggaggtcagagaactttgtaaggcttattaagtgcaacattgacaacgaacgggaacctcaggctctttcactttgctgttcaattcggaaaatgtggagatctcaccaagcagcaatgaaagttataccattgaaggttccatcaggccagcgtcatgtgtattttgtgtcagatgatgataaaaaggaatcccacagtttatctaggcctttgctaagctcgggaggaacctctactgatgttgagcaacagttcataaacaatacagttcactttcagaaaatgtggagcagtgaaccagaaattcagagccgatgcaaactagttgccaagcagattgcggatgacggaagggtgttcagcatatggaggcctctctgccctaatgggtatgtctcaattggtgatattgcgcatgttggcatccatccaccgcattttgctgctgtatacaagaatatcaatgggaactttgcactgcctcttggctatgacctggtttggagaaattgtgctgaggattacaagagccctgtatcaatatggcttccaaggccaccggggggatacgtagctcttgggtgtgttgctgtcccttcattcaaggagcccactcttgactgtgctttctgtgtggatgagagactcgcggaggatgccgcgtatgaggagcaaatcatatgggcctcatcggatgcttacccatggggatgctatatctaccaagttcagagcgcctcaatgcagttcatggcacttcgtgtcccaaaagaacaatctgagctaaggcccaagaagatattggagtcatttctgcagcaagcatcagagactcaaacgtcccgtgcatgaagaagctgcacatgatgcttgtgcgtgcaagagaactcggctgggacaaagggcaagtctcgtgcaagaaagctcgaagaatgccacttctttcggatcactccatttctccgttgtcaaagcatacacagaggacagagccttgcatgccaacactcgggttgacggaagtgttgtatactagaatagtaggttaaaggttgtaaatgtaaagttttgtaacgtttgatatagtttttgtccagctacatttgttaaggcccatgtggacgtgggccatattagttgtggctacatattctactaagaagttctcaggactaatcatactttctctaatttaaggttgttaaggcccatgtggacgtgggccatactagttgtggctatatattctactaagggcccgtttggtaaaacttcagctcctgcttctttagcttcagattctgatcctcgtgaggagctgatcctcctgattttcctagaaaatcagaatcatttttaaaaccgtttggcaagtaaactgattcttgtcttctgagggttggtggcc

SEQ ID NO: 22647 - DNA, 1946 bp, Zea Mays
caaaaatgtagcttcacgtcttcatccccatctcgcttacgctttatttagagcttatcccgatgcttagaagaacctctgttagtcataccataccatgcagtgattaggggacttcttcgttcggtacacgggagattgagaatttacaaaagcaatggctacctactagtgacttgcaatggtggcctcaatcaaatgcgagccgggatatgtgacatggtgactatagcacgccatctaaatctaacgcttgtggtccctgaactggataaaaggtctttttgggctgacccaagtgattttggagatattttcgacgtggaccacttcattaattccttgagagatgagctgatgatagttaaagagcttcctttgaaactacagttaagaactaagaagagactgtactcgatgcctcctgtcagctggtcgaatgaaacatactacctaaagcggatattacctcttgcgaggaagcacaaggtaattcatttcgataaatcagacgcccgccttgcaaacaatggccttccgattcagctgcagatgctgcgttgccgagtgaactttgaggctctgagattcacaccacagatcgaggcccttggcagaaagctcatctccactctccagagacgaagtgggcagtttgttgtgcttcacttgcgctacgaaatggacatgctctccttttcaggctgcacacatggctgctctggtaaagaaactgaggagctcactaagatgagatatgcttatccatggtggaaagagaaagagatcgattcggaagtgaagaggctccaaggactctgtcccctcacaccagaggagatcactctagtgcttaaagctctagggttcacaaaggacactctgatatacattgcttccggtgaaatctatggcggtgaaaggcgcctggccgtgctcaaggctgcgtaccctaaactagtaaggaaggagaagattttatctcccgatgaactgcggccgttccagaaccattcgacccagatggcagcgctggattacatggtctctctagcaagcgacattttcattcccagctacgacggaaatatggcaagggttgtcgaaggccaccgcaggtatatggatttccgcaagaccatcgtcttggacagaaagaagctcgtcgagctgttggaccttttccaagggggcgctctatcctgggacgaattctcggacgcagtgaaggaggcacacaggagccgcacgggccagcctgcggaaagaaaggtcgtcccagggcagcccaaggaagaggactacttctacgctaatcctctagaatgcctcggctccaacgggggactacgggacgtctcctgacgacgctttcctggaaacacgccgccgatgaacgatgacaccacctcagccctacagcacaccgtgtgtgttcgtgttcatcctcaccagtcaccgccaccgccacctttgtacagctgaccaaaggccctgcccatctaccacaagtgcatgcaggttcaccagatcagaacgcctgcgaccacatttcctcctcacagaataaagcaggaaaagaagctgggaaccctacggggttcttcagaaagaagagatgccgctcgtgcatccagtctgctcctttcctaccatctgtcgtagttgttgttgtaacccttctgtcagttttttcattctattgttcggttgctccccttcaactgctccagttttcagttcttctagccggggcgggtagctcatgcaaaagtaggagtccagctttctggaagtttcttgtactaggtccgcgatgcataacagagatttctgaatcctgacagaaccttattactttcccttgagggatcaaatttcggcgacggaataattgtttggtttccagcatctcatctatggacggctgtggttgctgaacggag

SEQ ID NO: 22648 - DNA, 2344 bp, Zea Mays
tggatagattattatagttatgaacgggatacccgtgaaaaactcggcccttccgatggccggactgcatcaacacaccggtccaacggacgaccacatgaattggaccaaagaaagaaaaaaaaaagtggccgaaaaggagaccccgtgccgtgcgtggacatggcgcctggcggaaacacatgagccgcatggcagtcagcgccccgacttttccgccttccttgcaccaccccgtcatatctcggcaacaatttctcggcgccaaccggccgatccatcctcgtcgtaagtctgcgctttcatcccttattgttccaggaacaaacaaaatctacaggtttccaagacaccaggacggagacatcgaggaggcggcggagacgccgccgcgtccttccgcttctgagccgtataacaacaaacccctcggccccgtcccctctgtccatcgatcaccttgaccacgtgcctgtgccgcaggccgcagccaggcatctccggcgaatctggtttgaggcgcggagagaggatatttgcatgcgggactgatcaatcaaagcaatggcagtagcgcccatggactgcggtgctggttcgattagtctaggccacaaggttttatgccgtttcggagtacccaacagcagtagattgcgatgggtgggatatgacaggaaacaaaggacagatcagttgattgctagagccgtatccgtggatcggacacaactagacttctcgaatccggactggaagacgcagtttcaagaggatttcgataagcgcttcagcttgccacacttgacagatgtaattgatgtggaaccgaggccaactactttttctctcaagagcagagcccctcttgagaacgcgaatggtaccatgcaaggatcatggaacggctatgtcaatgatgatgacagagcacttttgaaggttattaagtttgcctcaccaacttctgctggagctgactgcattgaccctgattgtagctgggttgaacaatgggtgcaccgtgctggtccacgcaaacaaatatattttgagcctcaatatgtgaaggctgggattgtgtcgtgtggtgggctctgcccaggtctcaatgatgtcattcggcagcatggattccgtggattttttgaggatcacttatcagaagtgccactttctaggcatgtagtccaaaatatcaatcttgctggtggtagcttcttaggagtctctcgcggtggtgcaaacatttcagacattgttgacagtattcaggctaggaggcttgatatgctatttgtgcttggtggaaatggaacacatgctggagctaatgctatacatgatgagtgccgcaagagaaaactgcaagtatcgattgtatgtgtccccaaaactattgacaatgacatattactgatggacaagacctttggatttgatactgcagtggaagctgcacaaagagctatcaactctgcatacattgaggcacattctgcatttcatggcattggactggtcaagctgatgggaagaagcagcggcttcatcacaatgcatgcctccctgtcaagtggccaagtagatatctgtctgatacctgaggtaccattcactgttgatggaccgaatggagttcttcgacatctcgaacacctgatagagaccaagggatttgctctggtttgcgttgctgaaggagcaggacaggaatactttcaaaagtcaaatgcaactgatgcatcagggaacatggttcttagtgacattggtgtgcaccttcagcagaagatcaagtcccattttaaggacataggagtccattctgatgtcaagtatattgatccaacatacatgctccgcgctgtgcgagccaatgcatccgatgccatcctgtgcaccgtgcttggtcagaatgctgttcatggtgcctttgcgggttttagcggcatcacaaccggggtgtgcaacacacacaatgtgtacttgccgataccggaagtgatcaaatccacgaggtttattgatccaaacagtcggatgtggcaccggtgcctgacctcaaccgggcaaccagacttccattgatcaattattaaggaagcttgtagtagcatccgagtgtaaaggaaggttgtgtatagtatagcgaaagggacctaattgctttgtcaggccttgtctagcagcatatggttctgcaaaacattgttttgcattgtagataggctaagtttgaaataagaggtgagataggcaggatagccttagtatggcaaaatgatcatcttgaaggattcatgagtgaatgatagctaataaaatatttacgcttgatcaa

SEQ ID NO: 22649 - DNA, 2546 bp, Zea Mays
cacccccgcgccttcgtcgtcaaggccggggttcctgcggccgcgtctccctcccctcgcccgtacccacacttgattaacgtgtcagctcgctaccggaggccctcgccaactcgactcgtactcccgttcccggcggcgatccggccggcaccggaaccctagggttccaacgaagcaggaaattaggaatgatgagtcatcaacagcaaattgcccctcctagtaggggttctgtgaatggattcccccatctaaagctggatagggtgggtagtggaaggcatgaaagtaaaatcgtgaggtcatcatctggcggttttaccaattcaggaaatgacatcaaactagggcatggaagccattcgagggaccgactaatctatgttctaacacaacttattgggcatcatgtcaacgtgcatgtgaaaaatggctctataatatctggaattttccatgcaacaaactctgacaaagacttcggagtagtcttaaaaatggctcaggtcataaaggatggttctgccagaggacaaagatttgcttctgatgttgtaaagaaacctgagactatgataataccagcaagggagcttgtacaagtttttgccaaggatgtagcacttggcggtgatgagctgccaaaaggtcctggtcatgacaaaaggaaggacttgctgattgattctgccatttcccgctctcattaccttgaagagagggaacttgagcgctgggcaccagatgaaggagattcagagtgtatcgaactggagaagtatgacagaaagggaaataggagctgggatcagttcgaaaccaatgcagccttgtttggggtaaagagtacattcaatgaagaaatttataccacaaagcttgagagaggtcctcatatgagagagcttgaaaagcatgcttcgagaatagctagagaaatagaaggagaagataccaaagatattcatcttgcagaggagagaggcttattcctgggtgatgacttggaccatgatgaagagataaaatattcagcagtgcgtagagacaccgataacagcaagtacaagccaccatttactaatgtcccaagcagtacataccaagttgatttgtttaacaggacagtcaatattgttcccaaggatttgctgggatgttcatcaacaatggatgaagaatcatcatcccacatatttgatgatattgatgcatctgccactattcaaaccaatagcgttagacagccaacatctgattaccttccagatagactctcgtccaatgatgaaaacaggttggacagaaagctgagcaaagggagtaatgaaaatatggataagagaaagttgcaacctgagaataatttatctgatggtgcaagacctcttatttctgaagggtcggatgggccaccctcaagttcatatgcatatgaaccctcatcttctggccaaggattcaaatctccagaaacacctgatttgacagtatctgtcaaacatccttctaagacggaacatgtgattaactctcaaagacctggtagttcaacatcgtcaacatcagagcgcattgctgcaaactcagctgcgagtgctcttggcttgtcaccaagctcttcaataggatcccttacctctgaaaaatcaactttgaaccctaatgctaaggaattcaagctaaatcctaatgccaagagtttcactccgtcagcatctttgaggccaccacaccctgcatcatctgatgcatcatattactatactaataacattccagcagcaccacttggacctggtttgccagtgggcatggggttcccaccggcatatggcacccagcctgtcatgtataatgctcaacctggagcatcacagcagggttacatgcatcctgttggtctacagcagtatgggcagcagatgatgatgggaggagggcagaatcgtcctgtttattattatgcgcctgagatgcaacaatacagaggaagaaacttctagatatactattttgaactgctgctaggtgaaagtcacaacaatccccacaagtgggataatgacccggcaaaagccgctattagaatggaaagaactggtgatgatctccctgactgtcgctccgattccttggacaaaaagccccatcgactttgtgttgcttggttgcctggtcaaaaagctcttcattgttctgtcactgttgctcagaagcaggttgactggattttttttatgttttttgtcagacttctgttgtaaattaaattgtgggtcatctgttcgacccagaaatgacattcataagggctagtgtggtgacagaaaattgaaggggatccatagaagagaatccacttgctattcaattttgaatagcaagtggattctcttcatggatctattttaatttctcggtcaccaaatcagtcctaaatgtttgagattgccccatattacatttatgtgttctttgacgcttgttctaatgtaaactttaaatggaattctcagctgaaatggattaaaattgctgac

SEQ ID NO: 22650 - DNA, 7496 bp, Zea Mays
cttctactgttcatgccgtcatgacagggctgattcaaagattatgcgatgaagtggatccaaaagaattaccattgatgtatacttgtttatgtgaagaaatcaactgctgtcttgaggatggctgtttggagcatttgaagtgcttgattgtttttcttgcatttgctttacaaaagaagcaaaacaatgcattcgataaggtgaagatgattaaacttgttgagttgctggttagtagatatgtgttccctggtagcaacataacaggatcttcttcaattgaggttcttggaagtattcttgactttatgctttctgttctggatgttccaaccattttgggcaatttgtccatcatatcacctttctatgccccagtgttcaaacttaaaaatccgagggtgattgtctttataaagaaacttttggtaaaaggtccccaagttgcacaacattttgaaagtcaaatattaagtgcaatggataatttcattgtaagttcacccgaggatgtcatatttatccttttaaatttctttaaaggatcaaagaagcaaatatttctttgtagcactgatggaaatcatctggattcagtggagaaaacttgcaagttctttgaatcaaaattttctttgtggatagagttattagatgatacagccggcactggtaatcgatctagtaaccagttggtttttctaaatggcataaattcaaaggatttacatgcagggaacatgaatggtcttccaatgactacctggagaggtctacttggtgcagcattgtcatcgtaccacaaactactgttggtcaacaccagcagaaattcagaatttagttttttcttatcgcttgccaagagtcacagtacatgcccacaagtactgtctgctgtagctgaatatttggattccctgcaaggagtatcatccatggaagtgacaaaagaatttgatccacaaaatctcttggagctgttctccatctttgctttcaatttgagcagtccaaccaaggatgttcggattttaacattgaggattctatcatattttgtgaagatggatcaacgtctaatcacagatgaggagcgaccacacaagaggcagagaacagaagtttctggagaggaagctgttgctaaatacgctaatgttgtggatattcttttgattattgagtcaatgccaatttcagtatctactagccgtaaaattgctatcttcatttctcggatacaaatgagtttatcttccaagatggttcatgatgattacatacctcctctcttacatggtattattggcatattgtacaatagatttagtgatctatggccacaaacactggattgccttgctgttctcattagaaaacacaaggagcttgtttggggtcagtttgttccgttcattgcaattcaccaatcaaaaggactgactgtgaaaaatcaggagaagctggaagctgcaacccaaccacagtctatttttgactgcttcaacttgtatcttgctatggactttgattgcacaccagctgtgaccgtggctaccttattgcttcaatcgctccaaaggattcctgatgttgctgaatcccgctctcgacaacttataccgctatttctcaactttatgggctatgatgatagcagcatctttagtgctgattcatatatgcctgaaaaatgtaaaggcaaacaatggaaagcgattctaaaagaatggttaaacttattgaggttaatgcacaatgcaagatcgttatatcagggcaattttctccaggaagtactaactaaaagggttcttgatgacagtgatcctgaaatacaagcaaaagcattggattgccttttgaactggaaggatgaattcttgatcccgtacagtcagaaccttaaaaatctgattgatgtaaagactcttcgtgaagagctgaccacatgggcagtttcacatgactccttgtcaattctgaaagaccatagaagtcgtgtggttcctctggttatccgcgtgttggcaccgaaagtaaggaaactgaagctactaggttctcgaaagcacacaggtgccagtcatcgaaaggcaattcttcgtttccttttgcagtttgattcaaatgaacttgagctttttttttctttacttctgaggtccttgatccctggcagcctccagcttaaaatgtttggttctcagccagacaaccttcttggaagtttctctgacattgttggaacttcaacagaaatttgtgtagagaattttacatggaaaaaggcaaatggtttcattcatctggttgaagaaatttttggtacttttgatatgccacatataagcccatttcttaatgttttattaatcattgtcgctcgcttgctggagagttgcatgaggaatcttagaaatgagagtgatgggaaatatccttgcaaccaaacaaatgaccatggtaatggttgttccataaattctgaagtgggcaattctgtgaacgtggatgaatgctttaaagaaatgcatctagaaggccatatggagacaagtgtatccatcaagcagttgaaggatttgaggtcttcatgtattagagttgtctcgtcagcccttagtcactatgaaagccatgagtttggagaaaacttctggggtgtttttttttcttctgtgaaacctctgatagactgctttacacaagaggcttccagtagtgagaaaccaagttcattatttgcttgttttatggctatgagccggagcccaaaattagcaccactgttggggtcaaataatcttgtaccagctattttttctattttgactgtgaagacagcgtcaggatccatcaccacctatgcacttgagttcattgagaatctgttgaggttggatattgatttgcagcagcaagatgaacatttagtgaagaaagttcttcttcaacatatggatgttcttatccatagtctccatgattttgttaatcatcgcaaagagctcaacaggagatctggtacatggcttgggcaacgtgaacttaggctgttcaaattattgctaaattacatcacagatccctcagctgctgataacttcatagaccttattcttccatttttcagcaagaaagatttgaactccgacgattgtttggaagcactatgtgttgtgaggggaataattcaaaatctgagatgcaaagtatctgaaaaagttctaaatgcactgaacccattacttgcaattgttggattggaactgcgactatgtatctgtgatatttatgctgggttgtcattgaatgatccttcgatgttgtttctggctgggttaataggagatctgaatgcagtttcagcttcagaacttggtgaactagattatgacacaagacttaacacctatgataaggttaggccacaattgtttcttggcttgacagaagagcatgtgggcgccatattatctcattgtgtgtatgatatgtcatctgaagaattaattttgcggcaaagtgcatctagggctctgcagtcgttcctggacttttccgcctcagttatgaataatgatgtgtccaaatactctattgatgataaatttagagagaataataccagaagcatttgcacgatgggctgtattcagaagatattggaaaaaacttatctgcacaatatgggagtagcaatgactaaagatgtatcaattcaaaaggaatggattattttacttagggagatggtctccaattttaatcatttagcatccttaagctcatttaggcctctctgtaaggtggatatagaagaggattttttccacaacataactcatttacaggctggtaaaagatcaaaagcactgttgctttttagacagggaatcaaggaaaacaacttttcagaggatatcactatgaaagtctttgttccactatttttcaatatgttttctgacgtaaaagctgggaaaggcgaacaagtcagagatatatgtttggatacactatctgctgttgctgccaaagtgcagtgggaacactatagaacaatattgaagagatgcttccgagaattaaaccttagacctgataagcagaagatcatattgaggctgatttgttccatattagatgcattccatttcatgaaacctgcaaatgatgcctcaggaaattctgatgctttgagtgaagatattgattcttcccttacattctctttggtcacagtctcttctgataagcaacagtacatgcaaaaggtagtgtttccacaggttcaaaagttgttaggatcagatccagagaaagtcaacgtcaacataaacctggtagcactgaaaatacttaagttgctaccggtggattattttgagtcccaactttcaagcatcattcatcgaatctgtaacttcctcaagaatcgtcttgaaagcatacgtgatgaagctaggtctgctttagctgcttctgttaaggaactggggattgggtatttgcagtttgtggtcaagatattaagagctatacttaaaagaggttttgagttacatgttctgggctacacacttcattatttgttgtcaaaaaacattactgctgatatgtatggtaggcttgactactgtttagaagatttgttggcagtggttgacagtgatttacttggagatgttgcagaacaaaaggaagttgaaaaacttgcctccaaaatgaaagagacaaagaagagaatgtcgtttgagactcttaagctgattgctcaaagtattacattcaagaccgatttactgaagaagataatctcacctgtttctttacatcttcagaagcaacttactccaaagttgaaaaccagacttgagatgatgctacacaacatagccttagggattgagtgcaactcatctactgaaacatcaaacttgtttatcttcgtatattgtcttattgaggatactattacaggaagcagatctgaatgcaaagagaatacacaatctagtcctgatcaagacagtactgtaagaaagaccttcctgggactaggtgagagtggatcacagaattcttatatacttaccaagtttgcacttgacttacttcgtaatcgtctgaagagcatcaagcttgacaaggaagatgaacaactcgtgaagatgttggatccttttgttgaccttctgcgaaagtgtatgagttcgaaacatgcaagtgtcctctcagccacatttagatgttttgccttgttggtgaaacttccgttgccatctctgagggacaatgcaattactataaaaaatgtacttatggagattttacagagagctggaaactccaatggtcatttagtcacatcttgttttaagctacttgctgatctacttagaggattcaggatttcactttcagataatgagcttcagatgcttgttcatacccctatgtttgtagatcttcagacaaacccttcccctgttgccttatcgcttctcaaaacaatagtcaggctaaaattggtttctcacgaaatttatgatatagttgttaagataggagagttgatggtaacaacattaactgaatctatacagcagcaatgcattcaaattatgctacaattttttctgaactatccactttctgagaagcgcttacagcaacatattgactttttcctggcaaacttaaggtatgatgaatatccatagttactttatcatgatatctcactgtatgctaacactctggaaaattgcagttatgaacatccttcaggaagagaagcagtgcttgaaatgctccatgacattcttaccagatttccccagaggattattgatgagcagggtcaaaccttttttcttcatcttgtagttgctctagccaatgaacagcatcagaatgtgtcttcaatgatccttagagctattcaaaagctgttaggacgcattggtggtcagggaaagagttacatttatgagtattcactttcgtggtacactggtgagaagaaaagtttgtggagtgcttcagctcaggttattggtttacttgttggcgatcacacattacaaatgggcaagcaccttaaaagtattctggctgttgttaagaaaataatggaatcatctattattgcttctggagctatacaattaggcttatctgatgaagctgccctgccattgtggaaagagacttactactctgttgccatgatggagaggttacttcttcgctttccggagttgtattttgagaaaaacatggaggacatatggataatattatgcaagttgttgatccatcctcattcgatgttgcgtagtatttcaagctctctggtagcatcatattttgctacagtggagaagaggaaacatgaacagaaattggatgccccatcatggttgcttgttcaaccgagcaggctattcataatagctgtttccttgttgaaacaattgaggagtgagctgagtgatactacggcaaataatctgattgtacagaatgttgcatactcagtctgcaacttgcatatgttgattaggcaatcgacctccacacatcagttttggtctagcattagttctgatcgtggtgctttccttgagggttttgaattgcttggttcaagaaaagcaaaaaatatatttctcctttgtacttcaacatctagtgatgtatctggatctagcctcgacaccaacgaagagcctacatctttgttagtttcgtcaatcctaaagaagatgggaagaattgcaatgcaaatgcaggatacacagataaagaacgtgttcaattgcttcaatatgatttcatcagctcttggtcctgatgaatcactaacctatgctgatcacctcttggccccattgtataaagtttctgaaggatttgctgggaaagttgttagtgatgaagtgaagcaactggcccagggggtccagaacaagttacgtgacctgattggttccgagaaatttgttgaagtctacaagagcgttcggatgggcctgaaacagaagcgggacggtagaaagcaggcacagaagattgttgcagccgtggacccagaacgcaatgccaagcgaaagcagcgaatggcagccaagcaccgggaacacaagaggcgaaagataatggcgatgaagattggcaggtggatgagatagcttggtatttaggctctgcggaattcggtgaatcatataattgtagaggataatttttcgtgctacaagtgctggcataaaattatgtttctgttttatatgctgtctcactgacttactgcccgacgtaattttattgttgagttaccgaaccataccgtaagtaaaaattaagaggcataagcaatgaagacatagaattgattgaattatatttttttggggtggatggataagtaacaatatattattaaatgtgcaattaagagttttctggctgaggtttgc

SEQ ID NO: 22651 - DNA, 2994 bp, Zea Mays
atttttatgcactgggctcacctgtcggccctccgctgcagctccagcccccagacccagaggccagatccccttccgtctcaactattccttcgcacgccgccggcacccgcagggccccacctgccagtgaaaacttctcccccgcagttccatctctccgtcgccgtcgtcgtcgcgtcctccgcgtctccggcgagtctagagagagagagagagagagagagaggaaggagggtggagggccgcgcccatggacgcggagcttctggagctgcagcggcagctagaggcggcgcagagcgcgaggtccagcgtgcgcctgtcggagcggaacgtggtggagttggtgcggaagctgcaggagcgaggcatcatcgacttcgacctcctccacaccgtctccggcaaggagtacatcacatccgaccatttgaagcatgagattaagatggagatcaagaagagaggccgtgcatctctagttgacttatcagataccctgggggtggacctttaccatgttgagaggcagtcacagaaggtcgtctccgatgatcccactctaatgctgataaatggcgagatcatgtcacaatcttactgggacaccgtgacggaagagataaatgagaagcttcaggagcgcagtcagattgccttggcagagattgctgctcagttacatattggatccgagcttgtcatcagtatcctcgagccgcggcttggaactattgtgaaaggaaggctagaaggcggacagctatacactccagcgtatgtctcacggattactgctatggttcgtggtgctgcaaggggtataacagtgccaacaaacctgccatctgtttggaactccttgcaacaacagcttcatgagatgcatggtgctagtggagtttctgtggaaggttcattcttccaatccattttcaatggtttgctaaaagaaggtgctgtactgggatcagtccgtgcaggaggacagtggacaccagctgttttcgcccatgcccaaaaggagagtgttgatgcttttttctcacaaactcttacattgggtacgacgtgcttcagaaacttgcaattcctcaacctaaacagttcttggaggcccgatatccagatggtattgcattggatgctgtctttgttcatacttctgtggttgatatgctcgatactgcggttggtgatgcaattgagaatggacactggattgattctctttcagttcttccatcatatattagtggaccagatgcaaccaaaattttatctatctgtccatctctgcagaaggctatcaagtcttctaaagcagtggtatttggagagtcatgtgtcttcagtaacatgtttattaagggtatttttgaccgacttgagaaagatatggactcgtttggtattagacttagtgttggtcaaggaagacctgtgaatacgaatctgggtagtgagcacaagacagggtctggtcagcactcggacacaaaagatcttggtggtaatggcactagcagtaccggtgcttcatcagacagagggtcaaagaagaaaagggggaaagggacagggtctaccaaaggtggatcacttgaaaaggatgatgacaatgaagaaagcattcctgttaagggcaagaaatctcacaggaaaaacaaggatgctggtgcatctggtgacataaaacatggtggtaaaaaaacgtcagagaaaatgatagaggagaatgcaaatatctttcctgatgaattgatagaagaaaaggttttggctgttgctccagagttagaagagttgggaggctctgatgactcaaatgccccccttaaattgttgtcttctcacctgaggccaatgcttgttgactcatgggcaaagaaacggaacaccatgctgtcaggaaatgctgaaagaaggcgacgcttgctcgataatctgcagaagcagatagatgaggctgtcctggagatacaactctatgaaaaagctttggatgtatttgaggaagatcctactacttctggtatactacacaagcatcttctaagaagtatgggcactccaatagttgacaaagttttgattacattggataaggacaacaaattgaagaatggaatggaggttgaggatagcgaagatcatgtccaattgagcactgctgaccgaagctctctggccaaggatcttcctagtgcattgtcattgaaggctcaagctttaattgaagcattagagggaaagtggcttgacatttaagaagcttgataaaaggttagagaggacaatgctgcattcctatcgcaaggatttgacagcacaagtttcatcagagaatgatcctgttgcctttcttccaaaagtcgttgctttacttttcctgcaggcatataataaggctattcaggcaccaggaagagctgttggtgctgttatcacactgctgaaggataagctgccagctgcaacctacaaggtattgactgattatcacagcactactgtgaaacttttagcactacaagctgctgctactgacgatgaagaagattgcacatcagaccgaatgcgagaaaggaaggaggatctggaagaaaggctgatgccagaactgaaatccctggtcctcggcacaaacaaagagtgatcaacaacattcttgtgcataccggaccatttcggcgtacatatacaaagcaacactcagcttaaaagtttttttttgctctgtttttgcaatttgcaccgtttgaaagcaaaagatagcaggaaacaggtttactgattgtaagaatctgactagtttatactcccgtttacattcctgcactaggtttctactgataacaacaaaattatactatggtgtaatgaagagcatagtggatgttaacagggaatcagggatgaaagtagatatctgaattgttaggataatatatatatatatactctattcattacctagggtgatgatcc

SEQ ID NO: 22652 - DNA, 1878 bp, Zea Mays
cgctgccgtcgtcgcgccggcctcgatacgttcccgggaagtcggaggcgccgcgctcgtcacgccgccggctccgacgagatggaggatggcgtatctacttatactgtggatgaggcacttgtgtccatggggtttgggaaattccatgcattcgtgcttgcatactctgggatggctaaaatctctgaagcaatggagatgatgcttttgtcatttgttgggcaatcagttcaagctgagtgggggctttctgcacatgaagaaagcctcataacaagtgttgtctttgtggggatgcttgtaggagcatatgcttggggcatagtttcagataactatggaagaaggcagggtcttcctcactttttccattggctattggaatttgattatgaatgttctaacccttcaatctttttcgaaactttatggagtgttgcacactgttccatggttgggttcaacttcacagctattgttactggaggagctggccttcttagcgcttttgctccaaattacttatctttgattgtactgagatttatggtcggtgttggactgggtggtgggccagttttaggttcttggttcctagagttcatccctgctcctaaccgaggaacatggatggttatgttctcagcattttggactgttggcacaataatggaagcttctcttgcttgggccgttatgccagcttttggctggaggtggctgctggcactctcatcattgccatcgtttgccctgctactcttctacccagtgacacttgagtcaccaagatacctatgcatgaagggtagaatagctgaagcagttcatgttctggaaacaatgtcacgcgtgaactgtgtttctctcccctctggccgacttgtctctggccatcgggtggaacttcatgatatcggggattcttcagaaacggcacagttggtgacatctaataagaataacactgctgatcgtggtagcaaatccgagattggaggcctcagtgccatcttaaagcttctatctccaaacttaatcagatcgactcttctactctggactgtctttcttggtcatgcctttctgtactatggtcttgttctactcacatcagaactaaatcatggaaataggatctgtggatcagaagagggggcagaagtgacaacaacagcccacatacatgatgagaatctctacagaaatgtatttataacaagctttggagaggtccctggtcttctcctgtcggctgccattgttgacatgatcgggcgcaagctctcgatgtcttccatgctttacatcagttgcctgtgcatatctccgcttatgttcgcccagacggaatcgctgacgaccatctttttgttctgtgcccgggtttgcatctctgcaagcttcactgttctgcacatctacgcccctgagatatacccaactgctgttagggccacgggtgtcgggtttgcaagctcgattgctcgctttggtggaatcctgtgccctctcgtggccgtcggcctggtgcacgcgtgccaccagatggcagctatcctgatattcatcacggtgatgctggcttcaggcatcgccgtgtcatacttccccctggaaacaagcggccgaaagctgagcgaccacgtcgccgccgcgtaagagctgattaattgaagaactgactttttgagagggatacaccaatacagaatcaaggcccaaggggccattattttttttgttcagttgttgacaaaggatacagtgggaaagaaagtgcaaaggaggcactagattgttacgttattatactgttgcttctcaatagaaatctacagatcactatatgatttttagccaaaaaaaaaaaaa

SEQ ID NO: 22653 - DNA, 1344 bp, Zea Mays
caccgccccaccccaaaccacacacaagccgctcgcccgcaccgccgcacccgcacgccagaaacagctctcgcgttgcttccgcacgccgcccatggcgagcctgtcgtcgccgagtctcctctcttccttcctcggcgaccgcctcgcactctccactaggcctctccttctccgctccgctgtcccaggcagcaggcggctggcgtatcaagcaacgagaacgctatgcaacttggtggatatcctatttaacaggagaaatcaggatgatgcaccagaaaacaaccctagacgcctgcgtcctgggaaagtatctccacgccttagtgttcccaatcatatacaacggcctccatatgtcaattctcgtcaacaacgacctggtatgaataatggacctgaaatacatgatgagaacgggatcgagtgcatgagagcttctggaaagcttgctgcacaggttttgaaatttgctgggactcttgtaaagccaggcataacgactgatgaaattgataaagcagtgcaccaaatgataattgataatggagcatatccttcacctcttggttattgtggatacccaaagagtgtctgcacttcagtgaatgaatgcatctgtcatgggattccggattctcgtccccttgaggatggagatatcatcaatattgatgttactgtctacctcaatggctaccatggtgatacatctgctacatttctttgcggtgatgttgatgacgaagctaagaaattagttaaggtgacaagagaatgtctcgacaaggctatatcgatttgttcacctggggtggagatcaaacaaattggtagaactatacaggatcatgcagacaagttcaagtttggtgtagttagacagtttgttggccatggggttggcaaagtttttcatgctgagcctgttgtgcttcatttcagaaacaatgaatggggacgtatgatgttgaatcaaacatttactatagagcccatgctaaccatagggagcatcaaccctgtcatgtggtccgatgactggaccgcagtgacagaagacggcagcttgtcagcacagtttgagcacacgatacttattaccgaagatggccctgaaatactgacacagtgttaatggaaggccaaataacaaagaacaatcgttagtcagctggcaagatcctgcatttctttttggggactaattggtccaacctaaactctgatgcaaaatggcaaactcacattgtaatctcggttcatcggtacaacgatatatgtatagaaattgtactattttcgaagttatatttgagagtgtgttttgttggtaaagaa

SEQ ID NO: 22654 - DNA, 6218 bp, Zea Mays
cagtctgtacccgcttgagctcgggccaagagcgccgatacacgatacggcagccgagcacactcttccccttcctgacctccacttcctagctcggccccggctccgcatctatctatctctcgccctgccgtctccggagaccggagctgctctcacatccccacgcgcgcgccctcgaccccgaccacgtcccccgcccgctcggcgctcgcacagtccttccagattccctcgtccggggagcggcgctgaggtctcgcaccgatgagctcgggggccatcggggcctcggatcctgggggtggcgagacgaagccggtggcgggcggtgacgtcacgacgtcggaagctgcgggcgaggtgcctgctttcgccgccgatgtgaaagtggaggggaaagctacgttggcgacggatgtggatcgtgaagggggagatacggcggtgagcgacccgctctacgcgaacgagtcagctggtatggttggtgccgaaggccacggagatgagcccgcggagggcctggaggcggtgaatggtgaggaggagatgctagaagcaggagctcgtgatctgctcactgagacggagaagaatccggttcttgtggtacatgtgcctgctgctgctgctggtggtggttctgccattcctgaacatgctgaagccgaatctaacaaagttgaagatcatgtaaacgtggagcctgggacaaagaataatgaaagtgataatggcatagctcattttgataaggaaatacagaacaatgtgcctgatgacatagaggaaagctccaaggaacatgaaggtgatggagcacctgtagttgaccagacaaataatgcatctgaaatgctcccacaaaccggagagcagtttcctgatgttgaaaatagcacggacagcaacctagaggctgctagtctgggtagtgtggatcagggtgctagatactgcctgcctcctcatgataaaggcgggtttcaagttgctgatcttgtctggggtaaagtgaaaagtcatccttggtggcctggtgaaatttttgatccatcagatgcatctgaattggctctgaaacatcagaaaaagggcagccacttggtagcttattttggtgacaacacttttgcgtggtgcgatgaatcccagttgaagccttttgtgacaaattattcacaaatggagaaacagagcagttcagatgcctttgttgggtcagttaataatgcacttgaagaactgtcaaggcggatactgtcaggtatgagctgctcttgtttgccagaagagcttgctgataatggcatgtcctatacagttgataatgctgggctcaaggatggagttacttgctctgcagttaatcggcctgaaatcttaaactgtttcagtccagaaaaccttcttcattatattaaggagttagctctatttcctggccaaggaggtgatctgttggagttagttatagcatgttctcaacttacttctttctatcgatctaagggatgtcctgaacttgcatcatttcaaactggcgatgcgtgggttgaggatggtctggattgtacagacactttgtccacccagaatgtaatggttgaggaacctgtgattaatgaagtgcatcctactcaagataagcccaaaaggggcagggggagacctcggaaacaaaaacctggtggtgaccaggtggtgatggagaaaaggagcatatctaatcaggtcaatgatactagctacaatgagaaacaagtgggtatggactttgataactatggcaacctacagaacaagaacaaaagaaactttgaatcatttgaagattcagagaagtcatcagctccaactggtggtagttctttcaagattggtgagtgtattcggcgagctgcaagccagctgacaggatctccgtccattatgaaggctcagaatgctgctgaaggagagaatggggaatttgatatctttagtgatgatgctggtgatgaacttactgtagagaaacgagcaaaaaggagaagtctgcacaggaatcacactgcagatcccaaggaattactatcacagctatgcttggttgcaacagagccaatgaatggatataatttctcagtaatgataatcagttacttcagtgattacagaaactatattgtttctactactactgaagcaaacatcgttgataaaggtacatctaggagagggaggaagagaaaagaagttttaccttctcctgatgtagagacaacagatcatatgcaggactcgtattggtccggattgagcttgcataatcacccaatccatgacctcagaaaagagagtcccactacaaggccaagacgtaggcggagatcctcaagtcatgcatatgtacctttgtcagaacttggggagccagtacctaaaaaacagatacaagtgatggaaagatctatcatccatgttgacgagaagatgattgatgagttgaagcccactgcacttgttttgagctttgccaggtcagcttctattccttcagaattggatcttgttaagatgttcagtcgctttggtccactgaaagaaagggaggcagaagtacacagggaaacaaatactgttaaagttgtcttcaagaaacgtgccgatgctgaaagggcttttagcgctgctggcaagtatggcacttttggaccttcgcttcgaagttaccgtcttgtcagtatgccattttctctagagacacagtcagcaaacaatcctgtgaaacatcctgaaaatcatggcatggagattccaggttcaaatcagtccgaagctcctaaggattccatggaagttgacctggtacagaaaacagatgaagtagaagttgcaggagaaccgtcgtctgaagaagttgagactgtgaggcaaatatctcaagtgcaagctgcagacagtacatttgtcagtcaagacaggtttgatgaagctggaaatattgacgctgagctaattgaccatgttaatcaaattgggaaagctgcacaagctgcatctgtatctgaagagtcacgagatgttgagcaagtttacactcaaaaggaagtgtcagccaatgatctacccacagagacagaaatcttaaattctgatgctataacaaaagagttgcctcagaatgctccagataatgtggaaactgatatagtcgaagatccaaaacagagtcacaattcaagagataatgccgtatttgaagcagtcattgaagcaccgagtactgcacaagatcatacagaggaggatactgggaatgcagttccagaagagcccatggtatctcctgagttacaaagtcaaacccctggtgatctacccacagagacagaaaccttacattctgatgctatattaaaaaagttgcctcagaatgctccagataatatgcaaactgatatagccgaggatccaaaacagagtcacaattcaggagataatgccgtatttgaagcagtcactgaagcaccgagtactgcacaagatcatactgaggatgatactgggaatgaagttccagaagagcacatggtatctcttgagttacaaagtcaaacccctggtgatctacccacagagacagaaaccttacattctgatgctatagtaaaagagttgcctcataatgctccagataatatgcaaactgatatagccgaagatccaaaacagagtcacaatccaggaggtaatgccgtatttgatgcagtcactgaagcaagaagtactacacaagatcatactgaggatgatactgggaatgaagttccagaagaggacatggtatctcttgagttacaaagtcaaacccctggtgatctacccacagagacagaaaccttatattctgatgctatagtaaaagagttgcctcataatgctccagataatctgcaaactgatatagccagagatccaaaacagagtcacaatctaggagataatgctgtatttgaagcagtcactgaagcaccaagtactgcacaagatcatactgaggatgatactgggaatgaagttccagaagagcacatggtatctcctgagttacaaagtcaaacccctggtgatctacccacagagacagaaaccttacattctgatgctatgataaaagagttgcctcagaatgctccaaatagtatgcaaactgacatagctgaagatccaaaacagagtcacaatccaggagataatgccgtatttgaagcagtcactgaagcaccaagtactgcacaagatcatactgaggatgatactggtaataaagttccagaagagcacatggtatctcttgagttacaaagtcaaacccctggtgatccacccacagagacagaaaccttacattctgatgctatagtaaaagagttgcctcataatgctccagataatatgcaaactgatatagcggaagatccaaaacagagtcacaatccaggagatgctgtatttgaagcagtcactgaagcaccaagtactgcacaagatcatactgaggatgatactgggaatgaagttccagaagagcacatggtatctcctgagttacaaagtcaaacccctggtgatctacccacagagacagaaaccttacattctgatgctataatgaaagagttgcctcagattgctccagataatatgcaagttgatatagctgaacatccaaatcagagtcacaattcaggagataatgccgtatttgaagcagtcgctgaagcaccaagtactgcacacgatcatactgaggatgatactgggaatgaagttccagaagaggacatggtatcttctgagttacaaggtcaaacccctggtgagaaactagtggggcaatctgcaactgaacagatggtgggatctgaagatccaaagccgcaagccgaaaattttgttgctgaacctgttgtgctgggtgcagtcgggcaagtagaaattgaactggaatccaaaactactgttgaagtgtcaggcgaacaaggctatagtattgagcagactgttcaagtggaagctctaattgaagcgtcaggtggacaacttgaggtgggaaggcaaattccagaagatgaatctattgcttgtgcaactactgagcactctatggttgtcgatgaaactgtggaggcaaaagtggtactactcgatgagagtatagagaataatgctgctgtcataggagtagtcgaggagactgctgaaggtgaaactaaggaggaagcatcagacgagaagggaaaaatagaaaataatgaagatgctgacaaattagcaccagccgggaaggggaaaatagaaaataatgaaattataattgacgcaccagatgagaaaacagaaaataaagcagatgctgacacaccagctggggagaccaaagaaggtgaaattacagtagaggaaacagatgagaaaatagaatctaaagttactgctgaacctgtaatcggggagacaactgaaggtcaaactgcagctggagaaccagttgaagaagctagaacagctgaggacatggtagaagatgttaaggtgctagatgataaatctacagcagctgagaaacctgtagagaatgccacagttgtggcacatgagaattcgactacagttgagaatactctgaaggatgcgattgtcgcgccaccagatgcaaataccaccaacgccgaaaaaactgctattggtgccacaattgaaacacaaaatgaggacgctccagcggagaggactatagaggatacctcggttgaggcaccagatgtacaagcaggtgcaagtgagtaaaccagcttagcgatcctttgcattcctgtcagtttctgttgatatcgacgtagtttgctcaactgattctcttgtctagatgatgtgttctgtatagaaaacctggaaccactttagcatcataaggctgttaggttttaaataacttgggcatctatattttgccccttatttttcctatataaacttcatctagttgtattcgatgcgcacgtgtgagtttgtcataaacacaattttctcctatatgtcagttcagtgctcaggcgatcagtgactgagtggaagtctttgggctatctacttggatcaaatgattctggtaccatttgtcgtctgtaaccaactgtgttctcgaatccttctaccatattacctag

SEQ ID NO: 22655 - DNA, 1301 bp, Zea Mays
ccaacgccttacatagacaaacttatccataagactgggaaacaactcagccctcagccctaggggctccagcaaggcgccagttagtggcatcttcgctaatctcccgcaccactttagagatatctgcagccccttcatcgaacacacaacaaatgatgtcaatagtgcctttgaggctactcggaagtctcacatggcaattgcttctgcttctggcaatcacgaaaatggagttgatggtctttcttcagtaaaaacagtgctggattttaacttccgaagtgtgaatgatctactaaggtttgtgcggatttcaatggagtctatcagctgctgatgtgtgcagaatctgagaaagtgccatctgatggaagttcctgttggatgtttaatctaattaactttgtttttgatgaagtagcatgaagctgaatataatccaacagtgcaaaagcataggtctttcatttgagcttgctggtcaacttgtacagagagtgatcatatttcttctttttttacgttgattacacccaattagtatatatagttgcatacccacttggatgatttagttagtgaggaacacaagtgaagatgagctttgcactgttcaatgcttctgcttggaagaaggatgctcttgtggccgcagttcgttgttatctggaaagtggcttgctactgagcattctcttactacatgatgtaaattgtgaatctccatcaaggctggcttatggctgaagaggagaggacagcaaagccagctaatctcgctatccaagaaatcggctagtagttttttcccttttgaaccttgtcacgatgccttgtcttctggataaagttcacgcaggtttcaaataagaaatcacatggactatcagacttgtatggaatatggatgctgtacaaagatttctaatgtacattagtctaactttttttttcgtgatccccgaaatgccgactatcaccagcgcatgtacatgtatatatacatacaataaaggttggggcatttttaccacgtgctggtctctatgtatgacgcctttggttccgtccaacttttagtctttcacatttttgaaattttgtgacattctagttttttgttaggatagcgtctagtactgggaatttgttgcagaatgcaaaataaattccgtgctgtacaacttgtagccgagtttcaggtcgtcgagtgaagtgatggtaactgctcgccgaatttgcactatgcggtctgtggatagctacttgaatgaaaagtttgtttccacatatcaagt

SEQ ID NO: 22656 - DNA, 375 bp, Zea Mays
  misc_feature (1)..(1): n is a, c, g, or t
ntcttgtttacactacacatgatttcctgtttgcgcgtagtcggttgggacaatgacttaattttgttggagttgctcggcagacagctaagagcaggaaatcgagagaagagagaagccaggagagggtcttcttacgtgggtattatttgatctttggtttggcaggccatgtattaattcgtagtgattatgttatctttcctactcgatcatttctattttcaaaatagatttgcctatttgatgaatatgaatctacttcctggaggctccatctatcatgtatttgctgcagaatataaggagttattaggcgtttggctgatgatctatctgatctgcacctatctatactaccgtgccttttcttta

SEQ ID NO: 22657 - DNA, 2673 bp, Zea Mays
gtctctctagtactggatcagtccctcttccttttccctctcctcagtccctgtctgctgctgctagacagcacaaactgcggtccggtgcgctctcctcggcggtggagttggagctgcagtgcaggggaagaaccgaagaagcgagctagagccgcaagaatgataggcgccaaggccaacgccgccggcccgtgcccggagtatgcggaggtcgaccccaccggccggtacggacgggtaccgggcgttcgacgagtaccaggggatggaggtggcgtggaaccaggtgaagctgcacgacttcctgcagagccccgaggacctggagcggctctactgcgagatccaccttctcaagacgctcaagcaccgcaacatcatgaagttctacacctcctgggtcgacgtctcccgccgcaacatcaacttcatcaccgagatgttcacctccggcaccctccgccagtaccggcagaggcaccggagggtgaacatatgggcggtgaagcactggtgcaggcaaatcctcagcggcctgctgtacctgcatagccacaatccgcccatcatccaccgggacctcaagtgtgacaacatcttcgtgaacggcaaccagggagaggtcaagattggcgacctcggtctcgccgccatcctccgcaagtcccacgccgtccactgcgtacaccggagttcatggcgccggaggtgtacgaggaggagtacaacgagctggtggacatctactcgtttggaatgtgcgtgctcgagatggtaacgtttgagtacccgtacagcgagtgtacacaccctgtgcagatctacaagaaagtgatctctggtactaagccagaatctctgtacaaggtgaaagatccaatggtgaggcacttcgtcgagaagtgcctagcaacggcatctcaaagactgtcagcaagagaactgcttgaggatcccttcctacaaagtgatgacgtggttgcttctttggatggtggaaattaccatgtgccggccaattatatacctcagccttcatatttagggcatacctacagcaatggctccatgatgagtaatggattctcagaaagcattgatgaagatgctctcagtgaagactgcgaggatgatgacatgaaaggccaagatggcattgacctgttcaacgagaatgaaggtgagcttcttggcaatgtggatataacaatcaaagggagaaagagtgaggatggaggcatattccttagattgcggatttctgatgatgatggacgggtacgcaacatctattttccttttgacgttgaggctgataccgcactaagtgttgctactgaaatggtagccgaactcgatataactgaccatgaagttactcggattgctgacatgattgatggtgaggtcagtgcactggtaccagattggaggcctggtccgggcatagaggaggctcctgacacttcatactgccacgattgtggatccatcgtgtcatcgtgtggttcactttacgcctacatgtcatcaggccgtcgaggttgccaatgtgcagaggtacatgggcggtttgaggagatcacgttcgaagctgatggagagcagtgtgatttgcaggaatctgcaggcagctctgatgatggaggtggcccaacagagcactatgtcaaaggcaaggagtccactcatgtgaatggccttctacagatgggtagaagagatctttctaatcagctttgcttcagttcattccaagagcaatcatgttcatctaaccattatgagaacgaaactaaccatcacacaaatgggttcgacatgaagcatgaggtaaagattgccaagtacaaagcacggaaaatggcacagttaaagagggctatccatccatctcttgacttcgacaatgcaaatggagtaaataggatgaagccttcactgaacaagctgcaatctttccatattggaaagaaccacagtttccgggtaccgaccggtgaccgaagcccgggtaaagtaagtacggattaccattctaatttgaacagccaattatcgcatagcaggcaccccgatccaggagcccaaagggcctggcattgtgaggtcaatgcagctgggagctctgattgtatgtttacagcaaggcgctactatgccggagctcagttgccaccaaatctcccgcgaacaaaatctgtacccctacatgctgtcgacgtctgaaatgctcttgccctgtaaagtttatagtgtacatctgttttggttctttctgtacccattatgaaacgtagttgctgagagcaggagactgaatgtgacgaggttgcatgtggattacggctgagctgtttgtaaatttccatcttgtgaattcagagaggttagattgttcgagtccaatccacatcatttgcctcactggggcaaccagttttatcctctttactataggcaagagccgatttccgagatgcaaaattgctgttaatcaggcagaaacaaggcatgggactctatccttgcgttggtactagatgccacctacctctcctagttccagttgaatatacatcaaatctgcattgccagcctatgcatttgcattgccaatgccaactgctgcatggacgctgcactaatcaattgacgcttccatgactc

SEQ ID NO: 22658 - DNA, 1393 bp, Zea Mays
ggggcacaaaagaggaatctggtcagttgagttttctcctgttgaacaatgtgtcatgacatcctcgggtgatagaacaatcaaaatatggtccgttgctgatggctcttgtttgaagacatttgagggtcatacatcaagtgttctgcgagcgtctttcctttcacgtggaactcaagttgtttcttgtggaagtgatggtctagtgaagctatggacaattaagacaaatgaatgcattgctacttatgataagcatgatgggaaggtctgggcattggctgttggcaggaaaactgaaatggttgctactggtggaaccgatgctgtcctcaatctgtggcatgattgcaccatggaagataagcaggaagatttccgtaagaagggatctatacacgcctatgtcactgtcaggcatctgcaacactctaaaactcatcagtgttgcaggagcaagaagttttaagaggccaggaattggaaaatgctgtgtcagattctgactatgcaaaggcaatacaacttgcatttgagcttagaagaccacacaagcttctagatttattctcacagcttgccaggcgagctgacgcagaggatccaatagaaaaggctcttcttggtcttccaaaggatggccttcgtgtgcttctagagtacgcccgtgaatggaatacgaagcccaagttctgtcatgttgcgcagtttgtgctttttcgggtattgaggagtttctctcccactgatatcctggagataaagggcatcagtgagctcctcgagggccttattccgtattcgcagaggcatttcagcagagtggacagactagtccgaagcacgtttctgttggactatacgctgacgcgaatgtccgtggtagacccagatgtggatgcggggtcaatcaaagacgaaatgaatggttcgtctgtggagaacggtgaacttgcagagcctcggcctgcttcacctgtgccagagaagtcaagcaagaagagaaaatctggcaaatcaagtaaaaagggaaaggagaaggtgatgaagcttgcctcgagtggacttggcaagggtgtttctgttgaagcctgaaaatctagctgagaatctggttttgcttatgcatgcatgcatccaattttgtagcagctgttgaaactgacgttgcccaacgcacgaatcacatttgatgtaaatgcagttttttgctgcgtttattagaaggccgcagcgcatttaatgcattggagtgtatgatttgctatcaaaatttggcacgccaaaggttttgataagccaaagttgctaaaagttgggcaaaatatgttatatagatatagcaagccaaatgtggcaagtttttgtgcgaaccaaatagctagcaaaaagc

SEQ ID NO: 22659 - DNA, 1083 bp, Zea Mays
gtatttgaagacagtgttttaagacacggaggaaaaagaaactgacaatcccaagttacagtgttacacatggccccccaaatatctcgcctagatcatctccctacccctcaaaatttcgactataaaactgcactgctcccttggtcctccaagaagaaaggaacaaaggagagagatctcgatccgcacacctcacgcctctcttcctctcgccccaaggacaacgaaaacatcaaacaagagaaccaaaggaaacagagcaagagcatcgctctcgaagcaaaacgcgcaccacgccgtcgccggccggccacttcgcacgtacgtaggacgcgcacgcaccggtgcatatatggggctcctgaaccagctgtgggacgacacggtggccgggccgcgcccggactccggcctcggcaagctccgcaacgacgacgcccaggggagagggctggacgaagaagctgcgcgggaaagccaggatgggcggcggcggcggtgacgacgcccccggcacgccgaggagccccaccgtgtacgactgggtggtgatcagttcgctggacctctgaagcccaagccaagacgagaactgcacaaggaaacccaccaccaccatcaacacagctagcgaactgaaggagggagggggcagaggggccatggccatgtaatgtaacgaccaatctctttcagagcttctggtgacgtgtccagttactatatacatacatacgttaacggtgtactatgtgtcttgttgtaaatgtcacccctgcgaggtgttgccgattttgtaagctactacgtactactacgctcggcatgtcaccgtgtgcaagtgcaacacaagtttgtaaaaatgactagctagtagtagcaatgctgttgctgtacgagtaggcctccctctgctttgtacaggggtagtccaacaagtatatggtttgctggtgccatgtaaaaatgtatatagaatcctacgttcacgcccagcaaggatgcgtggttgagtgttctggactctggacaatactactatccaataacagccataccgtgtttttttcctgggccaat

SEQ ID NO: 22660 - DNA, 1947 bp, Zea Mays
atctgttccgttgcgtgctcctctctcactccacggtccacgactgccaccagcgcttcccgctttcccagccacccgtcgcctccgcgtgtcgccccatccagccatcagttccaccccagctgcgaatccggcgcgctactaaccgccgggggaccgaaatttccccagccgcaagtttcgggaccggaacaacaatggcagcagcagccgtcgcctccagttccaccccgcggccgctccggttggcgcagcgcggggcggtctctgcgcacgcgtcccaccacgtcagcgccccgccccaccgctcccgcaggccgcggctctccgtctcggcctcagccggggtggaggggaccagcgggtcggagcggttctacttcaacttcaccgggttccccttcccgctcggcccgttcctcaaccgccgcaccatccgcaccgaggcggtgaagggcagcatatggctgttcgagcaggagcaggcgctgggcttcagcagcgtctccaccaacatccgcatgacggtcatcaagctcaagtccggtgggctctgggtgcacgcgcccatcgcgcccacgaaggagtgcatccagatgctcaaggagctggacgcgccggtggagcacatcgtgctgccgaccttcgcatacgagcacaaaatcttcgtcgggcccttctccaggaagttccccaaggctcagatatgggtggcgcccaggcagtggagctggccaatcaacctgccgctcgagttcttcgggatcttccgggccaagccgctcaaagatgaggatgacgccacgccctgggtcgccgaaatcgagcagaaggtgctcagctctccggaagttgggattgggccatatgtggaggtggcgttctaccataagccttcacggacactactggtgaccgatgctgtcatatttgttcctcaacagccaccggagtgtatcagcaaagaatctctgttggcatctgcgaagaatggactggcagtgaagctattgagcaaagggaaggaggttcccgatgaaccagttgttgacaataagctaaaccgtcagaaagggtgggagagaatggtacttcaaatactatttcttggtccgtcaaatctacttgagccaaatgcaagttttgctcaaatgtcgcaaaaattgatcgtctcacctattgtcaagacgctcgttttcagcaaagttccagagaaggtgagggactgggttgacaggatcgctgccgactggcgattccgacggataatcccttgccacttcgcagccccaataaacgcgagccggtcagactttctggctgcctttgccttcctcgacgagttcctccccgaacgcgccgccgcggctcccggcctctcgctgctcctcgcctccttcatggggaaggcggccagctacttccctccggatgacatgaagacgctctcgtctctggacgagttcctggtctccgttggcgctgtcaagaaaaccgtctctgggaggaagaggtgacgccggtggattggatgtgcatgggtttttatatgaagggacagttgctgcagtgcgtgcttgaagcgtgggtacactgtcaaattttaatgtggttattagtggaggaaattactgtaggccctccctacagtacattcacttcaaaaaaaaaatagtgggggaaatggtacattaggctaaaatctaggagagcccatatgtcttgctgccttcaatagaaagccagatttttacagcatatggaatttaccagcttggagcataccggagtaggtatattctgtcgtgtttgaggctagtctggaagccacaaaactggagatgattgatgattgtaggggctaaaatctctgtcttattaaaaaattggataagaaagagattttagcacctccagtcccctccggttttgtggctatcaaactag

SEQ ID NO: 22661 - DNA, 3737 bp, Zea Mays
ctcgtttcctccccgcctctccccctccccggctctaagggctcttctacaccgaagcaccgcacctcccgccatgcactgcatcgccccccgcctgctcctcctcccgctcccgaccgtctcccgccacgcgctatcgccaacccagacgccacctcttcctcccctcctcccctcccgcgcctgtaagttccacctcgcctcggcgcgctcgccgtcccgcgccgccgcttcggtttccggcgacgacgaggatgaggaggttgacgtggatgacgacgaggacgacgagacaaccatccgcaacgtagacgatgaatacgacgacgatttcgaggacggggatgagggagatgagggcgatgaggaggcggtggacgaggagagcggtggtgagtacgaggaagaggcgggggaggacgaggacaagcgggaggataccgcagcgcggaggcgggactcggaggagtataagtcgcggcgggtggcgaagctggtcgccgaggtgcgggagttcggggaggacgtcatcgactacaacgagctcgccgggatctacgacttccccatcgacaagtttcagtttctgcacctacaagtagtgggaaaacattaatagcagaagctgcagcagttgcaacagtagcaagaggaaggcgtctcttctacacaacaccattaaaggcattgtcaaaccagaagttccgtgatttccggaataccttcggtgatcataatgttggccttcttacaggagattctgctatcaacaaagatgctcagatcctaatcatgacaacagagattttacgtaacatgctgtaccaaagtgttggcatgacagcctctgaaggtagattatttcaagttgatgtcattgttttggatgaagtccattatttgagtgatatctcacgtggcactgtttgggaagaaactgtcatatattgtccaaaggaagtccaacttatatgtctgtcagccactgttgcaaatcctgatgaattagctggctggataagtcagattcatggtaaaacagagcttgtaacatcgaacaaacgtccagttccgcttacttggcacttctcgaagaaatattcattacaaccgcttcttgatggaaaggggaaaaaaatgaataggaaactgcggatgtctaactcccaaaacttagcatctccaaagagtgagttctattatgtgaaagggaagaggaggtttagaacaaataaaattgagcaaggtaatagcaggcctttggacatatcgaaacaggttcagttatcaaagcatgaactcagcaatatgcgtcgttcccaagttccactaatacgtgacactttatcacaactatgggaaaatggcatgcttccagctatctggtttatttttagtagaagagggtgtgatgcagctgttgagtaccttgaggattgcagactgttgcatgactgtgaggctagtgaagttgagctggaacttaggaggttcaagatgcaatatcctgatgctattcgagaaagtgctgtgaaaggactcatgcgaggagttgcggcccatcatgctggttgcttgccactgtggaaatcatttattgaagaattatttcaacgtggccttgttaaagtagtttttgcgacagaaacccttgcagctgggattaatatgcctgccaggacggctgtaatttcttctctcagtaaaagaatagatgctgggcgccagctcttaaccccgaatgaactattccagatggcaggtcgtgctggaaggagagggattgatacagttgggcatgctgttcttgttcagactccatatgaagggcctgaagagtgttgtgacatcatctttgccggacttgagccacttgtctcacaattcactgcatcatatgggatggttttgaatcttcttgccggttcaaaagttacacataaacagaaagaatcggatgatgttaaggacaagcattctggaagaaccttagaagaagctcgaaagctagtggagcaaagctttgggaattatgttggtagcaatgtaatggttgctgccaaagaagagactgaaagaataaggcaagaaatacaatacctctcttcagaaattactgatgaatctattgatcgaaaatgcagggaagaattatcagaagaagactatgctgagatttccctcctacagaagagactaaaggaagagaagcagatcagaaatgagctgaaaaaaaagatggaactggagagaatggctgcatggaaaaatcggttagaggaatttgaaagtggccatcttcctttcatgtgcctgcaatacaaagataaggattcaattcagcacacgatccctgctgtatttattggaaacctcaactcatttgctgatcaaaagatcatgaacatggtggaagatgattcacttgtttctggcaagccgaaacgtgatagtggggaacaactttatcgcccatcttactatgtagctttaagttcagataattcatggtatctgttcacagaaaaatggattaaaactgtttacaagacaggtctacctgctgtcccttctgttgaagggggcacactccctagagaaaccctgaaacagctcctcctgcgtgaagagttggtgtgggataaagttgaaaaatcagaatacggctctttgttaagcatggaaggttctttagacacatggtcgtggagtctcaatgttcctgtgcttaatagcctttcggaagacaatgaggtagaacgattctcccaggaacatcaagatgctgtagaatgctacaagcaacagaggaggaaggtttcacatttaaagaaaacaataaaggctactaggggtttcaaagaattccaaaagatcatcgacatgagaaattttacaaaagagaagattgagcgcttagaagctagatcccgtcgcttgactcgacgaataagacaaattgaaccgaccggttggaaagaatttctccagattagcaaagtcatacaagaggctagagcattggatatcaatactcaggtaatctatcctttgggtgagacggcagcggctatacgaggggaaaatgagctatggcttgctatggttcttaggaacaaggtcctcttggatctaaagccatctcaactggcagcagtttgtggaagtttagtttccgaagggatcaaacttcgtccttggaaaaatagcagctatgtatatgaaccttcttctgttgttactggtgttataagttatttagaagagcagagaaattcgctaatcgatctccaagagagacatagtgttaagataccttgcgaaatagatgcccagtttgctgggatggttgaagcctgggcttcaggactgacttggagggagataatgatggactctgcaatggacgatggagatttagcccgtctactcaggcgctctatagatttactagctcagattcccaaactgccagacattgatccggttctccaaaagaatgcacaaattgcttgcagcgtcatggaccgagtaccgattagtgagcttgccggttgaaaactcaaccttctgaagctatcctatacctctacaacaaagaattcaaaacaacgcaaacaatcatctacagccacccgttcaatctattcctcgtcactacttgaatcagaatctgcactatccttcatgaagtgcgctggcaggtttggaaatcttggcatgaccctctttctttt

SEQ ID NO: 22662 - DNA, 774 bp, Zea Mays
cccacgcaagcgccatcggccacggttccccaccgtcacactgccgaatcttctcaccgagggtggccaccgctggacccaggatagcaggatttgagccgcccctcaccaagccacgtagagccatgcttgacgcctcgctctaggtcatacgacagtcgacggtggccctcgccaggccttgcggagccatgctagacgccccgctccaggccgcgaggagccacgctcgacgacccggctgctcgttgcatgccgcacggagctgatctcgccaccgcgctccatgccgcaaggcggcgccccacgccaggctgcgcggagccgcactcgacaccccgcaccgggccacacggcggcgccctcgctggatctctgcgctcctcgtcgccacctgcagagatggtttatggctggaacgttcctctccgatcgacttggaagtttttcaaacaagccaccattatcctttcaaagtcactgcaagcgggccaagcaagtactgtacaacttaatcagtgattcagtacatgttgtgtacctgtgtttccagccgtagctactggatctgactaactgacaagagtatggacgttctatttcccagtacagtgcttcgattttacattcgcctgacatttatatggttcgaatgtattcactttatagtccaatctcggcccacacaaatatcaataatcagcacaagataagtgctttgaaaatataactttgtttccataaatttgggaaatttcaaagaaaacaatctgt

SEQ ID NO: 22663 - DNA, 2966 bp, Zea Mays
caatcccctcatcatcgcttcctccaaaccctagcctgcctcttaccccgcccgacgacctgtttctgccagtcatatttcccgggcagcgcgcgatctcaacgctcccgtcgcgccctgcccctgcgcttcaaccgctccatccaggcgagatcctgcggatggaacccccggcggcaaaggaggcgccgtcaccgccgctccagcctgcggcggaggaggacgcgatgctctctgcgacggcggtcatggcgaaggaagcctctgtagcgttccagggacgtcgctacgccgactgcgcagaagtgctcacgaggctgctggacatgaaagagggcgatcccaaggtccaccataacatggccatcaccaaagccttcttggatggttgtcctgattcaaacaggctgcttaaaattctttgtgatgctaagaagtgaagagcttgcatgtgcaactagagaacaagctgattctgcaaatggggtaggaaatagtgctccttcaggatcaagagggagtggcgttgcactacctttttctgctacacataatgtgtcgacttatggggatgagtttgacacgaccataattacattcaacatggctgtcatcctgtatcatcttcatgactatgaatctgcactatctgttttggacccattgtaccgaaacattgaaccaatggatgagacaactgctcttcatgtatgctttttattattggatatcacattagctttgcaagatgcaacaaaggctgcggacataatacagtacatggaaagggcatttggagtagctaacataacgagcccgaatgaaaatccaagcatagctcagcagcaattagctcaaccgaagcctcctgtgaaaattagcgtgcctccagattctgaattaaatgcttatgctggtggatatgagaacctttcggctggaattttaccagatgatcaaatagaatttgaatctctatactctagttttgatggacatcagaatttgggcaggcgtatctttaatgatttctcaagggcatctgctgatcttgctgctactgctgctgatttgaaagttagacttcagatttacaaggttcgccttctactgctcactaggaaccttaaggttgcgaagcgagaactcaaagtactaatgaacatggcacgtggtagggattcatctacagagcttctcttgaaatctcagctggagtatgcccgggggaattataggaaagctgtgaagctattgagcacaccacataatcgggctgaaccagcaatgctagccattttctacaacaacctgggctgtatactccaccgacagagatcgtatcacacctctatatggtgctttagcaaagcgctgaaatacactttatcacttcgttcagagaaaccaatgaagctgtctacattatcacaagacaagtcttgccttatttcatacaactgtggtgtccaacatttgatgtgtgggaagcctttgttagcagcttcttgttttcgtgaagctatgccgctcttctacaagcgacctcttttctggcttcgtttttctgagtgtagtctgctagctctagaaaagggtctcctgtgtgcaaaaggtgcttcttcatgcaacgatgagattgaagtcattgttgtggggtcaggacaatggaggcagttgattgtcaaccatgtgagcttgagaagtaatttaggttgtgcaggtgtgacttcaggtgaacataaaaagttggtttcacttggatttgctagacagtgtctactcaatgcgctgctactattgaatgctactgaacaggaaaattgggtaaccacatctaatgcagaggattacatccaaggaacattacaaggatataaaaactcaggtcagaagaacactacaagtacggattctaaaacaccttctgccccaactctagctaatgtaaatggtgaacaaaagggaacgagcttgaatgctaccttgcagagttctcttgctttctataatgagatctgtcgaaaagagaacctgaaaatgagacaggccatcctggggaacttggcgtttgttgaattgtgtcttgagaaccccttgaaagctttgtcttatgcaaagtcagtaatgcaggttaaagactgttccaggatgtatatattcctcagccatgtatacgcagctgaagctttgtgtactttgaacagaccaacggatgctgctgagaagctatcagtttatataagagatggcaatgatatcgagttgccgtataatatggagaactctgaaaaggccttggttgagaaagacagtgacagtgaagacttggctgctgctacagtgacaaaagtagccacagaagaatctgagtactcagagggcctcaggcctgaggaggcccgtggtgtcttgtatatcaaccttgccatgactgctgcagtgcagggaaaagttgagcaagccaactacatggtcagccgtggcctggcgatgttgcccaacaaccctcgagcagtgctagcatcggtttacatagacctcttgcaagggaagtcccaggaggctgtcgtgaagttgagacactgtaggaatgtgagatttagacccggtagcatagcagccagcagctgagcatagagaagcctcacttttcatggtttctgtagtttacaattaccatcatgatatttttggacgctgaccccaatgtggatgatcaaagatggtaatgttcctcctgtgtaccatacataagaaatgaactgtagcactgcccttttagcttcaggggtcaaatctcaaatgtgttgtaactgtaccggtttaatttgcctctctttggactgaagagaggtcaagtgatcaaaaacgtttcctatgttacgccaatattttggaaaataatgcttaaaagctgaggggtctgatcgatatacatttagggcttgttcggttagctctca

SEQ ID NO: 22664 - DNA, 1100 bp, Zea Mays
gttcacatcagctgaactaattccgtcctactgcatgcccccctccatgcgagggtgataagggagatcatgcacgcgatgtggaagcctcgcaagttcaagtacatctacctgctggcgacgctgtacgtgttcacgctgacgcttccgtcggcggcggccatgtactgggcgttcggcgaccagctgctgacgcactccaacgccttctcgctgctgccgaggacgccgtggcgcgacgcggcggtggtgctgatgctggtccaccagttcatcaccttcggcttcgcgtgcacgccgctctacttcgtgtgggagaaggcggtggggatgcacgtcacccggagcgtcttcctccgcgcgctggtccgcctccccatcgtcgtccccgtctggttcctcgccatcatcttccccttcttcgggcccatcaactccgccgtcggcgcgctcctcgtcagcttcaccgtctacgtcatcccggccctcgcccacatgctcacgtaccgctccgcgtccgccagattgaacgcagcggagaagccgccgtccttcttgccgagctggtcggggatgttcgtgctgaacgcgttcgtggtggcgtggatgctggtggttggattcggcctcggcggctgggccagcgtcaccaacttcatcaagcagatcgatacgttcgggctcttcgccaagtgctaccagtgcccgacgaagccacaccccgggtcgccgctgccggcgccgccgcatcactgaagcagcgagcgagtgccaaaggctaacgaccgtaaaccgagacattcccgggtggtttcggtcgtcttgttatatgcagcctttctaggagtgtacaacacagcggagcagcttgtgagttcactgacccgagatacctagactggactcgcatgtgtcgcgtggctttgatacattagtgggcctcagtgtcacttcctttgtcttggttgtttgcacatggttgttttaggttgttcggttcatggtacgtgccatctagtacaagacttgatacaatgatacacagtggtgtctattcttatcttttgcatccttaatcgatcttgatgacttgatccatg

SEQ ID NO: 22665 - DNA, 1853 bp, Zea Mays
cacatacgtgtaataaggtgacttggccgaggggaaagacctcagaccacgaacagaactgaaccagaacacggctgtgacgacggcggcgatcagttttgacgctggccggagtgaaactgtgagcgtgatatcgtgagtctaacatctggtattcggagcgaggctggagcccacgcacgactacttcacccgagctcaggcgaagggcgtagcaatggcgccgccgcggaacgaagacccgatggcgcagatcatggctaaaattgaggaaggtaacaaggagacccatcggcgtatggagaccgtccaagcctccctggcaacagttgaggcgacgatgaaaggcatgataaaggaacaaggtgaattccggaaatggcgaccggaggtggagatgaaggtcacggaggtggcagaggcgttgaagacaatccaggcaaaggtggatcaattcggaccatcatcatcgacggagccccttcctgacgggaaacaaacgaagaagggtgtgccgatctccgttcaactggagatcccgccggtcgacgcgacgaacgggcaatttcgccaccgctttgctgaaaaccaccggaggccgggtgttgaggagaatctccgaacacccgctccggtcggaggaggatgtgctgctgcactcggggcgaagagatggtcgaagaactgaatttggtgcttattccagccgaccgtcagttaagccaacgcctatgccactacccttaccaccattggggggcaacagggcggtgagcaacactgaagaacgtcgaggccatggaccacaacaaggcagaagagatgagggcaagctatcagctctgaaggcgtacagaaaggctaaaggactgtgtttcaagtgtgggaacaaatggggctatgaacaccgctgctcaactaatgttcctctgtacttggtggaagaaatgtgggaattggttgtcaatgaagaggagaagctggaggactgtatcggggacagtaaggaaactaatgaagacagtgtgctagcattgtctgctgctgctgctgagggtggtgagggcagcaggactatccgactttgggcttcagtttattgtcaacaattgctggtgctagtagattcaggcagctctgctagttttctgggaagtcacttgatgaatgtcttaccagggattcagctgttgaccaagccaatgcaagttaaagtagcagatgggggaattctttggagccaacactggttgccaaactgcaaatggttgtgtggaggcaccacttttacaacggatttcaaattcattcccctagggggttacgacatgattcttggcatggactggctagaacgccactgtcctatgtcagttcactgggctgcaaaatggatggagtttgattatgataagaagagagttcacgtgcagggtgtgttaccaaaggttcagacctgttacagcctgaacggggaacagttgggtttcatgataaagcaagaagcagtgcaacattggttggaattgcagactgtaactgaattgattgttaaaaataccccagaagctgtgcagaaattattggaacaatatcagcacttgtttctccggccagacagcctgccaccgaaaagacaggttgaccacgccattgaattgttacctggagcacaaccatttaggcttcgaccttatcggtacacctgtaatactcaaaagtgaaataaagggattgatataatctcaatagcttgtggcctctaccattcatcacatgtgatcaacactagttaaaaatttgataatttgaacaaagaaacacataaataacctgtgcatcatgctggatct

SEQ ID NO: 22666 - DNA, 1670 bp, Zea Mays
ggggtcgttgtctcgttccaaactagcctgaccaggtcgtccaacgactccgctcacccttcgcggtcgcccgcgcgatctctccaccacttccccgccggcgcctgctaggcgtccgcgaggagggccagcgatgaagggctcctcccactcgcaggcgggggcgcagcctcgagggcaggcggcgacagcgaggacgaagagatccggctgtgcgagcagcggctcgagagggaggatgccgtgccctacgaccgcgactttgacagtgatcccgtgcttgtcggtggcgctgccaaggattggaataaatgctacgtaggatgtgaatttggtttttctgcgagtaagacacctgatgctacatttggaattgcaccagatccttctgtagatggtatcctcagatcaatggaatcatctcaatattattcagagaataatattgatgtggctcgagggtgggagagggtacaagattgtgatgacaaccagcctttcttcagacgtaccagttggctacttttcatgggctgaatatgatatcatggcacctgtgcctccaaagactgaagaagctcttgctgcagcctttatttctaactgtggtgcacgaaactttcgtttgcaagcccttgagatgcttgaaaacttggatgtcaaaatagattcatatggtagttgtcatcgtaaccgtgacggcaaagtggacaaagtggacactttgaagcgctacagattcagcttggcatttgagaattctaatgaggaggattatgtaactgaaaagttttttcagtcactagtagcaggttctattccggttgttgttggtgctccaaatattcaagagttttctccgggagaaggcgcaatattacatattaaggagcttgatgatgttgcttcagttgctaagacaatgaaaaatattgcttcaaaccctgatgccttcaatcaatctttgaggtggaagtatgatggtccatccgattctttcaaagctcttattgacatggcagcggttcattcatcttgtcgtctttgtatacatattgctaccaagatccatttaaaggaggaaaggactccaaaatttacaaatcgtccttgtagctgttccaccaaaaagggaacaatttaccacttatttatccgagagagagggcggtttaagtcagagagcatttacatgagatcaggccagttaactctgggagccttggaatccgcagtgctcggtaaatttaggtccctcaaccacgttcctgtatggaaggatgaaaggccaccgagcattagaggtggggatgacctgaaattatacagaatttacccagtcggtctaacgcaacgtcaggctttgtacggttttagatttagggatgattctgaactcgagcaatatatcaaagaccatccctgtgcaaagcttgaagtaatttttgtgtaactactatgccctaggcttaacgttttccccccgattcttactgaactctgtgtgcgagtttcagttgtactgtaatgtagagtgttatgtgtagcaaagaaactcatgccagtacggatcatgtgtcggttgtaaattttccatgacagtaaacatcattccttcttttcagtaacaaccgcaaacaaattaacacgtttcttcaagaattcatgcc

SEQ ID NO: 22667 - DNA, 1747 bp, Zea Mays
aatcagttcactgagtcaataaaccaatgagtcatttcagttagcgacctcatgtagtgaatcagcacggtaaaaggactgttttattgctttcgactctgcttactagtggattgggtcttctaagtgctctatctattaactacttgtgcttgctggttcttcggttttttgtcggcataggagtgggcagtgggcatgtattttcatcttggttcttggagttcgttcctgcaggaaatcgtggcacttggatggttattttttcctttttttggactattggcacagtcttggaggcttcacttgcatgggctgtactatcagcattgagttggaggtggttgctggcattgtcttcccttccatgcttcctcttgcttcttttcttcagaatcacacctgagtcaccacgctatctttgcgcacaaaatagaatgactgatgcaaggtttgtcctggagagaatggccattgcaaaccaagcagctcttcctatgggagttctcacataccaccaagaaacaaaaactgaatgcattactcatgtttctgaggatgaacatcttattccagtcagagagaaggaacatacagataggaatgctattagttccaaatctggtgctgttgctgtattgcacaagctattatcacataacttgctcaaatcaactctacttctttggtttgtttactatgccagttccttcgcttattatgggataacattgctgacatcacaactaagtgatgtgaatagaagctgtaaatctgatctggtctttgaagtgcaccaaaataatggcaatctttataaagatacttttatcactagtttagcagagatcccaggcttgattttatccgctttgcttgttgatcggtttggccggaaagctactatgtcgtgcctgatgtttgcatgttgtgctttccttgggccactcgtacttcatcagaatgagttgctgacaactactcttttattcggagctcgtgcttgtggcaccggtgccactacaactttatgtctatatgcccccgaggtgtatccgacatatgttcgctcaacaggggtcgggatcgcaaccgccatcggtaagatcggcggggttatttgccccctcgtcgccgtgggcatgctgcggagctgccatcagatggaagcggtgctggtgtttgagctggtgctgttcctcgctggggtctcctgcatcctcttccctgtggagaccaagggccgagaaatggactgagcacgcacggtggtggtagctcagcacatttgggcatccagatgggcttgtggttcatcttgattctgtataaacacaactctactacatccgcgacaagcttagcggatatgcaaaggggtgtaaacaggagctatagtaattacgagaaagaactggcaatgagcaatatttgtaacaggattattgttatagaacttcctcatcatcagtcaggaggtaaataaatatgtgaagttaaatagtaaccatgtggtggacagtgattataaacgaggatattctcgtggtgctggatatgcccaacgtcaattcgttgcgggcaacacacaacctaacgcgtgcctccaaacagctatcaattaattatcattacttgtacatggtaataaggttgtacgcgtgtccccccaatctctatcagcatcatacaatacaaggttgtcgtcttcctgaattcgctttcagttgcgtgagccgctttgctc

SEQ ID NO: 22668 - DNA, 1385 bp, Zea Mays
gtttttttgtcagttatgatctctgttgggttctctctaggcgaataattacctccgaagaaactgttgtgtctgttctatcatctataacagggaagtatcgcacaggtttgtcacctgatgctctatcagtcatagaaaaccgtgaaaaggaggagtctgaggaacttagaaaatctgcttatcttcaagttgaaacggctttatccttacctggaaggcttagtggttctgtggaatggaggaaagcaaggtcagagttgggccaagcagattcactaagttgctcatcctgccctattcggaagtgtgtggatggtcatgtttcaaatatatatgatgctctttctgcttttctttcacatttttttgacaaaaaaatccctaaagaaagaattattgaagcttttgaggcattgaagactttgatgctaactcttaaaagttccaactttaagagcagaagtgctacattagaccagaaagcacaccatctatttgaggagatatttccttccattgaaagattgttatctgctatttcactgaaagcagagttgggaactgctggataccaatctgtgaccgtgtctggaaatccagtacactcatccttagcgttaccagtagcactggatgcagttaatgagatattgagtaattataagaataatacctttttcacagaaggcaatcatttcccaagagggaacagagtatgctcaggttcagtccttgcaagcagggaacaacttccaataggaattgcaacagcagcttttgacggcattcactcctccaaatgggaagagcctgatggagccaaaggatgttggctgatttatacaatgcaagatggcaaaagttgcgagttggagtcatatgatttgatgtcagctaatgatgctccagagagggatccaatggactgggttcttgaagggagcgcagacggaggctccacctggaatatacttgatgctcggaattcagaaatgttcgagagccgtttcctgaggaaaacatttacagtggataagagatataaggcaaatgctttcaggtttctacgcgtaagagattcccattctaatccaaggtttcagataggatcaattgatctatatgggaaaaccatatgaactccccccggagctgtgtttcacttttcggctttctgaactgctcggtctcacgagcctgtgtagtatcataaattcataatattgtaatgcgagcatttactgtggacgcaacgctctcttcagtatgaatagatactgaataattaagagcatgatatatattgtttgcgcgcgcgattgagttctgaaatataagtgaagtccctcgacatgatcaacgatcctgttttcttgaactca

SEQ ID NO: 22669 - DNA, 2464 bp, Zea Mays
agagagagaaaattataccactcctctctgctgtccaaggcaggggccaggggcgggcggacagcggaggcaagaggcgcgagctcggcccaaggcgctgagggagacagccagccgctgcattgcgctactacattggccaggagggctcgccgccggggggaggctcggatctcgccgtctctggccacccgtacctgctgccgcgtgcttcacttggtgccgctttccgcgcctactggcgggcggcctcgactccagcgcggcgtgatctggcgcgcgccaccgacgccgctcgcgtggggaggcctggatcttggcgcgccgcgagaccccggggaggacggcgacggcgcgctcatcagtcgcccgcagtccgctgagctgctgccgactgcgcccggcggccgggagatctggccgacggcgcggcgctgcagatcccgtcctgcctgcgcgcgtgggcacggctcactgctgctgtggaggctgttacgcgcggtggtggtaccgatgggctacgggtacgtggaacccttcctgcccccacagcagcagcagcagcaggggggctacgggcaactgcaggcgcagctggctccgcggccgccggcttgcccgtactcgtcgtccgcctccgctccgccggtctccgcgtcctaccattcttcgcccccgccaacgtcgcctccgccgctaagcagcccacctccggcgtcccctttaccggagccatcgccgccgtcgtctccgccgccggcattgttgcctcctccgccggacgctccccctccgtcgcttcccccgtcaccgctgccacatccaaccccgtcaccgcctcaagccccgccgcccccgctgccgacggaccagccgcgcgttcagccccgcgtatacccatcaccgccaccgccgtcgcttcctcctcctcctccgccgcctcccaccgtctcgccgccatcgccgggtccatccaactctccatcgccgtcgccgtcgcctgctccagctacacaagctccagctccggctcctgcgcgtgttgctgcctattcgcctcccccgccaaaaatcgcccctcccccgccaccgcactatcgcggcaagtcgcattacacgccgcactcgcccgtgaagtcgcattcgaactcgacccatgcagctagcggcagcggcaacaacatcgagatatcgagggaagcggccaccaccatcgtagcactggccggtctcgctatgctcagctttattggcgccaccatttggttcgtcaagaaaaagcgccggcgcattgagcccccggcgacactgcctacacagcaaccagctcctccgccaccgcccaactacattccatcttcggctggatcctcactagcttcagatgggttctacttgagatcgccagggtatcctttcatgaggtacagcactgggagccgtggttttccatactccccagccgactctgggattgggtattcccatatgctcttcacaccagagaatttggcagctatcacagatgactttgcagaagagaaccttttgggggaaggtggatttgggtgcgtgttcaagggcattttgcaagatggtcgcccagttgccgtcaagaagctcaagattgggaatgggcaaggcgagctaagtgaagcatcactggattggcagacaagggttaagattgcagctggagcagctcgagggattggttacctccatgaagattgtcatccacgtattattcatagagatattaaatcatccaatattttgttggataacaacttcgaagctcaggtttctgattttggacttgcaaggttagctgccgattccaatacacatgttaccacacgtgtcatggggacatttgggtatttggctccagagtatgcattgtcaggcaagttaacagcaaagtctgatgtatattcttttggggttgttcttttggagcttattacaggaagaaaacctgttgatgcttctcagcctttgggagatgaaagtctggttgaatgggctcgtcctcttctgatgaaggcaatcgagcttcgggagtttggggaccttcctgaccccaggatgggaaacaggttcgatgaaaacgagatgttccatatgataggagctgcggctgcatgcattcggcattctgcagcaatgaggccacggatggggcaggtggttagagcactagatagtttagccgactctaatctgaacaacggcctccaacccggacgcagcgaggtgttcttagagccacagacggaggagattcgactgttccagctgagggagttcggcagccgggactgtagcgacgagctgagccaagcgagctggagaagccgaagagatttgtgaacagattcggcgctgcgttgggcgggcacaagtacaatgattagcggtgctaatttttattcgtggctcaattatacccaacctccgg

SEQ ID NO: 22670 - DNA, 187 bp, Zea Mays
ggggtctatggctgatcaagaagagccatggcctaagctagtggcttccattgcactttaggaggagcactagtttaccatctcctcaagtaggagagtggacatcataatttgtggcagaggggatacgcgttcgcgcggtccctaccaaaataatgtaacttttaaattcttttggaatacaaag

SEQ ID NO: 22671 - DNA, 1692 bp, Zea Mays
atggatcctcttcgtccctggctccccgcggcgacagcctccagctctccaccagcgccgctccgcgtgagcgtccacgctccaatcgaccaatcccatctgttcgcggccgcccacgcttccgccgccagcgccttgatgaaggacaagatgaaggatttcgtgaagaagatcacctcctccgggtccgggaccccctcctccttcaagggaacctcccacgtccttggctccggcccctccccctcctcctcctcctcccaccccgcttcccgtccttcaaaccctagcgcaaaccccaggcccgcccctatgcggccctccccacctcccccgcccacttcaaccaccgatttcgcccccctcacgcccctcgtctcctcctcctcctgccgtccagatgcgaacggcaccgcggccgccgccgtcgcttgccccagctgcggagacgcgttcccgtccgaggtcgccgtctccgagcacctcgacggctgcctcgcgtcggcagggggcgcccgcgcgtgtgcctccgcgtacctcgccgccgacccgcccccgcccgcggcctccgtggaggtggtcaaacgcctgctgggcaacctgctgcgggagcccgagaacgacaagttcaggcgggtgaggctgagcaacccgcggatcaaagaggcggtggcggacagggaaggcgggatggagctcttggaggccgtcgggttcagggtcagagatgagggcggagaacccttcgccgtgatgaacgaagtgcccagggacgcgaggctcaatgggatcaggagggccgtcctcctgctcgagggggcacacccctctgcgcctccagtgaaggcagaggttgaggccaaggagagctgcagtaatgtggctgatctgcaggacggtgctaagaatattgatcggcagtgtgttgtcaactttacaggttcgggtatttttctctgttcctgagagttctgtggcacaaaatgatgtaccagattctttttacaatcttactggtaatgagatacggaatgaagcaaagatgaggagggaaaggttagaacaatcacgattgttgataccaaagtcttacaaggagaagcaggcattggctgctcgacagaagtataaacaagctgtcattcgagtcgagtttccagatagaatgattcttcagggcgtattcctaccaggcgaggccactggttcgctgtatgagttcgtcacatctgctctgaagcagccaggcttggagttcgaacttatctctcccgccattcctaagccgcgtgtggtgcctcattttccaaacccgggagagcgggcacgcaccttgcaagaggaggagctggtcccttccgcgctcctcaagttcattcccagggagactgattccgtggtcttcaccggtttgcttgatgagcttctgaaggccagtgagccgcttcctgctgcatcacaatgaagtgtgtgtgtatgtgtgtgtatagcagttcgttctgttgctgtttctgcttgctgcatcacaggattacttggataataacggtacatatttgtattggctgacatatcttgtggaaaggttgacatactcgagaattcgttaggcccatgctgaactggatatgggctggactggactggactgtaaaactcaatacatggcaagattgcttgatttggctgtcg

SEQ ID NO: 22672 - DNA, 1910 bp, Zea Mays
tgagtggaacgagacgtgcgagaagctgggcaccatcggcaccacggccaacctgctggtgtacctcaccaccgtgtacggcatgtcgggcgccagcgccgccaccctgctcagcctctggtcgggcaccgtcaacctggcgccgctcctgggcgccttcctcagcgacacctacatgggccgctacgccaccatcgccttcgcctccatggcctccttcctcggcatgatcgtcctcaccctcaccgccgccgtgccgtcgctccaccctgccgccaacagcagcaccaccggcggcccctcgtccctccagatggccgtgctcctcgcctccttcgcgctgctggccgtcggcgccggcggcatccggccctgcaacctggccttcggcgccgaccagttcgacccgcgcaccccagccggccgccggggcatcaacagcttcttcaactggtactacttcaccttcaccatcgccatgatggtctccgccaccgtcatcatctacctccagagcgacgtcagctgggcgctggggctggccgtgccggccacgctcatgggcctctcctgcgcgctcttcttcatgggcacgcgcctctacgtccgcgtcccgcccgagggcagccccttcaccagcttcgcgcaggtgctcgtcgccgccgcgcgcaagcgacgcctgcccgcgccccgcgccgacctctacgacccgccgcaccggagcagcctcatctccaagatcgcgtacaccgaccagttcctgtgcctcgacaaggcggccgtgcgcacccctgaggacggccccgcccccaacccctggcgcctctgcacgctgcagcaggtggaggaggtcaagtgcctggcgcgcctgctccccgtctggtcctccggcatcgtctactacatcgtgctcaccaacctcggcaactacaacgtgctccaggccatgcagaccgaccgccgcgtcggccgcgggggcttccacatccccgcgggctccttcgtcgtcttcaacatgctggcgctcaccctctggctccccttctacgacggcgtgctcgtgccggccatgcagcgcctcaccgggcgcgagggcggcatcacccagctgcagcggatcggcacggggatcgtcctctccatcgtcaccatgctcgtcgccgccgccgtcgagcgccaccgccgcaggctcggcgactccgcctcctgcttcctgctcgtgccgcagcagatgctggccggcctgtccgaggccttcggcatcatcggacaggtcgacttctactacaaacagttcccggagaacatgcgcagcgtcgcgggggccatgctcttcctggcattcgccatcgccagctacgccagcggcctcatggtcagcgtcgtgcaccggaccaccggaggccccgacggccgccccgactggctggcgcaggacctcaaccagggccacgtcgacctctactacctgctcatagccgccatggcggcggtcaacctagtctacttcgtcgcctgcgcgcgctggtacaggttcaagaacccggccgccgccgacgtcgagcagctggagctggagttagagggaaaggccgcagcgcctcctgtctgaatactgaagagctattttcttttcttcctcctcatcaatcaaaaaggaaaaaaaaggagaaaaaaacgaacttgccgtgcggtgcagggtgcgaagaaaggtactactacttgtagtaaagactaaagagtactaggtagaatagacgcataattaaacgccataaagggagggagggagggagacagtacacagtacaggttgcaatccaaattcaaaatcatgtactatattattgcttgatgactcctccatccatatgatatcaacatgattagcatccatctcaattttggag

SEQ ID NO: 22673 - DNA, 2722 bp, Zea Mays
gggtgaggattgaggaaaggatggggacgacacacgcacaccagaactcagggtctcaaccgccgaggccgatcgagcgaggcagaccgacaccatgtggctgccgcacgcgtccgacctccgcgccttcctcgcggctgctgccgtcgcgcatctctcctcctccagggcctcccgcgcctccccgtgcgcgaccccgccacctccgcggttccgcgcgttcgcctcctcccgcgcgtcgccgccgccctcgccctcgcaaacgggatcaatcgcctctgccgccgcagcagcatgcgagcatgtggcggagaagcccgctacatgcacggccgacgagctgcactacgcgcccgtaccgggcaccgagtggcggctcgcgctatggcggtaccttccgccgcctgaggcgccaaagaggaatcacccgctgatgctgctgtctggagtggccacgaacgccattgggttcgacctgtcgcctggggcatcatttgctcgtcatatgtccatgcaaggatttgatacatggattgttgaagtgcgtggtgctggcctaagcacgcgtgaatcagaactagctgcaactaacaccaagtctgacatcactcctgatcctaattttgatgaaagttctacaacaaaagcaagtattgctgttcctgctgagaatatgtccagttctcaacctcaaatttctgaagttccagtaataacagataagaacatggtaggaacaagtatatcagaagaaccacagctggtgacaaagttgtcaaatgctttggcacaattgggtgaaacattctcaggttatgtaaaagatagccggctgaaaaacatagctgacagtttttttgatcgagtgtcagaacttgctcctgctgcctccgtagctagccttgaggaggtttcacaaaggattttaggtttgttggaattgccacagacatcagtgatatctgatcaaattagcaatttaagccagcgccttgtgaagattctgggggaaaaccaacgaagtgtttcccctaagctgtttggctggcaagaacggctctcggcaaccatagaagacctacagaaacagttggagcttattataagctatgattgggactttgaccattatctggaggaggatgtacctgctgcgatggattacataagaaaacagagtgtaccaaaggatgggaaattgcttgctattggtcattccatgggaggaatcttattgtatgcaatggtttcaaagtgtggtatgttttgttgacatgtctccttttctcctcgtacatatctagccgtgctggtgaagtttttcttttacttgaaaggaaggtatgtcgtcaactagtaaggctgtagtgtaagtgtaacaaatcaagcaatacctttggtagctgtggatattatcacaaacacataaattactgcaaattttattcatcttgataccaagatctggaacttcaaaaaacttcccctggtctcatcatgtttgaccattgcgtactgcatgcaaatattaagtacaaatccaaattccaaagtcatgtgatcagaatatattgtgattatcctgtctggcatgttattttcacttctcctaggataacaatggttctcctcatctactgcaattatctctaccacgtgacatcctgatctatcaaaatggcttctgcacaacccctcagcctatcacaaatgcaaaaaaaagcagtaaagcaccattcgtgctaaatctttgtccattttttttctcctgatgctgtttcctcataacattaatatcatgttactggagttattaaaatgatgaattatcatcattcatttcatttcttgtacgcccttcccagttcattagttacctctgctccctgacacccaggggattagcaatgttaattaatgttgactctcaaaaatctttagaatatcctctccctgtccctcatactgtacagaagttgctcccttctagattaatgccatatgtaaaatgagcactgggttggtaatttctttcttcaaaaccatagcagagaaccatttgttggtaggtttggttttctttctctgaaaccatagcagagaactatttgttggtacatctttgaaagtggctgaggcattactgatagcttgctggacgtttgcatacttaaatttgtcaggaatcatccttgtttaaatagcttccacttgaattctcatggtcttttaattcctggctctgttagtttcaacaaaaaatacctagcataagaataccatttgaatcaaaggaccatgtcatcactctatgatctgaagccagtagttaccttgaggcttgggcacaatgtgtcagtttaaatagtaatctatcatattcacatatgaaatgtgactagttctgtgcagagaccaaatgacatctttcatcattgacaatttgacagcacaccatcagttatgttttctttttttcgtggttccatctccattccttttttacatcagatgtcagtgtaattggtagctcgtctctttttgatatttgttctgctcaggttgtttaaaattcttaccattatatggaactaatttatcgggttgtgctttataaggatccaaaggggctgagccagagctggcagcaattgttacattggcttcatcagttgactacacaacatccaattcctcactcaagttgctattgccgtttgta

SEQ ID NO: 22674 - DNA, 60 bp, Zea Mays
agagccttcgtccatgtcacaatctgaatttgttattctaacaaattaatattgcgaggg

SEQ ID NO: 22675 - DNA, 2045 bp, Zea Mays
caccagaggcccaccgtcgcgcccagccccaaatcccaaccctagctccagcctccagccgccgcagctcctctctaggctccactgctccagccgccgcgcctcctgcctggctgcctcttgcctggctgcctcctctgtcctctccacgactccacttctccagtctgagcagtctccagcgaccagaggcagcgccgcagcgcgctcggccgctcgccgttccgcgcggccgcgcctcctctccagcgtcgcgccgcgcctcctctccagcgccagcccgccaccgcggcaccgccaggcgccctgccggccagccggccagccagagccaggcgcgcaacgcgctcgaccgccgaccgccgaccgcacaccgcagcacgggactacgggagcagccgaggcccgaccgcccgagaaattcaagataaaagattttgaagcattttcaagtcttaagaactcggaagataaatttaccttgcatcatcatctcatgaacgagaagcatgcagtcgtgtaagtcctgcgatcctaactgattatgcactccaatgggctgcggagcacaaaggggagaaaaacaaaaacgagtgggaggtggccgtgggccatgttgctgctgctgacgaggcggcgcgacccatagtaaaggcgtacaacagctcacctccctcgtccagctccagccgccgtcaggcttccgacgcaacttctaactccgttcgcctccaggcgacaccatcgcccgctggcacgccgccacagcagcaggttaacacaatttggcccggagcttagttgaatcctgcttccgccactgcggacaaccatggcgtcgtcgaagctgcagctgcctgctgacgacagcgtcctcctgctcatcacccactccaatctcaccaccttcgcagcggacatccgcgtctcgcaacagaccaccgtggaggcgctcaaggacaagctctggcgcaagaccggcaccgccgtcgcttccatgcgcctccagctccgcgacgactccggcaccaagatcgccgacctcgacgacgacgccgcgccactcgcggcctacgccccctacaacggctaccggatccatgtcgttgatctcgacccttcctcactcacctcagggggttggttggaagacacttcccttgtcgacaagtacacaatgtccgatgaaacatacgataagctcgacactaactttcgaaaattcaaagaaaagatggtcccgaaaaactctccgtcagaggataaagaagaatcagaaaagcatatggaggaactatgctccaaaatcaaggtgggtgatagatgtgaagttgagcctggtgccaagaggggcactgtaaaatttgttggtagagctgaagcccttggacgtggattctgggttggagtgcaatatgatgagccacttgggaagcatgacggcatggtgaaaggcattcgcttctttgagtgccctcaaggtcatggggcaattgtgaggccagagaaagtaaaggttggcgacttcccggagagagacccatttgaagacgaggacgatgacgagatttgagtgcgtgtgcgtttggaaaagcaaggggaatgtccttgttgaattgcattcgaaacgtgtgtaaaatgaattcggagatttgagtgtgcgcgcttgcttgcatcttcttgggcaatcatagtgatcacatttcaaggcatgctgttacatctctactatttaagcgtgagctaataaattttccctccaacgcagagtatccaaaaaatggggtggattcgaatcctgctcacttgtataaagcgcatgacttctaccactataacttatttctgtctgtgttatataaattagagatattttgtgtgtatgatactaataattttaaaaaatataatatcatttaagcaaggtttacttatatatctgtagaaacagttacatatatgtgggttcttctactagtcctctgacccggaggaaaagatggagattttcgccaacttagagcatctctaacaatacctcaaag

SEQ ID NO: 22676 - DNA, 3399 bp, Zea Mays
tccagctctcctccctcggccgcgttctgcggcctgccatcgcccagccgcgcgcgctgccgcccaaaagctgaaaatagatagcaccacgagggggagaccgactagacaacccgatccttagctaattacgcacgggctgccagattcggggcgcgcggcgctcctacccacccatccctctcccggtaaaccccggggaggtttaccgcgtagccgctgggcggcggcaaggcggtgggggagcaatggcagggtgcgcaccctccagggtggcgtcgtgcgggccgtggggcggcagagcggcgctagagagtgagctgtcgtgggacggcagccactacagcatctccagcggcatcctgccgtcgctcggcgcgcggagcaaccgccgcgtcaagctcaggcccttcatcgtgtcgccctacgaccgccgatacagatgctgggagacttttctcataatccttgtggtatactctgcatgggtttccccatttgagtttggcttcattcagaaaccaacgggcgccctagctgcagtggacaatgtcgtgaatgcgttcttcgcagtggacatcatcctgaccttctttgtagcttacttggatagaatgacatacttgcttgaagatgatccaaaaagaatagcttggaggtatactaccagttggtttgttcttgacgtggcctccaccatcccgagtgaatttgctcggaagatactaccaccagacctcaggtcatatggatttttcaacatgcttcgtctatggcgtctccgtagagtcagctctctctttgctagattggagaaagatagacatttcaattacttctgggttcgatgcgcaaagctcatatgtgtcacactttttgcggtccactgttcggcatgcttctactatcttctcgctgatatgtatcctaccccaacagatacgtggattggtaattcaatgccagattttcatcagcggggtttgtggattcgctatgtagtgtcagtatattggtcaatcactacgcttaccactgtgggttatggtgatttgcacgcggagaacacaagggaaatgatattcaacattttctacatgttattcaaccttggattgactgcctatttgattggtaacatgaccaatctggttgtccatggcaccagccgtactcgaaaatatagagatacaattcaggcagcgaccagctttgcactaaggaatcaattaccaagtcggctccaagatcagatgatctcacatctttgcttgaagttcaggacagattcagaaggtcttcaacaacaagaaacgctcgatgtcctccctaaggctataagatccagcatttctcagtatctatttttcaatcttgtccaaaaggtttacttgtttgaaggggtgtccaatgacctcatttttcaactggtttctgagatgaaagctgaatattttccacctagggaagacgtgattttgcagaatgaagcacccacagacttttatattttagttactggtagcgcgatggttggagtggctaaggcaggagatgttgttggagaaattggggttctttgctataggcctcaactattcacagttcgaacaaaatcattatgccaacttctgcgtatgaatcgcactgcctttctcagccttgttcaatccaatgttgcagatggaacaataataatgaacaaccttattcggttattaaagcagcagaatgacaacagtgtaatgatgggtgttctgaaggagatcgagaacatgctagctcggggtcgtctggatttgccagttactctctgttttgcagtaaacaaaggagatgattttatgctacaccaacttttgaagcgtggtttggatccaaatgaatcggataacaatgggcatacagcactgcatatagctgcttccaaaggagacgaacaatgtgtcaagcttcttctagagcacggagctgatccaaatgctagagactccgaaggaaaggtgcctctttgggaggctttatgtgaaaagcagaatccagtggtagagctgctagtacagagcggtgcggggctatcatccggagacgtggccttgtacgcttgcgtcgctgtagaggaaaatgaccctgagctgcttgagaacattatccgttacggcggcaacgtaaacagctcaatgaaagacggaaccacgccgctgcaccgcgcggtctgtgacgggaacgtccagatggttgagttgttgctggaacacggagctgacatcgacaagcaggacaacaatggctggtcggcgagagctctagctgaccagcaaggccatgacgacatccagtctctctttcgatcgcggaaagcacataggcagcagcatgcctcgaagggcagagtggcacctgtgccgatatggaggttcaacagcgaacccacgatgccaaagatgaaacatgaagaagacgctgagctacgcggcaaagttgttccgcagaagctcctcagaaagagggtcagcttccagaattctcttttcggtgtcatctcttcgtcccacgcccgccaggacactggtcgtctgctctcgaaaggccttgctggaacaggtagtccaggttgcagccacggctccctcgtcagggtgacaatcggctgtcctgagaaggggaacgctgcagggaagctcgtgctcttaccacggtcgatgactgagcttctcgaactaggcgcgaggaagtttggcttcaagcctaccaaggtcctgacgactgggggtgctgagattgatgaggtggagcttatcagagacggtgatcatgttgttctcgtcagtgatgactgggcgccagatgttgcacaattaagaccgaacgacaagtgagccagccgtagtgctcttattgcaatttcacgcaacatggggaaaatatgcccctttgtgacccaagctgggttagtacatgatactccctccgtttctttttatttgtcgctggatagtgtaaaattgcactatccagcgacaaataaaaagaaacggagagagcaatgattaagccaccaatgaagttcttcattccacattgaagaattggcgagggtgtgcatgcccgccatgtaaattgaagtctagccgtgatagttttgaagctgtaggatgtatccagcttggaaatgaatttgtagtgagctggtccagtagactgtagtttcgccttctctttccaagagaatgggtccacaaaatgtaattacatgatttctttttttctgtatttgatatcaagcttttttttcttttttctgtaattacatgatttcttttctctgtattttgatttctctagaccgaattcatcttctatcttctgagatcatctttgaaagtattttatttggta

SEQ ID NO: 22677 - DNA, 4287 bp, Zea Mays
gacccatagtcttactcttttagccgcgaaccgaacaaccaaaacccagcagttccgccgtcgcggaattccgaaagcccgccgtcgccggagacgatcgcgcacacttcgcacgggcacgactgtggccaaatggcgccgaagaagaagcagccggactcgaagcagaggcagaagcccaagtcctcgtcctcctcatccgcagccaccgccgcgccgcgcctccagatctcgtcggagaacgagcgccgcctccgccgcctcctccttaactcctccgcaccatccccgtcacctgccaacgtctcggaagtccgcggcgagtcgagggagcagaaggcgcggcggctgcgtggcgtgtacgacaagctcgctctcgagggcttctcttccgcgcaaatcgagcaggcgctctccgcgatacccgattcggcgacgtttgaatcggcgttggactggctatgttttaatctgcctggcgatgagctccccctcaagttctccagcgctggcgacagcaccatgtcgtctctcacaggagctgaaggttctgttaaagtactgtccacagccaaggacaattgggtgccacagagtcgtgaacctgaggaggtgaaggtgagcaccgaggggttggaagttagaattggtgggcggagagatgagaatgtgtcactggatgatgggcgattgtcacaagctgcatggattcgtcaatacatggaacaacaagaggaggaagaggatgcaaattccaatgattcctctacatgggaggatcactgcttacaaagttttgaagttgtcgaagcaaagccaagtaggcggaagagcaaggctgcaaaaaagaattccaagcatggaaacttgaaggaacagataagctatcctaccaattctgtatcttcaaattctgaaactgcaaatgttgagggtgttcagaatgatttagaggcaagtgaggaaagatctgagagtctaggcaatattgatgaaggatctgatttgaaaaaggaaattcctaaggatattgataaaacttgtgcaaaggaggtagacgaagaggtgatagagcttgataacatgttctttgaagactcatctgcttgggaagcagtggctccagaaatcttgaaacagcaacaaatagagaaattatcacatgatggttatggccatcttattggaaacatagatgatatatggaagaagggagattctggtaaaatgccgaaagctgttctacaaaagttttgtcaaaaacttggttgggaagcaccaaagtataataaaatatctgagagagatggcaaatttgtatattctgttaatgtgttgcggggagctactggccgtggtaagagtcggaaggctggaggcttgacgataatccagttacctaaactacatgaagaatatggatctgttcaggaagcacaaagtcgagttgcagcttttgctctatatcaattttttgctgaccttccactacgtcaactgcttactgagccatactcatcacttattttaagatggcaagaaggtgaattgtcatctacatcaagggtgctggttacggaggataggcgaagatctggctttgtagatatgttattgaatatagatgcagatacaattccttcatctgaaatagaaaattctgatactgatgtcatatctatggattctgggaatactgaaggcagcaaatctgtgaatgagaagagacagactaccatgacgagttgtatgggattgaaatcagcagagcgtgcagagagtgcaattttgaaaaagcagttggaagataaaaggaagctaccaaattacttgaaaatgctggaagcaagagcttctctaccaatagctagacagaggcaacacttcctacagttgctgaaagagaacgatgtagttgttgttagtggagaaactggatgtgggaaaacaactcaggtgccacagtttattttggatgacatgattgaatctgaacttggaggttcttgcaatatagtttgcacacagccccggcggatagcggctatttctgtggccgaaagagtatctgatgaaaggtgtgaaccatcacctggatcgaatgattcactggtcggataccaagttcgtctcgacagtgcacggaatgagaggacaaagcttttgttctgtactactggtatccttctcagaaagttatctggaaacagagacttaagtgatgttacccatgttgttgtggatgaagtacatgaacgtacaattttgagtgacttcctgcttattgttcttaagaatcttgttgagaaacgctccaatcaacaaggaaggaagttgaaagtgattctcatgtctgcaacggttgattcaagcctatttgcacgatattttggagaatgccccgtgatcagtgttgaaggaagaacacatccagtgtcaactcattttcttgaggatgtttatgagaaaatggagtactgtcttgcattggattctcctgcatcaggagcttactttgcgcagcatggggaaaagtggaagcatgctagcagctcagtgaacaaccgacgaggaaaaaagaaccttgtcttatcctcatggggtgatgagtcaacgctttccgaaggctatgttaaccctcactatatttctgattactataggtcatataatgagagaaccaaccaaaatctaaaacgcttgaatgaagatgtcatcgattttgatctattggaagacttgatatgctatattgatgagaactgtcctcagggtgctattcttgtttttcttcctggagttgcagagattgacttgttgattgatagattatctgctttagttagatttggaggggcatcatctgattggatccttcctttacattcactgcttggaccctctgatcaaaggaaagtgttccagtctccaccagataacttccgcaaggttattattgccacagacatagcagagaccagcattacaattgatgatgtagtatatgtagttgatactggaaagcacaaggagaaccgttataatccacacaagaaaatgtcaagcatagtagaagattggatttctcgtgcaaatgcaaaacagagacggggtagggctggtcgtgtgaagcctggtttatgtttctgtctgtatacaaggcatcggtttgaaaacgtcatgcgtccatttcaggtgcctgagatgttacggatgcctttgactgagctgtgcctgcaaataaaatcacttcatcttgatgacatcaaatccttcctgctaaaggcagtagagccccctaatgaagaagctatttcctctgcagttgacttgttatacaaggttggagcttttgaaggacatgaagagttgtcacctcttgggtatcatctggcgaaactgcctgttgatgttttgattggaaagatgatgctttatggtgctatctttggttgtttatcaccaattctgtccgttgctgctttcctgagttataaatctccatttctctctccaaaagatgagaagcaaaatgtggagaaagcaaaagccacattattgaatgagaaccttgatggatctagttctgtaacagataataaacaatccgatcacctgctaatggtaattgcatacgacaaatggtcccgcatactgctacagaatggtgataaatctgctcgtcagttttgccattcattctacttgaatagtactgtgatgcacatgatcagggacatgcgtcttcagtttggtaccttgttagcagacattggacttatagatcttcctaaagatactctgaggcacaaggtgggcagtagaaaaaataatctcgagagctggttttctaatatgtctcttccattcaatgcctatgctcgctgcacctcggttattaagtcggtgatgtgtgcaggtctataccctaatgtggcagcatctctagagggtgttgatcctggagctctaggtggaagaaagccatctgatgttctgttcagtaaggaccgtcctcgatggtatgatggaaggcgagaagttcatatacatccatcatctgttaatcacagcttgaaagctgttcaatatccatttttggtgtttcttgaaaaggttgagacaaccaaggtgttcttacgtgatactagcgtcgtttccccctactcacttcttttgtttggtggttccatggtaatccaacatcagtgtttgtccatgactccatgtgacttttctggtgacagtagagggtggtggaaacccttcaatgtgaaccttttttag

SEQ ID NO: 22678 - DNA, 5401 bp, Zea Mays
atgcatcttccatctccctagagcttgttgtgagggtggcacagtttgttgtgagggcgtgcagaggggtggcgcaggttgctgtgtgggcaggagagggggagcaggactcaccagagcttgctgtgagggcgtgcagaggaggggcgggcggcggccagaggggttggaggcggctagaggctcttctcagacttaaccagatgattacagattctcttgatccgagtaatggtagtggtatttgggaagatcctggaatcttgagattaaaccatgatgatgttcgtaccagaagatacgcaccatactttctctcgaatgacacatcattgccctttaggttcaaggtgtaccgaggtgctgttaattcagatgatattggcagtttctctgtaatagatgaaaactctgtgccggcggggtatgctgtcccaatttacgtcgaagaaactcctgatgaatttttcttccaacacagagaagcacgatcatcagaccatctcatcgagaaacgaatgagtgctctatcacactacatgatctccattgagtttgatggaacatcaggcccttcaaaaccaatgtcaatggaccttgtgggcatttacttctttgaagtaaatttctcttcaagtaaaaagccaattctcggcgaagaaagtttaggagcattttcgtctaatgcaaaaggcaacgatgggttaattgtgcctgtggtgctcgatgtttccttacagaactacagcaagcgtatacgagtttattcgacggtaatactatacaatgcaacatcaatgcccctcgagttgaggtttgatataccatttggtcttgcatcaaaggtaattgggcccattcctccaaacaaagagattccactgccggttcatttgtctgaagctggccagattaggtggcaccctgtcggcagaacatacttgtggagtgaaacccgctccttgtcaagtttgctttcacgtgaaaacagggttgggttcatgaaatcatctgtttgttatccttctcaccctagtaatgacccatttcgttgttgtgtatctgttgaagaatacaatgtcccttcatctgttagtaccaagaaaaaacagttgtgcagtgaaagattgaacacacaagtttctggaagttctactccaaatacttttaagcaaaatttgacaaggacacattttatacggcatgtcaagcttaataccccgcttctcataaagaactatctgcctgtttacatttccttggcaatagataatggtgggtctgcgcgggtaatttcgctaaaggaggtagggtctgcctctattttgtttgttgatccctccaatgatcttggaattacaattgatattcaagattataggtccttgaacataaagtttccccgggctgaatcattctcaactacagccaagttaaatggcttcaaattctccataactgagtcaattactttctactcaaatttgtctaattttcctcttaatgttatgctggaaaaatcaatggatgctcgttctggcgcaagagagttgtatctttctgttccattcttgttgtacaattgcacagatctattgcttactgtcactgaaagcagctctgagaggagtgggcctactcttgtgattccccctagttttgaattggatggatatgcaagacatatgcttgaaaagggtggtctttctcttgtcaatccttctgtacaatgctttacaggcaaaatgccccagatatatttgatggatggacactgctcttcttcagatataagttgtacacgtaacagtgagtctgtaaagaaagatttggacaacagtgttaaagcttatatgtttgctcctgatgggcacactccagcaactgaactttcagttaagttgaatgcttctccgcctaataatggaactgaaacaactcggcgaaattggtcaaatcccttcctccttgtccctgccagtggttcaacaaatgttactattcctcagtcatctacttctggtgccttcttagttgcagtggcatctatacctgtttcaacagaactttttggcaggacaagggctattgctttcaggccaagatacgtcatatgtaatgcatgcagcaatgatttgttctttcgacaaaaaggaacacggttttctaagcacttaagttctgggcaacactcttttcttcactggtctgatacagccagagatctgctggtatccattcggattgatggcccaggatggcaatggtcaggaagttttttccctgatcacctgggagatgctcaattgaaaatgcggaatagtgcctcaggtttatcatatatggttcgagttgaagtgcaaaatgccgatctagacttaaacagcaatagattttctggaaaaaataatatcaatactggtacagtactgattctgctttctgatgataagactggttttgtaccttacaggatcgacaatttttcaatggagaaactgcggatatatcaacagagatgtgaatctattgaaacaattgtttatccctacacatcctgtcaatatgcttgggatgagccttgctatcctcatcgccttactgttgagattcctggagaacggagtttgggtacattcaatctggacattctcaatgatgatgttcatgtgtcactaccatccacatccgagaaagctgcaagacaattctgcatctcaatacatgcggaaggagcaattaaggtgctaagtgttcttgattcaaattgccacaataaggaaacaaatgaaaaggattttctgggatcaaaggaacctaaagttgttgatcacaaactggagcttgatatgaattttgctgaggttatcaaattacacttaccattcatcgggatatctttaataagttcttgtccacaggaattgttgtttgcttctgccaaggagatgactgttgttgccatgcagagtttagatcagcagagatttacggttcagatacaatctatgcaaatcgataatcagttccctgatagcccacacccggtcatgttgtcatttgagggcagtcataagggaaaatccatgaacttttttaagagtaaagatactaagctgaaatcagcaaatgacattctttccagtaccagtgaacctgtgctgcagtttgctgcagctaaatggagaaccaaagatgtatcatttgtttcctatcaatatataaacataagtctagcacctcttcgccttgaacttgaagaacgacttgtcttgagcatgattgaattttttagatctgtttcctctcgaataaatattggacacttggagaaaagtattgagctaagtataggtggtgctacggacatgttaagagaatatgaaaaaatctcaaagaatatatcagacaagctcctggtgcaagacagtgaattgttgccttctgttgtcccagttggggctccatggcaacagatacaccttttagccagaaaacagaaaaaggtgtacattgaattgtttcagttgactcctgtcaagttgactttcagttttacgagcacaccttggctcaataggaatgaaggtggttcagaccccagcgtaggtttcaacaacgctactgcaatccagagaggtcttatggccctcttggacgttgaaggagtaccagtttaccttggagaaattatagtggaaaatcttatggccagctggcaatctgttcaggacattcttatgaggcattatagtaggcaaatcctccacgaactttataaggttttgggttctgctggcgttataggaaatcctatgggttttgctaggaatgttgggtttggtttaaaggacttcatatctgcttcaagaaaagggaaattgcagagcccagttgaactattaaacggtatagcacaaggttcaaagactcttattggaagtacggtttatgcagtcagcagtgccacttctcacttcagtaaaactgcttataagggccttgttgcctttacatatgatgagcaagctgcttcgaagatggaagaacgggaaagacagctaggtttgcatggggaaggagtactgaatggttttctagagggtctgactgggctccttcaatcaccgattaggggagctgagaaacatggtcttcccggggtcatctcaggtttagcaatgggaacagctgggcttgtggcacggcctatggctagcattcttgaagccacaggcagaactgcccagagcattagaaaccgaagcaaccctcacgaatccaactacttgcgagtacgtttccccaggcctgttgccagagatcgccctttgtttccctactcctgggaagaagccatcggtgaatcgttgcttgcccaagctgacagtggcagactaaaggaggagacatttgtcatgtgcaagacactcaagggggctgggaagttccttgtgctaactgagaagctgcttctgctagtctcaagcccatacttggtggatctaggatcgcctcggttcatcggtgttcctcctgacccgcagtggtcgatcgacacggagatgcacctcaagagcgttgttcatctggacaggtctcaggaggtagtgaacattgttgggagcaacggacagacctcacctagggacaaaagaggtggcacgagaaacagggtcatgagctcggccttcgtccccctgtttcacctcagcatagagctgccaaatgaggaggatgcagaagggacggtgcaggtcctacaggcactcatcgagaagggcaaggcacggaggtgggacaagaacatcctacaccggagcaacatcagttgaggttttcacaacagtagtagaggttggtgttttgattgaagtggaagataaactaaattccaccccgtgactcaggtggattaaatatacaaacaaggcctcaaggcagagcagtcaccagcatacataagcttagtgtgaataagaaaacaaagtgttccataggtggtcaccgttggacacgtgcttcggttttgttttaagcttagtgtgaataagaaaacaaagtgttccataggtgatcaccgttggacacgtgcttcggttttttttttttttttgcggtctaggtgtagcttctagaagttttgtcgacggctcttgtaaatgaagtgtgagagggcttatgttatgtgtagcaacaccactgttttatgccacggctatgtttacaaacttcgccgttcatgggccatggatatttctgatttcaccataatgaacttagcggaggtagggggtacgctgacaaacgtattgtcgagtagtcgaactgtcattaaaggttgtggatccaggatttaaatctaggatagtcaagaataaaaaatatgtaataccatgta

SEQ ID NO: 22679 - DNA, 2685 bp, Zea Mays
aaaaaattatcgccccatgcgcccggccaattttctagtatatggatagggtttagacttcacagttctcctgcctaccccgtccctccccaagcgcgccgtctagggtttcacagccgtgccccgatccattcgagcgccccgcaccgccgccatggagtttgacgaatacgagtacttggagaaggcggtagagcccgctcccccacaggccaatggttccggctccggctccggcgagaaggaccgcggctcgcgccgccgcgagggcggcgaggaccgcatatcgaagcgctctcgctcgggggaggaccgcgaccgggacaggcaccgcagcggccgggagcaccgtgaccgggacaaggatgacgtgaaggaggagaggagccgcgaaagccgcgggaaggacagggacagggaagggagagaacgggagaaggagaggggtgacaggcaccggctgagagagagggaagtggaacgggagcggaggagccggagccgctcggagcggcgccgtgccgaggaagaggagatggttagggagctggagcgggagcgcgagcgcagcgagcgacatcactatcgcgaccgtgatgtcagatatgatacgatagagccgtcttcagatggtatctgcaattgggcctgactcaagatatcaggcgtaggaaagatgacggggcagagccagaagttgatccagaaagggaccagaggactgtatttgccttccagctatctttgaaggcagacgagagagatgtttatgagttcttctcaagggctgggaaggttcgtgatgttcgtcttatcatggaccggaactcaagacgttctaaaggagttgggattgcacactgaaatttaataatttggtctacctgctgggattatcggcaatttacaagtttctaggcaataaagggggcacccaagaaccaagttcgaaaacctccactagttttgatcaaaatgcctgaagttttctgtgaaaatttgaaatatcttaacatatgatgccccacttattgtttttcttttcttttacaggaagacaactttttttggatgctttgatgattgtactaaacatatatctcaattcacaggtacattgagttttacgacgttatgtctgttccaatggcaattgctctgtctggtcaaccgctgcttggacaagcagtgatggttaaaccatctgaggctgaaaagaacttagttcagtcaaatgcgacatcaggtggtgcggcttcaggtggagcaagaaagttgtatgttggcaatcttcactcaaatattactgaagaccaattgagacaggtatttgaaccatttgggcaagtagagcttgtacagcttcctgtagatccaatgactggattgtgcaaaggttatggttttattcagtttgcacggcttgaagatgcaaaagctgcacagagcttgaatgggcagcttgatatcgctggcagagttattaaggtttcagctgttaccgatcatgtgggaatgcaagctagtggagcaactactggagatttagatgacgatgaaggtggaggcttggcactaaatgcaagttccagagctgctctaatgctcaaattggacaggagtggtactgcgaccagcttaactcgtggtattggtgctgctggtgtggctgtaccagctacttctgttattggggctccaggagctgcttctcttctaccaccaacagttgctgctgttggatcagttcctggggcacctgtgcttcctgttaccactcagaatgtgaccatgtctacacctacagaattcttgttgcttaaaaacatgtttgacccagcattggagacagatcctgattttgacttggatattcgagatgatgtccaagatgagtgttccaagtttggtgcagtgaagcatatttttgttgacaaaaatactgcaggctttgtgtatctgcagttcgatagcgtgactgcagcagcaaaggcccaaaatgcccttcacggaagatggttcgctgggaagatgattacagcgacatttatgtccgctctggagtacagtacgaagttcccaaacttgtgagcatatgccgggaagagttggccagacctgcatagttcgtttggagtattcgcaagtgctgtatcgttggatggtagacgaacaccttattgattgtatgacagggtagttgcagcaccgggcgtcactatcagtacaatgcttgatgtactttatttacggcgtcgcagtgaccaaaccttatttttgtccaccgaatgaaatgccctatcatctccaggcttgttggcatatggttgattttctggacgatcaccataacacatttttgtcagatttccaatgtgctttattttttattctcttatgtttcaggatgttttgatatgttcttgctttcaccaagaagtttgccatttcaatccgtttcattttattttattcgactgatacagtttattgtttttctgttctcttttagggctagtttgacatccacatttttccatgggatttctaatttttcaagggaaaatgaactaatttcttttgggaaaatgaaaaacacttggcgaaacgaggtttccaaactaggccttaacaagaaattcaccggcgaaggaaaacaacaacaagctccaaagaatgtgtctt

SEQ ID NO: 22680 - DNA, 633 bp, Zea Mays
agtacagacgtagatttccgacagcccaaacgttcaaacttcaaacaaacgagcgttttggaatctgtatcctgtgctgccttacatgtgtaggtacttgatgggattccttctcttgtaccaaaagatggaaagttactcgacgaccaagaagtgaaatcagaacaagagtccagcactagggattcttctggttgaatccttgtctatgcaacatctaattgaagcaatatgttgtagtaaatcgacggtaataaaaccaagtgcttcttgtcggaaatcgtcaccatattgccctagaggatgaggtgcaccgtttctgttgagaaggctaatatggttgtcttgaaagacaacaatgaaattggcaaacatagtttctgctttattttcttttactggaataactattctgttcatatactgcatctgatagtacaaaataatagttggactcataattcaaagttatcatgctctatatgtgttcttttagaaaaaaaaacagttggcttgcttttctttagagtagcaattagctgaacctgccaaaatatgtttttgttagccctgatttgggtggatttccccgaaccagccaatgatattatattggtaaaagtaaaaaataaa

SEQ ID NO: 22681 - DNA, 151 bp, Zea Mays
cgaagaagggcctgcagtcttttctggcacatcttgtaccttcgtctctattggggatattctgacaagctttcatttcttgggagccgaatccttcggctccgctagaactttttgcttcttgacaaccctctgatcttccttgacggac

SEQ ID NO: 22682 - DNA, 3052 bp, Zea Mays
acgtttcagcatccagtagctagagctgcaggctgcagccgtcagccgcacccgaggccgagagcccagagccgagaggcgagttgggcggctgtgctggccggccatggcgaagccaggcggcagcgatgagtcgtgggagtacagtctgcgcaagtatctcctgctgctggccacgctggtggccacggtgacgtacggtgcggggttcaaccccccaggcggcgtctggcagactgccgaccccgccgtcgaccgcatcgccggcgaccccatcatccgcgacacgaactacgcccgctacctgtccttcttctacagcaacgccaccgccttcgcctcgtcgctcgtggtcatcgtcctcgtcctcatcctgtccgtgctgcacgacaacgggggaatcaccatgctcgcgccgctgctcggcgtcctccgggccgtcatggtgctggacctgctcagcctcatgggcgcctacgcggcggggacgttccgggacacgctcacggcggtctactccctggtgctgtcggccggcgtcgtcgcctacctcgtggcccacctggccctggcctcgagggcgccggcggccgaggacaagagggggcagagcgcgccggagcggctccgcaaggtgctcatgctcctcgccacgttcgccgcgagcgtcacgtacgtcgccggcctcagcgcgccgggcggcttctgggaccactccgaggacggccaccgcccgggcgacgcgatcctcaagggagggccccacgacgcgcgcctcaaggccttcttcgtctgcaacaccacggcgttcgtcgcgtccctgctcatcctcgtcatgctcctggagaagaagctctgcttcagccagaagcaaattcgaccgaggggcaacaaacacgaactcaaggtcccctaacaaataatggcaatggcagtgatgagcgtcagcagactcaaggtccgcaaacaagcatggacagtaatgacagggatgagcagcagcaacaaacccacggtctgcaaactagtgatgacaatgtcagtgaccaccaccagcagcagcaacaaactcagagtcctcaaactagcaatggcaatggcaatgccagcgatgagcatgagaagcaacaaaatccagcgctggagaaggctcgctctcttgtcctgctgctcgctactctcgcagcggcaatcacctaccaagcgggcctgaacccgccgggtggcctctggcagagcaacggccgcctctacaagatcggtgatccgatcctcttgaccacgaaccccagacggtacaaggcattctactactgcaactccgtcgccttcgtcgcctccttggtcgccgttatgctggttaggaagaagacactgcaccaccacaacgcgctggaggccgccatggtactggacctgttcggcctcatcggcgcttacgccgccgggagctgccgggacgtcagcacgtccatctacgccatggcccttgcaggcgccgtgctggtctacgtggtcatccatgtcgtcttcttgacgctggacgaaaaggacggcagcagcgcgagaaggaatgatgacgcttccttcgaggagagagagaaaaaggaggcgggcctggtggagaagaggcgcaaacgactgctcctattcgccatcttggccgcgaccatcacctaccaagccgggctgacaccgccgggcggctttctggtccaggacgataaccgtaccggccgccatgccggcgacgcggtcctgctcaacaactacccgcgccgttacacggctttcttctactgcaactcggtgagcttcatgctgtccatcgccctcatcatcctcctcgtgaaccccaacctgtaccgccctgccattcggagcaatgcgctgtctgtctgcacggcggccgggttgattggaatcatgggcggctacgcggccggctgcacgcagcatctgaagacatccatctatatcttcgtgttggcggccgtggttctgtccactgtggtctttctggctgcggtgttccttgtgatccatctgagaaaaaaaagacgataatgctaacagcaccaacagagcagcagcaagagaggcacctggggaagaacaagaagccaatgctggtgctggggtgccaaatgccatggggggcgagcaaagaggtccccaaggagccaaagctcgccgaaaagaaaagagggcacacgccaagcgcaagtatctgatgctgcttggaatcctcgtggcgagcgtgacctaccaggccgggctggcgccgccgggcggggcgtggcagtccaacgacggcacccacaccgcgggcgaccctgtgatgcacgactaccggagggcccggtaccttgccttcttctacagcaactccacctccttcgtggcgtccgtggtcgtcgtcgtgcttctgctgccggagtcgctgcacaagaagtggtggtggctcggggtcatgaacgcgacgatcgtgctggacctgctgggcctcttgatcgcctatgccgccgggtccagcaggacgtggaagacttctgtggttgtttccgctctcgttctcgctgtgctcgcctatttcgccatacatgtgctgctgtcaagctgcgtcaggagagggaagaagacagcccccgactctccgtctccgccccaggaccaggagaacagagaggaaaacgaagcggcaacgaaagaggtcgagctccagggtccagcttgctgaaactggagtgtacagtgcggagctgaatgtgtgtgcagtccagtacttgtagatttttttttcacgaccgtgttgtcgcattttttttttttgtcaagaggtgtagtgtttttgttgatccacgtagcgggcgggaacgattgatgtgcaatcaagtgttagatgtaagtgtacaaacaagtctgcgtgcaagcgaggcttctctgtctttttagatcatgtagtcttcgcgtgggtcataaatgacttcacgggtttggaacagtcttactgaatatcagcgtacctgatgactggatattactgtacgag

SEQ ID NO: 22683 - DNA, 5044 bp, Zea Mays
cagttgatgaatttctataacggacgccattgcctacggttcggtcgggtatcccagttcgcgctgcgtgggtgcatgtgttcctatcagcaccacctggataacagcattcccctctctcctcagtggctctacgccaaacctgctgatggaaagatctcgctgcctcatgggtcctcccttgaacttgctgaaaaggaagtgaggatgttggaaggaactgttgacaggaaagaacgaaggagaaatgcatttgatgctgacagtggtcttcgttggcttgaagaggagagggagacaagcctgcttgggagaagggagcgcaagaaggatgtggaccgggatgtggataatcgcaagattgatcgccgatctgacaatgtttctgcaagggatatcactgatccgcgtgcagctcctgcatctgaaaggtggcatgatggttccacccgtggcctggggaacgagggtcgccgggatggaaaatggtcatcaagatggggacccgatgacaaggagaaggactctaggtcagacaagaaggttgatgcagagaaggatgaaacccatgctgataaactgacattcacaggaaggctgctgtctgagtctgattcccgtgataaatggaggcctcgtcaccggcaggaaagtcattctgtcggaacagctacgcaccgtgctgctccaggctttggatccgagaaaggacgtgttaaggactcaacaaatgttggttttgccgctggaagaggaaggggaaacccgaactcagttgcatccttcaaccggccatcatctgcaggatcaatcggtgctccagctgtgcatgggaaatttgcaaaaactgctgttagtttctgctacccaagagggaagcttcttgatatatacaggcagaaaaatatgatgtcgtcgtttgatgatgtccacatgaaactggacgaaattccttctgtgacactctctactgctgcaaaacctctagcatttgttgcaccagatactgttgaagaggctctcctggaagatattagaaagggtaaagtcattagcagtgaaggaatcaatgggattggaaacaaaaaggagagggcaaaagagctcgaagaacctgcttctggcattgatgatgacatgggcaaagccagttttgcaattgctgggttgggtcaagaagggtcgtcaggtttaatctcagtgaatgatgcctcctatgttgaagggacacttcctagtggtgtcagtacatctctgctgaagataagtctggaggaaaatgccatcagcaatcaacatgggattactgacacccaggaaggtttgaaaactgctgaaatcaaggaaaatgctgatcatgctcttggcactaagttacctgatgattcgaacaccctgtttgaggtaccatcctttgagcatcttcaagaacccactaggccataccaaagcaacaacatggatataaaagtgggtggccatgctaattatccagaagagttgacattatattatctggatccccaaggaggtgtgcagggtccatttctgggtgctgacataatctcttggtatgaagatggatacttcggtttggagttaccagtacgtctgtctcagtttccagatgatgttcctttccgtccacttgtcgaagtcatgccccaccttgcgcaaaagacgcaatcgcgtatacctctgccttgtgatggaaattctgagtctctggaatcatctcaaagtaaatttgaatccagtgtcccttctacttcctctgggaggactgaccaattttctatttgggattctgaaagcaatgctgttgatcctaaaagaggtgatcatgaagcatcaataccttctcgtagtggttggctgtcttcaccggaaacaggaaaggatatatcaaatactagtaatcgccagcaacacattcctgaatcagtgaatcaggatgctgaagaagtgttgtacactggtaggcctaacagcagcatgggtcaatccctacgagaccttgagaatgaccgtgcagatttccaatcgacaccacatgaccctcattctgtggctggagaagctaatttgctgcaacataatgtcccaagggacagtgatctgagtcctcttggcttactttggtctgagctggaaggacgtccaaaacaacctctctcatctaatgtacttagtgtaaatgaacgtagaaatcccaagcctacaacacccaaggacattccacctgtaaacatgagacaagggccacttagcagaatgaatgaagtttctagtgtgcgcgatgagtggcctgcaaactttggtcggctggacaacatgaatgatgcaaacatttctggcagaatccatcaggttgaagcggagcatcatttgaattttgatgggcacctgctgcttcaacagatccgacgggagcaacagcaacagcggcaggagcaattgatggcccataataatttagagttttctggtgcatttcccgggcaggtgtttgatcctttgaaccaacaccgacagcctatgaatcaacagattcctgatgtggagcatcttttgagaatccagtttgaacttgagcaacagcagcaacgccaactccaacaagagcagcaccaacggcagctacagcagcaacggcaagcccagcttttgcaacggcagcagcagcagcagcagcaacagcaacaacaaatgatccttgagcaattgttgcagcaacagctgcagggttcaaattttggcccaacaagtatggttgatcaagtcttacttcgtgaacatgtattaaatgaactgcaccagcagcctcaccatttgcaaaggcagcatgatgcagctattgaacagctcattcaagcaaaatttggtcatgggcttcatagggagcaccataatgatatgttggatgttctctcgcgttcaaatcagagacagatgcttcctttagagcagcaacttcttttaggccttcaacacgagcagcaacttaagtctcaacaattggcaaatgctctgcggcaacattcaggccaggaagaagaaaggcacttaagtggggtctggccaatggatgctgctgcccagtttatccgctcaggaaccagtccaaatcagatacacagtcgtttcgatctccttgagaaccttcagagatcgtcatcgtttgatcatcatgaacatctagaccgcagcttatccttacacgaacagttgcatatgggaggtcaaggtattcgctccctagagcggactggttctttgcctggtggtggtcctggaccaaacccagatgtcataaatgccctaacacgtcatcatggacttagtcagttggaaacacatggtgatgtataccctttagttcaaatgcctatgcttccttcaggtgttcatccccagcaacttaggcatcaggatcagcttcctggttctcacataggaaggcttgaaaggcactggtcggatgccaatggacagttacaaaacagtctaatggaatcttcacacatcaaccagttgcagattgaagcggagaaggagaggaggaatgtggaaatgaacctttctgttgacaatccacatgcatggggagcccttatgaataaagataggaatacagagcaagatttgactgatatgattcataaaaaacttgtccttcaatcacagcagtcccggggttttcctgatgtttctgttccggcatcatttcgacgtaaagatcactttgtgcaacctgttgtggagagccctctgagatcagtggacatgtcgtttgaggagtctctttctgaaaggtcactttatgcaaaatcagggcagttggcacaagaaggatcatctaatcttggtactttacccaacagtattgagaacactggaaaatttaaccttagatcaggatctggatcaatgcttgagcagaagcattttcttggaattgacgatgttcaaagtgactttctagagaccacaggtggtagaacatcagctaatcaactggttgggagtgtcaatgaattaacaaggggtaaaaggcagggttctagtgcgagtttggctggggatgatcctaatttggctgatgaaggtgttagtaaatggtctgattctggcatgtccaaaggaagctctcactccttactaaagcgctctacaaaccaacatactactacatctcagtctgttcccacagatctgtcagcaatcaggctgaagaaagcaggacttgcgtcctctgatgagaataagatggaagcaggatttgcctcagtagcccagggtatggaaggctgcgttcctagcaacaaagagacgggggcgtatggcatgccatcagccaccaacaatccagatgcctctggtcagtccttcagcgaagcgttgaagagctcgaggaagcctccgttgcagtacgatgcctccgaatctgcagactgtggcccaggtggtaagggcgcgaaaaagaaaacgaagaaaggaaagcagattgacccttctcttcttgggttcaaggtccacagtaaccggatcatgatgggcgagattgttcgagatgattagagtgtacatacgcggtaggaggtggccttagaagaatcaagattggctccaagccaaaccctaacctctgtacatgcccagccctggtgcccgctcacctcggcagaaattttgtgactgcatcttctcttagcctcttgctagctgtagtattgcccgatttctcagatttagaaaaaggagcctttcttatcggtgccccacagaagtgtcatagttttgttgatctgtgaagatatcgtagcactggagcatggaacgtttggtgtgctgttgtttcgctctgttttaataggggtaagggtctcacatgtaggagaggcctcctgctgctttggttggcattggacattgttcaactatcagatgtagaatgtcatcgcgatgtacaaacgtaataaacaaacttaggacgatcagtatcaactatatacaggcaaagagaaaaaaaacagtatcaact

SEQ ID NO: 22684 - DNA, 1409 bp, Zea Mays
tgtttttttttctttctgcaacttgcacttctcaaagctttatgctggaaacttctgcagaaaaacacacaacaataatggggcacgaccatatgtctcgtataaagatgcatatggcagaaggttcttttggtgacaggaaccggtgccagcaacctgggtgcaatgaggttgtcgatggaagggtagtgtactgcaaaactcacagcggagagttgtcatgccaacagttcagtcacctccagagcggactggagagctcagtaccatgcactgagcaagagttacatgtcaagcacgaaggggatgatcgaggcatgttttgcaagaacgatagctgcagcaagcaagcacatgagaactcaatctactgtaagttgcatagcggtgttagcaagggctgcatggtccgaggctgtacaagaggtgcacatggaggcacacctctgtgcattgggcatggaggcgggaaacggtgtgtgatccctggatgcccaaatgccgcgtgtggtcaaggcctcagtgaccgctgtgtgaggcatggtggtggcaggagatgtagattcgaagggtgtgcgaagggcgcacaggggaacaccgattactgcataaggcacggtgggggaaggcggtgcaagtttgaaggttgcacgaagagtgcgcagggacggacagatttctgcattaagcatggtggtggcagccggtgcaagttccaaggatgcggcacgagcgcaaaatggggaacagatttctgctctatccacaggaaggctttgttgggaggcgacaatgccgccgtccctgaagctttgcctgccgcttcagaaaaacgacgtcgtgccaagaagcccaagaaggcggcgaaactgtctgaggcctcccaagagaatgccacagcagcagcagctattgctggtaacagcactcaacatatgggcggtcttctcatagctatccctgttgctaaccgtgacatgttaaccaaagccgtggcagcgacggggcaagctgcaatagcctccgcacagatagtggcgccgctgtccatgaaatcgccgacgccatctggagcagcggcggctaccttgactgggagggaggcgggagcaagcagggagatgctgggtctgtagaaagatggtggcagtgcataattcgggaggcttggcgacaccccttgcccagatagttctctgattattgccttctttttagactgagaaaaacctcgaaactttaggagggttgtgcattttgacagactcgggccgtcgactgactctagtgatgttctgtgcctttctcgtttgtaaattgcaatgttctcgtgtattttctcttgtgaccatttggacagtaagcaataatattggtgttctaatctcagaccattatttgtgaaatat

SEQ ID NO: 22685 - DNA, 1733 bp, Zea Mays
tttctcttagttcagcttccatatgatgcttgtgtatgagtacgtgaacaatggaaatttagaacagtggcttcatggtgccatgcgtcagcatggtgttcttacttgggaagcccggatgaaaatcattcttggaattgctaaggcgcttgcttatttacatgaagccatagaaccaaaagttgtgcaccgtgatatcaaatctagcaatatcctagttgatgaagaattcaatggcaagctttctgattttggattggccaagctcttgggtgcagggaagagtcatatcacaactcgagttatgggaactttcgggtatgtggcccctgaatatgccaacactggtctgttaaatgagaggagtgatgtctacagttttggagtgctactactggaatcagttactgggagggacccagttgactatggtcggccagctaatgaggtacatctggtcgagtggctcaaaatgatggttggcacgagaagagctgaggaggtggtggatcctgacatggagttgaaacctgccactcgggctctgaagcgtgcccttctagtggcactgcggtgtgttgatccggactctgagaaaagacccactatggggcaggttgtccggatgctcgaggcagaagatgtcccgtcacgggaggaccgccggagccggaggggccacagcggtaacgcagacagcgagtctaaggcaagctcaagtgagttcgagataagcagtgatcgaagagagttggggccgtccgcgaggttccagtcctaacccctgacgagaactcggttttggactagcgatgaacatcagatgagcggtgtgtgtgggggggggggggggggggctggttggtaggaggtaggaaggccattgcatttcattttcgcgaggacatttgcattttgtactgtgtagagatcggaagggcattgcatttctggaggggtaggcattatcctttggtagtaggcagcttagaatgcagagggagatgactccccctgagacgaaagattcagacttgctgtcgtgaatcttggtgttctgttggtgcggacggcagcagcttcagcttgtacagacatttctttctctgtcgtttggttattaggacttgttgggtagtaggaacattaaggtctctttcgtaatgtgatgaatgacttgaaccatcaacctcttgtaatcttcttagtccattggccaagctagagttctgtgaagctccatcttcagcatgggaatctcaccgattcagatcgagctgatgctgtttcctgtgatatttctgaagatgttccaagcagggtggtaatttcctgtgacaattggaaagatgtagacgatcgctggctcattggttctaatcaatgggatgaatgtcaaatgcgaataaatcaaaatccgaggtacacagaagagctccggcgacggggaaagggcccgggagctccaaaggcttggcgatggcccggcggttgcgagcacaaagagaagcgcacggaggagggaggtgctagtactacgcatggcaaattgattctttgtaatgtttggcgtggagttgtaagagcatcggaggagggaggtgctagtactacgcatggcaaattgattctttgtaatgtttggcgtggagttgtaagagcatctgtaagagactagacaaatggttcatcaagttaaattttgactaatcaatagcaaaataattctccaa

SEQ ID NO: 22686 - DNA, 265 bp, Zea Mays
tactttgggttgtagcaaacggaaaagtgacaatccattctgtgttttcatgaaccaaaccaggaagcatgtaggaatggaaaggaaaaagatacataccatatgaaaatcaattgcaaatgtatataggatttttgatcttgatgcatatctcaatgcgaaaatccaatcaattgatgagatacataccatatgaaaatcgggatgtaagaacaaatgtgattgagaaaagaggcttaaaggaccacttagccttgaaaaagca

SEQ ID NO: 22687 - DNA, 1313 bp, Zea Mays
ggttggttgctcggttgatagatatcttcgatattgggagttgggagtttttacaatggcattggatggtccatattgggtaaacttcctggattgggagcacgttttgggacctatgaacttttaacagccttctataaagatggaagggaggacaactatgtctattattctgaggctatgaaggctggcatagctgctggtgctgtagaggctgttttctgcacaccatttgaacttttcaaacttcgaaaccaacacccatggatgcttacgggctctgggaaacccccattaccgtctgatgtgcatctaccttctagagtgatattgcttgaaggatggggtgctctttggagagggctcagatcagggatagctcgagactgtgtatttggtggtatgttcttttctacttggcaattcctacacacagtgatgctcacctggaaggcagttaatatgagccctaaacctagaaatctagaagcagcaggacctgtacccccttttgcctctagtgttgctgcaggctttgcaggagcgatagcagctgctgcttcacatacatttgatactgctaaaagtcgttcagagtgtactgtggtgcctaagtatatcgcaatggagaggaagtttcttaagtggaaagcaccaggaacgtggatagagaggaagacaggaatatcccctgctgataggaatgttttgttccgtggcattggcctacgaaccgcccgtagtggaatcgcatcatttgtgttagtcggctcatactatttagctgtgaatcacctctcgtagttgatcaagagaaatcatatggagatttttttttgcattcagaagttcaaaactaaaattttatgactgtatatgcatgcactgaatggctggaagctgactttgccacagtatccactgattatttgaaaatcctgttcacctaagtgctcagatgaaactgattgtcccacggcatgttttaaggtgccgatgtaaatgttttatggcaaaaaaaaatttgaaggctgccactttcgatcagaggctagtttacagttctacataaattgctgaaaatctgtttttgacaaaatgcaagcatcaagatgcacaatgatcaaggaaccctttgacatagcatttcccttgtcagaagaagaatcgcctgtacaaagctcttcagattgtcttcaggccttgcgtaaatttgtgaacatgtatttttgtttgaaaatactttgtacacttcattcattacacatcagctcttgacatggcagatcttggtccttcctttctctccagag

SEQ ID NO: 22688 - DNA, 2645 bp, Zea Mays
atcgatttgttggagaatactgcatccctatctatctatctaggcctagcacagctatatcctgggttacgttcctcgcacggcggaggcaaacaaaccctagccgccaggcgcaggcggtcagggagcgagtaccgagcgccccagttcacacggtttatatcctaatctacgcagtcaatcctccttagcggtttcgttaatttgtttgtttccagcggccgttgcttcggtgattttgcttagctacgctttggaccggcgttccttcgctgctagctagtaccttttggaagtcaaggagtgctgtctttcgcctgatctacctagacgccttttcttgaatcagcgacttctattttggttaattagcaccggtagcccccctgctctcttgaggttcgacacgtatggtcttcaaagttctctggttgctttctctgtgtactctatgtttgtctagtgcagtaatgtgttctattttctttggccatgcccatctgaataatggtactagctgtgctcgagtctgagctgtagtgtttagtcactgagaggcaacatgaagaggccttgtaatctgaagctatctgatgttgatacatacattcattgtcttcaaagttctctgattgctttctttgtgtaccttgtacctgcatatccgattgacgtttgtctagtgcactagtgttctattttctttgactgtgctatctgaatattggtactagttgtgcttgagtctgaactgtagtgtttagtcaccgagaagcaaaatgaagaggtcttgtaatctgaagctatctgatgttcatacatacaatcatggtcttcaaagttctctgattgctttctgtgtaccctgtatctgccatacgcgattgatgtttgtctagtgcagtagtgttctattttctttggctatgccatctgaatattggtagtacatgtgcttgagtctgaattgttgtgtttagtcaccgagaagcaaaatgaagaggtgttgtaatctgaactatctgatgttgatacatacattcatggtcttcaaagttctctgattgctgtctctgtgtaccctgtatctgccatacacgattgatgtttgtctagtgcagtagtgttctattttctttggctatgccatctgaatattggtagtacttgtgcttgagtctgaattgttgtgtttagtcacctagaagcaaaatgaagaggtgttgtaatctgaactatctgatgttgatacatacattcatggtcttcaaagttttctgattgctttctctatgtaccctgtacctgtcatatccgtttgccatttgtctagtgcagtagtgttctattttctttgactatgccatctgtatattggtactagttgtgcttcagtctgaactgtagtgtttagtcattgagaagcaaaatgaagaggttttgtaatctgaaactatctgatgttgatacatacattcatggtcatggtcttcaaagttctctgattactttctctatgtatcctatacctgttatatccgttcgcagtttgtctagtgcagtagtgttctaatttctttgactacatctgaatattggtactagttgtggttgagtctgaactgtagtgtttagtcactgagaagcaacatgaagaggccttgtaatctgaagatatctgatgttgatacatacattcatggtcttcaaaatacctatgtctccgtatctaaatgattctagtgtatgttctgtttcttttctgcctgaagctatagatttagattagttttgtatgtcaagaagctaaatgaggaggtcatatgatctgaattgtctgatattcattcatcatccatgatctaatccattacaagtgtagtatacatgtatcatgcctacagacctttttttctgtttcaaagtgatggtgtacatgttgctttgcttttgttgagctaactttgttggatccttttgttgcagtgagatgtcagaatacaagaacgtcgttggggggaggctaaagctgaagggtaaggcactggatgtgaaggaaggtggagtcaagaagaaaaaaaagaagcatcagcttgaagagtcgtctcagattgagcacgatgagctccacaaagggggaaactctggcttaccagctgatcacaacaatgagcttattgaagctggcaaggtgggagatgaagaaaggaatctacatccagactacgaccacctcacaccggcggagcgacgctatatagatcagaagcagaagatcgacatgcaaaagctggccaaagttgctaacaagtcacacagggaccgtatccaggacttcaaccagtatctggcgaacctcagcgagcactatgacatccctaaagttggccctggctaacaaacatagccaaactgctgtgtacgcacaaacaattgtatgctcggtgggcttcaagaacattaaaaatatataaatgtatgttgggtgattgggtctatccagctttttgttagcatgttatatatatcctagtattttccacttttcttttaaaaaacataattgatactcttatgtgtattgatttgaattgaattacgtctgcatatgttcaatttgaaagtagcaagactcaatttgcctt

SEQ ID NO: 22689 - DNA, 1469 bp, Zea Mays
tgcagcctctcctcagtgcggggggtaaaacatctggttcaactggaacttcatcttcccagcactcaaacactcctgcaacaaggcaggcacctcctctagaggccccacaacaagctcctcaacccccggtggcaccaattacaacttctcagcctgaaggacttcctgcacaggcacctaacacacatgacaatgcggcatcaaatcttctgtctggaaggaatgttgacacaataattaaccagctaatggagatgggtgggggcagttgggacaaagataaagtccaaagggctctccgtgccgcttacaacaaccccgaacgtgctgttgaatacctctactctggtattccagtaacagctgaaattgctgttccaattggtggtcaaggggcaaacacaactgatcgagctcctactggggaagctggtctctctgggattccaaacaccgctccactagatcttttcccgcagcagggggcttccaatgctggaggtggtgctggtggtggaccacttgattttcttagaaacaatccacagtttcaagcagttagggaaatggtccatacaaatccacaaattttgcagcctatgctcgttgagttgagcaagcagaatcctcaaattctaaggttgattgaggagaatcatgatgagtttcttcagttactaaatgagccctttgaaggcggagagggggatttcttagaccaacctgaggaggatgaaatgcctcatgccattagtgttacaccagaggagcaggaggccattggacggcttgagtccatggggttcgacagagcacgcgttattgaagcattcttagcctgcgataggaacgaggagctagcagcaaactatctccttgagcatgctggtgaggaagattaagcgggagtagttttcatacgtaccgagtgacgaagagttgatatggagctgacgatcatttgaattgatttcgttgtgcaagacttgtattacataaacatttaaatacatgtagctgaacatttcagtagaaatgctacggttgtggtctcccatcgttgactttcattagcgtggtggtaaacatcggttctgctcctgtcctgtattaacacaagcttggcttgggaggaagcacaaggagctattgccacctagcaaaaggataaaagggaggatgacgaattggcgatgtgtttgcgacacgctgccctcaagtgtggatgatgagtgcagataggttgatgactgtgccaaggctgtcaagtgtgtaaacgaacgctgccttcgtagttctgacaactgcgacagttctgtagctagacctatttgctatcttcatgataaaattatctaaatgggacggtccttgaccgattaattgcacgatctaaggtgagaaaaagtacataatcgcttggattgcgtcaggtatgaaaacgctttgcatcccatttcacaggg

SEQ ID NO: 22690 - DNA, 1905 bp, Zea Mays
gggaatacgaaaaacagaaggccaagggctctctctctctctctctctctctctatacccgtaggcgtagctttccttctccaccttctccttcttcttcttcggctgcctatatataagtgctacatgcgtatgcagtgttcctcgcccggtttatttgccgatggactcttggtggtgagcagcgagcgagagatagagagggtgaaactacatatgcatatacaaatacatgtagctagcggcgtagtactggatactgtgccatacggagtatagtatatatactcgctgtattagcagtagaggcggccgtgcagcgatcggtcgacgatggttgttgccgccatgagagacgagggagaggagggacgacgacgggcggtggtggcgatacgggactacgatcccaagacggaccgcgacggcacggaggccgtcgagcgggagtgcgaggtcggcccggccgccgccgccggcgggatgtcgctgcacgccgacctgctcggcgaccccgtcgcgcgcatccgccactcgccgcactacctcatgctggtagctgagacgtccgggccggacggccggatcgtcgccctcgtccggggaaccgtcaagtctgtcgcctccggcaagagccgccctggcgcgcccgccttcgccagagtcggctacattcttggcctccgcgtcgcgccttcccacaggcggatgggcatcgcgcggcagctggtgcatcggctggagcagtggttcgagctgatgggcgccgagtacgcgtacatggccaccgacaggtccaacgaggcgtcgctgcggctcttcaccggccgctgcggctactccaagttccggacgccgtcgctgctggtgcacccggtgcactcgcaccgcctcaggccgcccccgcgcgccacggtggtccgcctgggcgcccgcgacgccgagcggctgtaccgcagccggctcgcgcacgtcgagttcttccccgccgacatcggcgccgtcctgggcaacgcgctctcccgcggcacgttcctggccaccgtgggcggctacgagtggggcggcgtcgaccgcttcctggcgtgcccgccggcgtcgtgggccgtggccagcgcgtgggactgcggcggcgtgttccggctccaggtgcgcggcgcgtcgcgcctgcgccgcgccgccgcggccgccacccgcgcgctggaccgcgccgccaagtggctgcgcgtgccgtccgtgcccgacttcttccgccccttcgcgggctggttcgtctacggcctcgccgggagcggcggccgcgacgccgcgatggccgccgaggcggtcttcgcgtccatcgtcaacatggcgcgcggcagggcggccgccgtggcggtggaggttgcggccatggaccccctccgcgggcgcatcccgcactggcgccgactgtcgtgcaccgaggacctgtggtgcatgaagcggctcggcgctggtggtggcggccacgcggacggatgggactgggccaggtcggcccctggtcgatccatcttcgtggaccctagggaggtgtgagggtgactcggcggccgcttcagagcagagctctagtgctctgtttttctttctttcttttttgccactgagcttcattctctctttttttttcccctaacacttccaaattttgcgacccttcagttttgttctggttctggtagacgagatactgtcttttttcttttgtagaatcaccagggagtacgacgatggaaaatctatgatgtagatacatttcccttgactcttgtcattgtccgccgtgttctatgcatcatgtacgcaccatgtcaagtgtgcggttgcaaggcgatcgttcttgtccagccacacgtacacggacggaatagtatcgttgag

SEQ ID NO: 22691 - DNA, 1356 bp, Zea Mays
ccgactcgacccttctcctctccgtcgcatttcccgtccggtctttccgttacccggcggctttaaaccctagttcccattccatcttcgtttccgctccgccgccgtcgatggagttctggggtctcgaggtcaaacctggatccactgtcaagtgtgagcctggacatggctttatcctgcacgtttcccaggctgcccttggggaatcaaagaaaagtgacagtgccttaatgtatgtcaaagttgatgacaagaagcttgccattggaacgctctctatcgacaaatacccacagatacaattcgatttggttttcaataaagagtttgagctgtcacacacatcgaaaactaccagtgtatttttctctggttacaaggttgagcagccaattgagggagatgaaatggatcttgattctgaggatgaagaggaggagctaaacattccagtaatcaaggaaaatgctgatgggaaggaggagcagaaaaatcaagagaaggcagtagctgctacagcttcaaaatcaagtcttggccttgaaaagaaaagcaaggatgactctgatgattctgatgaggatgagtctgatgattctgatgaggatgattctgatgattctgatgaaggcgagggattatctcctgacgaaggcgatgatgattcaagtgatgaggatgataccagtgatgatgacgaggaagaaaccccaactcctaaaaagaggcaggcaagaagagaggtgctgaaaatgctctgaaaacgcctctttctgataagaaagcaaaggttgccacaccgccagcccagaaaacaggtggcaagaagggtgccacccatgtggcaactccacacccagcaaaaggcaagacccctgcaaacaatgacaaatcaacggagaagtctccaaaatctggtgggtcagtcccttgcaaatcatgcagcaagacattcaatagtgagatggctctgcaggctcactccaaggcgaagcatggggccaaatgagttgcaggtccaactgagtccatgaaggagaagcatggtggccaagtgagtcgaaggtccattcgagtccatgaaggtgaagcatgggagatccaagcgagtctggaaagattgtcgatgttagtaggctgtccttattttgtttagagacttgtggctatgtgattgatgtagcgaaacaaggctgtgatgtgttaactctgccttataatattttggttgaacgtgctcgattgttgtgctttgaattggtgctttttttttgctatatggtgaggtctcgtatggattcttatgcggtagtggcactgtagtttgtcgcactggttttgtttgaacctgtg

SEQ ID NO: 22692 - DNA, 3437 bp, Zea Mays
ggagactggagttcacaactgttttcgctgtttctctctcccgtagcccagtttacctcgcctagggcgaccaccgccgccgccctacgccagctgcccaggtcttgggcggaccctttgccggcgacgagcacccaccacaccagatcaaactctagatattgccactctacgtcccagcatcctatgaccacatggtttagacagtgctgtccaggtggatgatgaattgtggtgcccaaacggaggcacgtggcacgcctcttgaagataggcactggttggaaacagattttgttggcgctccaagagttcatacttatgtactttcctttctcaaatcataacaaatcttaggcagttcaagcttagctgaatgtcaacttgcctccacgtgcaagatcccagaaacattgctatgtctcgtccgcttgattttgctgtgcttaaatacaaaaaccaaaagcttgcggaacaactggaagtccacaaatttgagttctgtgctcttgagagtagatttaatgatctaaaagagaaacaaaggacacataataagacacttgttctagtcaaaagttattgggagcgactcatagcagatctgggtatagtttctgtttgcaaaaatgaatcttcacgttcaagctgcagtacagggaacaacaatatacgaaaggaaacagactttttaaatggacttttggaggctggtgccacagaaagttcaggttctcccaattgccaactaggaaatgacgtctcttcagaacaatcaacaacaattgatattctgcagaagctattccttccatcaagtggtccatggcatgtgaataacgagtttgtttctgctgctctcatgaagttgccagaaaatgaacacagcaggcaattgcacaatgctaccagcgatgtgttatccaagcttcatgtggtgatgcgtacagtagataatcttcacttgaaacacaggcagttagcagcgaactatcaaaaacaaagagattcgagtgcctggaacagagctgaacagaaacgtctgaaagaggagttgactagtgttgttgccaagttggaaggaagcaaacaaaaactggcagtactgaaagcacagggagacaataaacaagcaacaccgatcctggttcctacgctgggaaacaaaaatatgactgcagaaaaggtgagagataaacaaacagaactgcaagatcttgaagctactcacaaggagttaatggaattgatttcaaagcgtctggaggaaattagaaggctgcatacagagagaattgaaattttgaacaagttagcaacttttcagaatatactaacggatttcaaaagcattcactcttccaaagcttttcaacttgtcaatgaccaacttcagaagtcacaagcagaactggatgatcaccaaacgttgttagagaaattacaggttgagatggatacctttgtttggcgagaaaggcaatttaatcaaaaagttgatttggctgaaatcccccagaaggtttctgcatactgtgtgtctagaattgctgaccttgaaaaggatgtccagaaactgtgtaatgaaaagaatatgcttgtgctgaaacttgaagaggcttcgagagaacctggtcggaaccaggttatctcagagtttaaagctctggtgtcatcactaccgagggaaatgggtgccgtgcaaagtgaactgtccaaacacaaggatgcttccttacagttgcattctttgcgagcagaagttcattcactttctagtatccaaaccagaaaggaacaagaaattgaagaaatgtcatttagatctgcccatgctggatctgatataagccaacttcaatctctggtccgtgagctgagggaaaatacacaggagcttaagctatttgtggagttgtataagcatgagtccactgattccagacagctgatggaatcgagagatagggaactcgctgaatgggctcgagttcacattctcaaatattctcttagtgaaagtaaattagagcaacgtgtaatttcagccaatgaagctgaagcaatctctcagcagaggttggcaactgctgaagctgagattgctgaattagggcagaagctagaaacttctaggagagatctagtgaaacaatctgatatactgaagtctaaacatgaagaatgtgaagcgtatgttgtggagatcgagagcattggccatgcctatgaagatataatgtcacaaaatcaacaattgctacagcagattattgaaagagatgatcataataccaagcttttcatggagggtgttaaatcaaaacagtcacacgatgctttgcatttggaggtgcgctcgttgcaaagaaatttgcagcatgcaagtactttgatggatttgtgcaaccagaaaactatccgcctagaggaccagctaagaggttggtcagagcggttgaggagactgtcagaggatggaatgcagcagtctatttcattgggcaattatcaaaaaaagctgtctggtatgcatggagaagctccaaagctcaggcagtcaatggatgttctacaagcgaaggctgggagcaatcggctggaaattgctgagctgcttatagaactagagaatgagaggtttggtaaaaagagactagaggatgatcttgatctaatgtcaagtaaagctaattctctaagagagaagacagataattcagcagttcttcagaaacttctccatgaggccaaggagtacaggggaatattgaagtgtggtatttgtcatgataggcagaaagaggttgtgattgccaaatgctaccatctcttctgcagtcagtgcatacagaagccacttgggagccgtcagaagaggtgtccatcttgtggactaagcttcggtgttaatgatgtgaaacctatctacatatgaaacagaaggttggcgcctgtgtcgcagcaccaaaacaaaactgcttggcgcttactaatttccggtatatggtaggcggccatggtaattcagtcggtgatgtagcataagattatgtagcatttaagttgctacatgtgattgctggtacccgctggcatatatgatgctggtgttacctcaagcgccttttgtaaagtctgcttgccttgcccaatctggtagaatagcctgacatcgtcaaccattagttccttttaggagaaaaaaatatccaacaaatgaggattgatgcttcctgcaatagtgagcaatgtacaatatatagctttagtcagtttcattgttgtagctgacagtaagaatgtagttttcttttctttttaatataccggttatccagtttgtatgtttctggagtttgccaattctgtttatcaaaaaaaggagatttagtcatttctaaccatttttttcttgtcacgatatccaaaattac

SEQ ID NO: 22693 - DNA, 923 bp, Zea Mays
cttggatgatttggaagcatcacaatagagtcattttttatggagggtctcccagccttcctctgattatggagcatgcagatgaggaaagaagctaggaaattgctggagtcaaaggtctttccttcttggctgaccccctgcataggcactcgatctgcaattggacacagattatgggaaagttcgtagcatacctcacaccgtatctactccatttgcagttagtgcatcgagaggagtagcctgtgtcttttcatcccggaggcatgccttggtttatatccttgatgaggatgaggaagcggagggggatgaaacttccgatatggagtgattattatccgattccttcaccttcggctcagccatttcagcttcaggcttcagcattgtcttatgtcttgttgcaatggaggcagaggcccggagatatcaatatgtacggaaacgtcgtctcattttcacggcaatgcatgcccgggttcagaagctacgtcgcgtggtaacagcctaacaggtcaccacgcacgcgcagccgcttttagagctcatgaaattgtcagtcgtcaccctgatgtgtgtaggccctgcaggttggacttcatcgtggttatttggaaagcgagcaaaattgtacacccatttctgatcgtgttgtgttatacgagtgcttgctagttgtgtaaaaaatctagaggtaacgtcaacgtgcaaaaaaaaagggtctgtcgcaaatcttgacggtcactagagctatcgcatttctaatcgtgtttgtgttatgtggattcattattttattgttcgagctgctaatgtacttggtaaaatacattgttgactgaactcgtgttgcgccttcaactcatgtttcctttcatcaaaccataggcatatctaagaacaagaaaacatgcctc

SEQ ID NO: 22694 - DNA, 1682 bp, Zea Mays
ctgccacgaaatggacacacgcgcgcacgtaaaaacgaaaaaaggtccccggccgagaccgagagccgcggtccagagcggggggcggccggcaaggacgaaacggcccaacgccaccacctccaccacctcgtcctcgatcgacacctcccccgtcgccgtcccgtgactccccgtccagccgtccaggcccagctgcccccgcgacccagacgaccacgtccgcctcggcctgcgcctccccgctacaagagtccgtccgcccgccagcgctgcggtgccagcgagcccctccctcctccactctctgcggcgcggagatcccgtcctttctctgtgcccccggtaccgcgaggagccactgccaggcgccggcgtttttggaactgggcatggaggcggcggcggcgtcggcggcggcggtcgggggttcgggcgctggactgaccaggtggcaggcggcggcgcttgcggcgctggccggctgggtgtgggcggcctccttctacgacctcacgcgccgggcgcgcgcgctcgtccagccgtgggtcacgcgccgggtgcacgccgagacgccggccatcctcagaagttggagcacaagttgctggacaatttcttctctgtgctgtcatgtgttgtctccgtgcccttctacacgggattcctccctctcctgttctggagtggacacggcaggctggctaggcagatgaccctcctcatggctttctgtgactacctcggcaactctgtcaaggatatggtgtcagcccctcggccatgctctccacccattagaagagtgacggctacagaagatgagaaggaaaatgccatggaatatgggctaccgtcatcgcatgctctcaacactgtttgtttgacgggatatttgttacattatgtcctcacatacggagaacatggcagtcttacagttgctgcgggtttatctctagctctcttacttgttatgctagttggcattgcgaggatatatctgggtatgcacagcttgaccgacgttgtcgctggaattggtttcggcatcgtcatcctcgcattctggctggctgttcatgaccatgtcgacgcctttgttgtctccgggcaaaacgttgcaaccttctgggcaggccttgctctactgatgtgctttgcgtatcccaagccagaattccctaccccgagctttgaattccacacagcattcaacggggtcgctttcggaatcgtgtacggcatccagcaaacctacttccacttccacgcccccgacgcgccgatcgtcttcagcgccgagctgcccttcctcgcgttcgcggggcgcgtcctcgtcgggatcccgaccatcctggccgtgaaatcgtgcagcaaggcgctctccaggtggctgctgcccgtgatgtgcagcaccctgggcatccccatcgtgtcgtcctgctacgtccccgccctgaaaatcgacggcggcagcagcaagagcaggcaggccgccggcgggcacctccagcgccttctctctcacttcccccagaaggcgtacgacgtggacaccggcatcaggttcgtccagtacgccagcctcgcgtggtccgtggttgacttggtgccggccatcttcgcccatttggatttgtagccagctacttaaaatttcagtttcgtttttttttttt

SEQ ID NO: 22695 - DNA, 2490 bp, Zea Mays
aaaaaagaagaggaaatggatgattactgctctcaggatgaattgcgtcagaaaaaagaagaggaaatggatgattactgctctcaggttccagttggtcatctggtattcatggttcatggcattggacagaggctggagaaagctaatcttgttgatgatgttgttgatttccgtcgtgtaactgctaacctagctgaaagatacttaacttcgtatcaaagaagtacccagagggttctatttataccctgtcagtggaggaagggcttgaagctcagtggtgaaagtactgttgagaaactcactttggatggagttaagggccttcgagtcgcattaggtgccacagttcatgatgttttatattatatgagtcctatctactgtcagcatattattgactcggtctcgaaccagttgaacaaactgtacatgaaatttctaaagagaaatcctggttacagtggaaaggtttcattgtatggccactcgttaggaagtgttttgtcgtatgatatactttgtcatcaagaatccctttgggccccatttccaacagagtatctgaacatggaaacatctgatcgaaatcaaggagcaaaatcagccaatgaagctgatctgcatgattcaggcgcaaaggatcatgatacttctagtctagggtattcttgtgctgataatgaaaacagtgtcattgatgaagatagcaccagaactgacgtgtcatgtatggacagcatcctcccatcatgtgtgcttgaggattcaccaaataaccatgacactgtcgtgcctcgtggtgcggttgttgctgatcaaaatggagaagaaaagaaggttgagaattatcagtcggtgtatgctgaggaaggaacaacttcaggtgtaatcacaaaaaaggctgaaggatcaagcatttcaagatctgctaaggaagtccatgaagaggtcctcgacaaagaaaaattgatggtccttgccaaagacaaattgatcctttcactagaagaagaggtgaaatgtcttaaagctaaactagatcagcttgaacaacataatcatctagtgactgaaaacaccagtggtgttgagtatcatgaagggcaaaattataatcatgccttgaactctggcaaacttttcgtggcacaagaaagtacaaaccagtcctactcaccgcaaatcaaatacacgaaactaaactttaaggttgatacattctttgctgttggatctcccttgggtgtcttcctttccctgcgtaatgtccgtattggtattggcaaaggacaagactattggcaagataagaacgtaattgaagagatgccatgctgccggcagatgttcaatatttttcatccttttgaccctgtagcatacagaattgaaccacttgtatgtgaagattatctaaagaagcgtcctgtaattgttccctaccatagaggcggaaagaggatacatgttggagtgcaggagttcagagaagatatttctgcacgttctcaagcaattgcccgtcaattgaagtcactgaaggtcaaagcagtagctgctatactagcattgagcagaaatgacacagaagaggatggtgagagtgctaatgagaaagaaaaatcatatggttccattatgatggaaaggttgaccagttcaccgaatggtcgaattgatcatgtgcttcaggagaaaacatttcagcatccatatctatctgctttgggagctcataccaactattggcgagatcatgatactgctctcttcattctcaaacatttgtatcgtgatatacccgaggatcctccaagcgatgtcattgaaaggatgcctattaaactattttatgagagagatccagttgaggaagaaacgcctgtgacgttttcagatcatgcagcaattaaggaattctgcagaaaggtgaaagcttactcaagaaaaatggaggatgatgccaactgccaagcctcgtgatggatttttagtctctcgttacggcctcacacgttcctgggcaagcagaagcaagatgcagacatgggaaggaagaacgaatcgtgatcccaagaaaagaatccacgagatgcagttccacgcttcacgccagaatcagagcacttggagaatgttgtacggagtagagtcggttgccttgctcgttcctacatttataatgcagtgttgtacatagaacgtccgactgtagttttgtgcatcttgaacgtaatgttatgctgcctgctttaaatgctacagaatatatttttgcttttgcatccctagtgtgcgtcaattgcaaagtggttagctcctacttatttagcatgtcttttcattatgtctatcatgggcaaaagtactacataaaaaaggactcgcttagggcccggttgattttttttttttgaaagtttaggtattacaaagacctagttttatagctaaagcgatgcaaaaccaccgtgatttcaaaag

SEQ ID NO: 22696 - DNA, 3646 bp, Zea Mays
cgcaggccgcgctagtaccacactagcactgacacgtcggcaggccacggaaggaggcggaaccattcgaatttcgaacgccgccggtcgctccctgttccctagctctctcctccgcggctccgcctccggcctccacggtttcgcaggcagagatgaagaaggcgtccgcggcgtcgcgctacgcggcctacgactccccgtccccttcgccgcgccgcgcggcgccttccgcggccgccgcgaccccgggagcagcgcacggcagcagccgcgccctggtggtcgcggggagatccggccgcgatctactgggcgccaagccgcaagcccacggcaacctaggctccgtgctacggcggctcatctccatggacaagaagccgccttcctccaagaaccagctcccggttccccctgccgccgccgccgcagcagcagcagcagcgaagaacaacggtggcgggaagctgccggggctgtcgcggaagttgttccagaaagcctcgtccaccgaggcggcggcgcccaggaagacgaaggccctgatggaagtcaagaacagcggcaacaacgccaacacgcggacgctcggcatggtgctgcgcagcgagcgggagctcctggcgcagaccagggcgcaggaggacgagatcgccgcgctccgcctgcagctcgagaacaaggaccgggaggtggagcggctcaaggacctatgcctgcggcagcgggaggagatcaggacgctcaaagacgccgtcctgttcccggacgtggagccggagccagagcccgaccgccgcctccgacacgagatttccacgctcaccgaccagatccagtgcctcgcgcaggaggtcgcccaggttaaggccgagaagcactcggcaaggtcgtgctttgacgaggatggatacttctcttcccctaggacgcctgggtttaacgaggagaccgctttctctctggagtgcagcattggggaagctgagacgccgaactacggtagcccagacgaaatgttcagcaaggatcttaatccttgcttgaccccgtgcattgccaagagcagatctgatgtatccgcacaattccagtcgtcttcctcccagttcacaaaggaatctagcggttctcgtcgcagcagcggcaaggaaagagcagaccgctcttatggttcttttggcaggccaatgtcaaagagctctgaccatcacaagccggccgcctcaggaagcagcaacaagcgacgagtatacagatccgatcaagacaaaatcaatcagaacctgttttgagttcaccatcgtcatcagcttgccagtgaaggtagcctccagcttctactaggtgaaatatttataagcatgtggactttttatggtccgtcgataccggtgctcgtgatctgtcagtgaatgaaacctttggtttgtgctttttttgtgttatgctctagcttgcccagctatttggaatggaatgccagtttggctctgctatgtcatcgataggtgaatatttggcttctcatgttctccgttctctcacgaatcacgatggcggctccaacatccgtcggtgcgagtgcgcggtcgtcgggtcgaagcggaggagagtctcgtcgggcggggatgcgacggactccatttcagcctccatcgggggagctggagagggagggggcaagaaggcgctctatcactgcaactactgcaacaaggacatctccgggaagatacggatcaagtgctccaagtgccctgacttcgacctttgcgtggagtgtttctctgtcggcgctgaagtcaccccgcaccgcagcaaccatccttacaaagtcatggacaacttgtctttcccacttatttgcccggattggaatgcagatgaagaaattctcctccttgagggaattgaaatgtatggtctgggaaactggcttgaagttgcagagcatgttggtaccaagtctaagttacagtgtattgatcattacacatcagcatacatgaactcaccttgttatcccctcccggatatgtctcatgttaatggcaagaataggaaggaacttctagctatggctaaagtacagggtgagagtaaaaaagggactttgctgttacctggagaactcactcctaaggttgaatctcaattttctccctccagggtcaaggtggaagatgcacttggagaaggtccagcaggtcgatcaccttcacacatggctgttggtgcaaataaaaaagcttcaaatgtgggacatattaaggatggcgctactgtatcaaaagtcgaagatgttcatgtagatagaagtgttggtgtgaagaagcccagatattctgcagatgaaggcccttcgttgactgaactgagtggatacaatgcaaagagacatgagtttgacccagaatacgataatgatgccgaacaagctcttgctgagatggaatttaaagaaactgattcggaaactgatcgtgaactgaaactccgtgtgctgcgtatttacctctccaggcttgatgaaagaaaaagaagaaaggagttcatattggaaagaaatttgttgttccctaatcccttggagaaggatcttacgagtgaagacagggaactttaccatcgctataaagtcttcatgcgttttctttctaaggaggaacatgaagccctcgttaggagtgttattgaggagcgaaaaattcggaggagaattcaagaactccaggaatgccgttctgctggatgccgcacactggctgaagcaaagatacacatagagcaaaagaggaaaaaagaatacgagctgaatgcgcaaaaagctaaggatagcagtcaacttaatgcaaataataaatcagtacaaaagatgaatcgacctatgaaaattgagtccgatgggaatttggatccaaagaaaggtggtgctggcttggattctcctaagacaacaggacctacaagtgttaagcagtgggatgactgggatatagttggtcttcctggggcagagctattaagtgctagcgaaaagcttctatgctgtcagaacagattgctacccagccattacctgagaatgcaggaggtgctgatgcaggagatattcaagggtagcgtcctaaagaaggaagacgcccacgtcttatttaaggtcgatcctaccaaagtagatagtgtttatgatatggtatctaaaaaactgggcaaccatgaggaggccccaaccgtctagcttacgcttttgagcttgcctgctgtgacatgccgaaggaaacaaatcttggtctggcccttcgcagcgtgtctgaatcagggctgaaggtggtggaaccatactaaatcgaatcggccatagttagctgaaattcatatcagctgtcagtagcacagtaaggcattcccgccaagctgtaaaattattgccccgacgagaatgtgtagcatgaatttgaatttcttttctgctattgctgtgtactgttgcagggtagtgccttattgtagtatatgtataggtgcctgagttttatgtatcatcgtgtatgtaccatttgggcgctctatttatgccattgtaccaaccccaaacatcgattattataattcatctcgcagccaaattcttgtctct

SEQ ID NO: 22697 - DNA, 1617 bp, Zea Mays
tcggcggtgtaggggtgtgctaacgggatgaagtggcagtacttgctgaagcggtcgacgacggagaggattactgtcttgccctgcacccggggcagtgcttcaatgaaatcgatgccgatgtcggcccacacgctggacggaatggggcagtggctagagcagcccggccggcctccggcgacgtcgagaacatctgcgaccgcgcagcgcacaagtacgtggcgcggaagacgggagtcggcggcggcggcaggggcacgccgccggtggtgatgcgcgtggacctgatgagcgcctacgcgcagcacctccgcgacatcatcaagcagcgcgtggcgcacccgacgcactacgacaccccactgaggggcttcaaggtggtggtgaacgcgggcaacggctgcggcgggttcttcacctgggacgtgctggagaagctgggggccgacaccacgggcagcctccacctggagcccgacggcaggttccccaaccacatacccaacccggaggacgccaccgccatgtcgctcacccgcggcgccgtgctggcgcagggcgcggacctgggcgtcgttttcgacaccgacgtggaccgcagcggcgtcgtggacgccgggggcgcggccatcaacggcgaccgcctcatcgcgctcatgtcggccatcgtgctgggcgagcacccgggcaccatggtggtcaccgacgcgcgcgccagcgacgggctcacgaggttcgtcgagtccaggggaggccgccactgcctgtaccgcgtcggctaccgcaacgtcatagacaagggcgtgcagctgaacgccgacggcgtggagacgcacctgatgatggagacgaccgggcacggcgcgctcaaggagaactacttcctcgacgacggcgcctacatggtggtgaagatcatcattgagatggtccggatgaagctagcaggggtggagggaggggtagggagccttatcagggatctgcaggagcccgccgagtccgtgctcctccggatggacgtcatgggtgagcccaaggatgccaaggaaagggccacacatgcagttgaggcttttaagaactacatccaggaggacaaacttttcggttgggtgctggacgactgcggggattgctcagttgccgagggatgccttatggacacaaacaatgatcccatcgatgttgatgcacacatgtacagagcaaaactatacgacgagaatcagagagcagtaggcatggtccacattcgtcaaagcgtgcataatcccaacatagcactaaacatgcagtcctatgctcctggtggctgcaaatccatggcaaaggatcttcttgagaggttcttgctggcaagcggactgaatgggtttcttgacataagccaagtagagaagtttgtccagtagttcttatgcttattataggatcttagatttacctactctgtatatgtaacagctcagaacctagctaggagttcactactgttgcgagtgtacatctattacattattctcctatcccatccatggtaaaccttgtatgtgtttagcaaatatacatagcattaccttttttgattttagcgtttttctaaaagtattc

SEQ ID NO: 22698 - DNA, 544 bp, Zea Mays
gccgatgttgttgggagacgcctaggtaaagaaaagcttccatacaatcccaacaaatcatatgctggaagcatagcaatggcggtggctggttttctggcctcagttgggtatatgcattacttccacactttcggttttattgaggaaacatggtacatggctttaagcttcctcgtggtctctgtagctgcagcactcgttgaatcgcaccccatcagcacagaacttgatgacaatttgactgttcctttgacatcattcctagttggtagcctcatcttttgatgtttaggcgcaaggacgtatgagatgtttctccgtcatgctgtaatcttctgatgtttaggctcaaggacatatgagatgtttctccgtcatgctgtattttatgtaaaacgtttctaaaatactactataattgtgagaatctgtacctagagtttggagaatatgttcggtttgtttatcataatacaagagtgtgtttggttagggagttgactggaatgaagcagttccattccggttcctggtatcggag

SEQ ID NO: 22699 - DNA, 1548 bp, Zea Mays
cttttccccctttcccatcccgcctcctcttctttcttctcgcctcgcgctcctcccttcctcgtaggttaccgttggtgcgagtgcaacgcaaccccaccccagctgctaaacccgagaccgaacctcgtatcgtccagcttaaccgcacccacctttcgcgactgggatttttctcgagatcgatcgatcgctttccatcagagagcagcatcaccttcttgccttgcccacgccccaggagaagagctcggtgagctgcacagcctcgagggcgacgaggagggtggccaaggaggaagagccctcctcgcctccttctgatgatgagctcggaagctcggccacatccaccaagaagcgatcggcgacagctgctcgcgtgccggtgccggggaagctcagtctactcgggaaggacgcaatggagcagagagagcaggcgcagaaggttgccctggaggcactgcgcaacgcatcagccacggacaacgtggctaggatctacaagttgttctcggaagtgagcaagacggcgaggccggaagcgccggccacctgttttgacagcttcctcagctttcaccaagaggccgtgcaggccgtcaccgacattgaggcgatccaggcggccacctcgatggccgcggccgtggcgagtgacgagcagcagctcgaagatgcgccgccggtcctgcaggagatagcacagaacaggacggtggtgcgtcggagaggcatcggcttggggagcgtgtccaagtcagtgtcgttcgcgcccggcacgttggacccgaagcaggacgatggaggcggcaaggccatccggagctcgagtgccagcaggaagtgcctcgccacggacaagatcggcgaagacggtggcgacgagaagagatcatcttcttctggtccttcctctgccaccaccaccactgcgcactctgctctgggctcctcgctgaagctggctaagaagatacaggccgaagcagggagctggttcatggacttcttggaggccgcgctggagaccgggctgaagaagagcaaggcgtcttccatgggggacgggcggaagcaaagcagctgctgttgcccgcagtcgttgatgctgcgggtgatcaactgggtggagatggagcagagcagcggcgacagcagcggcaggaagactgcccacccaagagctgcggccgttgcgcggaagctcagaatcaaggccaaaaacccctcctgatgcgctgctgccctctgattcttgtgagaagctagtttgtctctgattcttgtgagaatgtacccagatagaatccgtagaataagaaagtgattgcctccattgttcttgtcacggcatagcagattgtttcaagtgttcttgaagtaggatgacctgttcccttatcactaatcttaaacagcactacagcagcagaacaatggaggtgttgtaccgtagttactgttgaataattagacaaattccagtttaaattccgaatataaataatcatgacaaaatcagaagaactgaaataacaagcc

SEQ ID NO: 22700 - DNA, 1474 bp, Zea Mays
caaatccaaacctcaccggccgcgacgcggcccgcagccacggccttccgtaatgtcataactccccttctcgagtccatctccaacctcatccctcccaccccaataatacatccagccggcgccatcaggcccggcaacgcgcaagcggggctgaccatcgaaccctagtccccggccgagccgccctccgccgagccttgcggccgctctgcgtcatccctcttagtctccctccgttcgacacggcttggatccgagatggaatcaccgcccctcacagctgaagcaattgcttatacagagaaaaagatggacatggctttggaggatataattaaaatgtcaaagaaaaagaatcctggaggcaagaaacccccgaggcagccgataaaaaagcatccattccagaatggcaactctaataaagggaatggcaaggttcaaagttttatggagtctagatcaaccattagacaaggtgttcttgcacagagaaggtcaaatcttggtggaaatcagttccctgctacaaagcaggctgcgaagaaggctgctgttatgccaatgcacaagggggctatccgttggaacaagccaagtgcaagtaccttagtgcagaggaggcctgtaggtggtgcttttcagaatgccaaggtcaaggagtccaaccaggcagcaccaaggacgatggatgcactctttgcacagatgaaggcgcaacgcttgaggacggtacctcaacagcaggcaaattcttccccctggagtcatttcaaccagcatcgacgtgttcagcagcagcagaggcgaggcagagggtatggtggccgtaatgttggcaaccaatgaatccaactagacatatctactgcatcggagccctttctcttcactggtcttttggaccttggaagaaaggacgccccttggaaaatcaaacttggctttgtttattggaggggtgacaatgggctctaacttggctttgtttattggaggggtgacatcgggctctaaattttacactaagatttaaggatctgattaagatcaggccctatttctattcatttttaaactaaaatttatttagtgtcctactattttgtgaagcgtttggatcgtgatccattaccacctcacctttggacgtggacaggatatgaagcgaagtttgtttgagttttctagttgtgtgcagtctgcttccgtttcagcatgtataatgacatggaaattatttggtcagagattatgatgtcttgtttcttggcttgattagcttcatccccaactaagagtaattcaccttacctagggatgacaacaggtcaggtttagatagggtagaataaatatccgtccgctataatatttgcgaagattatttatatctgtctatgactatactcgcggataacttgtaccggtatccgtagctattcgtttgattggttatctgtactatttc

SEQ ID NO: 22701 - DNA, 2173 bp, Zea Mays
gttagtttgcgtgttctggagtagatagtgctttgcaagctaatcgtttcgtattagcgtccggaggcgcctcgtcccgctcctccgccgccaccggatggcgctgctcacggcgccggcggtggccgcgctgctgctgctcttctggtccgcggcgtacggcggtgacgcccaggaccagggcgtgccgccgccgtaccaggacgccagcaaggacgtggaggtccgcgtcagggacctgctcgcgcggatgacgctggccgagaaggtcggccagatgacgcagatagagcggatcgtcgcgtcgccgcaggcgctcagggactactacatcggcagcctgctcagcggcggcggcagcgtgccgcggaagcaggcgacggcggcggagtgggtcaccatggtcagcgacttccagaaggcgtgcctgtccacgcgcctcggcatcccgatgatctacggcatcgacgccgtccacggccacaacaacgtggatccaaacctggtgaagaggatcggcgccgcgaccgcgcttgaagtgagagccaccggcatccagtacgcgttcgcgccatgcattgcggtgtgccgtgatccgaggtggggccggtgctacgagagctacagcgaggaccaccgtatcgtgcaggccatgactgagctcatcccgggcctgcagggcgacgtcccgcagaacttcaccagcggcatgcccttcgccgccggaaaggacaaggtcgcggcgtgcgccaagcacttcgtcggcgacggtggcacgcagaacggcatcaacgagaacaacaccatcatcgaccagcagggcctgatgagcatccacatgccggcctacctggacgcgctccgcaagggcgtctccaccgtcatgatctcctactccagctggaacgggctcaagatgcacgccaaccacgacctcatcacaggcttcctcaagggcaggctcaacttccagggcttcacgatctcggattgggagggcatcgacaggatcaccagccctccaggggcgaactactcctactctgtgcaggcttcgattcttgctggcattgacatgatcatggtgcccaacaactaccaaaacttcatcaccatcctgacgggtcacgtcaacagcggcctgatcccgatgagcaggatcgacgacgccgtgactcggattctgcgcgtcaagttcaccatgggcctgttcgagaaccccatgccggaccccagcctcgcggaccagctggggaagcaggagcacagggacctggcgcgggaggcggtgcgcaagtcgctggtgctcctcaagaacggcaagccgggcgacgcgccgctgctgcccctgcccaagaaggccgccaggatcctggtcgcagggagccacgccgacaacctggggtaccagtgcggcgggtggacgatcgagtggcagggcgacacggggcgcaccaccgtcggcaccacggtcctggacgccgtgaaggcggccgtggacccgtcgacggaggtggtgttcgcggagagccccgacgccgagttcgtcaggagcggcggcttctcgtacgcgatcgtggccgtgggcgagcacccgtacacggagaccaagggcgacagcatgaacctgacgatcccggaccccgggccgagcaccgtacagacggtgtgcgccgccgtgcggtgcgtgaccgtgctcatcagcggccgccccgtggtgatacagccgttcctgggcgccatggacgcggtcgtggcggcctggctgccggggaccgagggccagggtgtcaccgacgtgctgttcggggactacgggttcacggggaagctgccgcggacgtggttcaggtcggtggaccagctgccgatgaactacggcgacgcgcactacgacccgctgttcccgctcgggttcgggctcaccacacagggcaagatgtaccagaactagaagaaggcggagcgaggggaaaggggtagtacttggtaaagataataggaaattgaattaagcagtgctctgccgaggaaacgtgaacctgtagttcttgtttccctcaattctatgtcgattaattttgatgtatgctcagttctcactgtggagtagcatccacacatgagccatctcattcttatatgataatcatgatttgattttgctcagctc

SEQ ID NO: 22702 - DNA, 1876 bp, Zea Mays
aatggagggcatcagacaaacaaacagaacctttaaagtgccagaccgccgcatccgccgccactagcggagactgccccgccgcgctttctccaagttcagctgacggccgccgtgcctactccaggccccgccgacgccctgtgaagaagaccctggttgcgctggcgcccatcgcgagcaagaagctctgaaactcgacggcggagcctcaagctcgtgcgccgaagttcattctttcgccctgtagaaacaaagggcagatgagaggataactgtactggtcattggtggtggaggcagggagcatgctctttgttatgccttgaaccattccccatcatgtgctgcagttctatgtgcccctggtaatgctggtattgctcagtcccgggatgcaacatgtatcccagatttggacatctcgagtagtgatgatgttatctcattctgccgcaagaggggagtgggaatggttgtagtgggccctgaagcccctcttgtcgcgggtcttgcaaatgaccttgtcaaagttgggataccaacctttggcccttcatcagaggctgcagctttagaaggatcaaaggacttcatgaagaagctgtgtgataagtataatatccctacagctaagtatcacacatttacggatgctgtggaagctaaaaaatatgtaaaaaatgaaggagcacctattgttgttaaagctgatggactggctgctggaaagggtgtggttgttgcaatgactttggatgaggcgttggaagccatagattctatgttggttgaaggctcattcggttctgctggttcacgggttatcatcgaagaatttctagagggtgaagaagcgtctttctttgcattggtagacggcgaaaatgctttgcctcttgaatcggcacaggatcacaaaagagttggtgatggtgatgttggcccaaataccggtggtatgggtgcatactcccctgctccaatagtgacagatgagctcaaacgcattgtaatggaaagtataattatccctactgttaaaggcatggcagccgaaggttgcaaatttgttggtgtattatacgcagggcttatgatagagaagaaatctgggctgcccaagcttattgagtacaatgtaagatttggtgacccagaatgccaggttctgatgatgcgattagaatctgatctggcacaagttctgttatctgcttgcaaaggagagttgagcaatgtttcactgacctggtctcctgaaatggctatggtggttgtgatggcaagccagggataccctggctcttataagaaggggaccgtaataaaaaacgtggacaaggctgagcgagtgtctccagctgtcaagatattccatgctgggacagcagtagatggtgatggcaatcttgttgccgttggagggagagtccttggcttcactgccaagggcaaggacatcgaggaagcaagggcaagagcgtacggtgcggtagacgctatcgagtgggtagaagggttctgcaggcgtgacattggttggagagcactgaggcagaagcaagtggctaaccagtagctattccatgaccatgagatttccccagagaaccgcaactacggtgagcctgtactgtttacaagtaataaaaagggaaacggtgcgacccccattgtttttggttgtggaaagacaagtattgctgatcaaacagtagttaacacctgttgatttcagcatgattcggtatatgtttgcaccgatattgtgttcagagtccagacaagcgctagagtgaaaacagcgcgcgccatctgaattctgaccaattgtcttcagttatcggataagtggacctttccaaataattgt

SEQ ID NO: 22703 - DNA, 1756 bp, Zea Mays
gtggccatctcacagttgcccacgctcaaggttatcccatcatggctgagacaaatgatgccagcccttcgtcgaaactccatacaagattgagactctgggagtttcctgactgttatgtatttgaaccaattgatggccttgctgacttgtacctatcagttagccggaccagcggaacaatgaatctagttcaagacttgccatcacgtggatccactacaaaacataaagttcaaacagtatatggtgtgataggagtactcaaacttgcagttggatcatattttgtggtgatcacggatcgtgattgtgtgggatcctactttggacacgcaatttttaaagtgacaggactaaaaattcttccctgcaataatgcacataacaccacctctactgatcagaaaaaaatggaaacaaaattctcggagctcctggattctgcagagaggactattggccttcacttttcctatgatatcaacctaacactttctgcacagaggctacatgatctcggcgatgaatatagagctcttcctctttggagacaggcagaaccaagatttctatggaatggctacttgttagaacctctaattgagaacaagctgaaccagtacttattgccagtaattcaaggcagttttcaaaatatccaagcagaagttggatcagagatggtaaatgtgaccctgattgcacgtaggtgcacacgaaggataggtactcgaatgtggagacgaggagctgatgcagagggttatgctgcaaacttcgttgaatcggagcagataatgcagtcaaaagggtttacagcatcctatgtacaagtccgaggttctatgccattcttgtgggagcagattgttgatttgacatacaaacctagttttgacattgttagacaagaggaagcgcctcgtgtacttgagaggcacttccatgatttgcaaaagaaatatggagctgtcttagccgttgatcttgtcaatacaggtggcggtgagggccgcctccgtgaaagatatgcaaaatctattgaacctattcttagtgaagatctaagatatgtgcacttcgacttccaccgaatttgtggccatattcactttgagcgtctgtctcagctgtatgatcagatcaaggactaccttcagaaacataagtacttccttataaatgataaaggagagaaaattgaggagcagactggcactacaagaacaaattgtatagattgtttggatcgcaccaatgtaactcagagcatgattggtcgaaaaattctggaaagccaacttcaacgtataggagttcttggtgctggtgatacaataagcaaacatccaacctttgatacaaactacaaaattttgtgggccaatcatggagatgcaataagcattcagtactctggaactcctgctctgaagggagattttgttcggtatgggaagcgaactactcaaggaattctgaatgatttgaggaatgcacttggtagatactacctgaataacttcgttgatgggactaagcaggatgccatggatcttcttcaaggacattacatgacatctgttagtagagatatggcagtgccaagcaaagcaggacttctgcagagttatgcgtccttccgccttgcttttgcattggttatgggagctctaatgttcatgttgatgtcactgagacagggcagcaaacatttgctctctgtttttctatccaacataatttacggttt

SEQ ID NO: 22704 - DNA, 970 bp, Zea Mays
ctccccactccccaggctcgacggctccgttggttgattctgattcgtctcctgttggctgttgccttcgaccgcctccacctcgtctccgacgatgtcctccgtcgccggtgagggggaaggagagggaggaggacggcgccgacgggaggagccaaggagccaacaacatgaggacggggtcgaggtggccgacggaaaactggatttgggtgacctttacggcgcggcggcggggtgggtagaggcgcggaccagctgcccgcacctcggcaccatgccgcccgctggtgctgaattgctgatgaccttgctcgcgtgcctccgcccgactctccgtgctccagatgtcatgaccctgctgaaaactgattatgcttgatatgcaaagatgtgatgtgcagtcgttttatcaacaaacatatgttgtgccatcatgaagaagaaactggtcactgtcttgctttgagcttcagtgatctttcagtttggtgtttctcatgtgactcgtacctagatgttcaagccattttagaattgcgcccaagttgcacatttgttgaagtttggagaacaccttttcaatcacttgaagtactggatttcagcactggtgaaagtggaagttcatcaaggacttagttgtttgtattcaagtgatgagtttcttttcatgatgcttcaatcagatcaagacagacagttgtgtagtatcctggcactttttaagcttcagtgcgatataattcatttgagaagcccttgttcttttcctttttaccttcagttagtatatttcaataacccaaagcttccttagatagttatcacgacaggtgtaaatccctgtgcaccataggagatttgaaggcattattattgctttgatatggacatccagaaaaaatattcaacttcgaatatctttggctttggtgactggtcgtgattgtgcacttctatatgcaga

SEQ ID NO: 22705 - DNA, 1507 bp, Zea Mays
aggcgacacagttactccaggcactaaagttgcaatcatatccaagtctgctcaacctgctgaaacacatgttgctccatcagaggaagcaacttcaaaagaatcatctccaccaaaagttgaagataaaccaaaggtagaggaaaaagccccaaaagtagatcctcccaagatgcaagcaccaaagccaactgcaccatcaaaaacatccccttcagaaccacagctccctccaaaagaacgagagcggcgggtgccaatgccaaggctcaggaagcgtattgcaaaccgtcttaaggattctcagaacacctttgcaatgctgagtacatttaatgaagttgacatgaccaatttgatgaagcttcgttctgattataaagatgaatttgtcacaaagcatggtgtaaaattgggtcttatgtcttgctttgtcaaggctgctgtttctgcacttcaaaaccagccaattgtcaatgctgtcattgatggtgatgacatcatatacagagactacgtagacatcagtgttgctgttggcacttccaagggccttgtggttcctgttatccgagatgctgataccatgaactttgctgacattgagaaagggataaacaaccttgcaaagaaagcaactgagggggcgctctcaattgatgacatggcaggtggaacattcaccatctccaacggtggtgtctatggaagcctcctcagcacacctatcatcaaccctccacagtcgtctattctggggatgcattccattgtgcaacgccctgtggttgtgaatggtgacatccttgcgaggccaatgatgtaccttgcgctgacttacgaccacaggttgatcgatggcagagaggctgtcttcttcctgcggcgcatcaaggatgttgtcgaggaccccaggaggttgctgcttgacatataaattcatgcaccagcgctgcgctgccctgccggactgttttgtgcaattgtgcttatctggaaataatgccatggaaatttttgactgatgaaaaagaattacttcctcagaaagacgaaatctgagctgaggataccgaggtttttctctatataatcgtagaagagcaaactcaactcaacatgaggtcatgtttaattttcggatctgagatgttccattacgggatgcagttcccacaaacagtcattttatttaatatgcaagagcaatagagctgctgcatttttgtttgttggttcacaatttcgcctccagctggccagcctgcaactcgaggaatctggattgtataatgtgacgttggagcggtgctgcaatcgcacgctctgttgaatggtctcgactttaaactcgtccaacgtaaagtaggaggaaagggtataagtgtataacaaaggtaaaatggatgaatcgaatccggaggaaagggtctaggagtttggtatgggttacacttttttatttcccatatttttttggttttgggaatgaaatggattggagtac

SEQ ID NO: 22706 - DNA, 1816 bp, Zea Mays
cattatcccaatatatactcccttcatttcaaattagcatttgttttagttcttagattttttttgtctatatctaaatggatgataacaaattagacatatacagaaaacatatatcaattattgtataaacctattaaaaggttaaaaccaattttaatttggaacagatggagtactttttttcttttcatttcaattgttcattcaggtcattgctcacactgacactgccacccatggtgatgcgtgacacattattactcaatcatcgccgctaaatgactcaactagctagctagccagcggctatactacagcacatagtttcttcagtgggggacaccgccggcagcagcgtaggggcatggagtcggctgctgcaggatggactggaggaccaagccgaagatcgcctggtaccggtgctgcggctccacctgcctgagctgctggcaacactgctgccgcaacgactggcactgaggcgagcagtagggcgtcgccgtcgggctgcactgatgcctcaggaactcgacgcactggcccaggatcggggtggggcatgggtgtggctggggatgaggctgaggccggggcggttgagtagggtagtggcatggtggcagatgcaccggcggcggtagatgaaccggcggcggtggctggcagccgcagccgccgcttgtatgcgtggaggtggcgctcgcagcgagagccaggagagcgagggcaacgagcaacaccctcatggtgtcgatcgggttcttctgcgctctggagtagataaagctaatggtctgaagacccagtggtggtgatggagaagtgcacaggcatgcgagcgttatttatagctttgattaattaacacaatttcttgtgttcttatgccaccgagacggctgtaggcagcttcatggtttcttgccaaatgtatatgactcgtcactctctttacgtagcacgtcgatggttcatctggaatcattctgtacttctgcgtggctcagttttgttgccttctacaggttgttgatctacgtaaaacgaattagatttagcttgacatatggcttttttttgttgtaaatttactttacacgtcaaggatttttgtcctgtccggcctattttatttttcatgaaacgatctttgtaatgcaatatgagttgtttgtaatgtcttgtgagctgtaagcatgtatatcagatgagtatgatctcggcatgactcaccgtgtttctttgcacacagagaggatttgtttgattgtttcttacccaatacccttgacgtgcaattttggttgatgttctgtgagttgttaaggatacaacaaattcttggagctttacatgccaatgcatggttgtttcgtgttcctcaccactttaggacttatacggttgcacctggatgatcgaaagggattgggagagattaaatctccttctattcaattttgactaggaagagatttaatcgtttccaacccctttcgatccagacgtaagcgaacaagttttttatttggataccctcttattcatcttaatacacacatgtattaagttgcactagttatatgcccgtgcattgctacggtttatatatatatatatatatatatgatatatgataaattttgttttaataaaacatatgttttctattgattaggttgtgtgaatatggagccaacaaccaatatccagaacacttatacataatttcaccttattttgtacataaactctcttattatagtagtagagaagagattataagagtgcgggttgattataaagaaat

SEQ ID NO: 22707 - DNA, 472 bp, Zea Mays
gttggagatgctctaagtgaaaagcaccaatcaagacataattaagaagcaaactcaaagacaaaagacacataaggatggcacaattttaccttcagatatcccaaagcaatctaaaaaaatgctttagcatgcaaatttgcgatgcacgcgtttccatatatatagttggcgcttgcaatcagcaaaccatccggtggagacacagcagacctcgtacgtcgatctatggcggccagccagagctagaatccacgtacacgtacgcggctggcggtctaggtggtttcgccatgaagccgacgcatatcgaccagcagtctccggtccccggcaaaagcgccggcgcgagatggaccagtgatccggatgcccccccgcgcgcgcatcgatctgctggactggacgcaacttttgatggagaagggacgaccatgcgtcgtccatccgtctctcctcgtgactcgtgagc

SEQ ID NO: 22708 - DNA, 225 bp, Zea Mays
attaaaactatacattagttttaattagatctctactttaacatccatcagataaacaaacaaacaattaattagttaaaacacttgtcacgataaaataatattattaactcgccggtaacgttattacaaagctaatgcaagttgaacaaagggaatcgaattttataacgcaacatatattaattatttagtacttcactgattttaaacgacgtggctaat

SEQ ID NO: 22709 - DNA, 525 bp, Zea Mays
agccaaatggcagggatattgcttcactgtcttcgatttcatcttcttgtctaacctgttctgccaaccaagacatctttgggtgatactccaaccttggccgccctttgttgctgctgcctattggaagcctgcttctgagatctaagctgcgcacaacttgttctacaaacaccacttcaatttgcacggttgatataactggggattggcttgttagcgaagaaccgaagataccatgggttcttatgcaaatcacagttctcctagttctttctatcgttctgattgtccgttgcgatgtttggtgtacctagtagtatcttaattatataccttacactgtttacctttccaatggaattcttggtctagctaacattgtgagattatgtcacttttctcgttctctgtagtcattgcattttgctcctggtgttgtcttctttgtgggatgtccaatcttttgtggcctatacaagagcttgtttggttgatgccaaagctacctacacctaatcttag

SEQ ID NO: 22710 - DNA, 240 bp, Zea Mays
aatcaattttcaaggaaggaaatgcatcaacggtttagcacacaactcctatcacctaatgcatcaaataaggtgatcaagattttaaaacacaaggaggtggcaaatgcaccggggcttgcctgaataacactaggttagtgttgttaggtgacgtccacttgacgatcagcctttgtcctggcacttgatcaggcaggttcgtccatcagcatcatcatgcggattagcccgcacttg

SEQ ID NO: 22711 - DNA, 2596 bp, Zea Mays
gctactacagtactggtagcgtggctgacgatgcccggctgcccctgcaccgcgttcggaatgcgattgctcgccgtgctgctgggttcggtcgatgccccacccccacccccccccgaggcgaccggcttagtgagtgatcttcgcggttggctgcggagggtcagggacctgattgggctcgaatctgatgggcgtgatcggaatcgtgtcctcgtgtccttgccatcaggacacactgttcacgccagcctccttttgtctaggtattatggtcatgaagatggagcttgaggacgatggtgccttgggaggaactgctggcacgtggacagaggaggaccgaggtctcggcgctgccgtgcttggagccgatgcctttgcatatctaacgaaaggaggtggtgccatatccgagggccttgtctccgcgtctttgccggatgacttgcagaacaaactccaggagcttgtcgaatccgagagccctggtaccggttggaactatgccatcttctggcagctctcgcgcacaaagtctggtgatctcgtccttggatggggggacggctgctgccgtgagccccgagttggggaggtgggagctgctgcttctgcaggcagcgatgataccaagcagaggatgcgcaagcgtgtgctgcagcggttgcacatagcattcggggttgctgacgaggaagattatgcccatggtattgatcaggtcactgacactgagatgttcttcctagcatctatgtactttgcttttccccgttgtgctggtggccctggccaagcatttgcagcagggatccccctctgggttcccaatagtgagcgcaaggtatttccggccaactactgttaccgggggttcctcgcaaatgcggcaggatttaggactattgttttggtgccatttgagagtggtgtccttgaactggggtcaatgcagcacatagctgagagttctgatactatccagaccatacggtctgtatttgcagggacaagaggtaataaggctgcagtacagagacacgagggaaatggtcctgctccccctgaaaggtcacccagtttggcgaagatctttgggaaggatttgaaccttggccggccttcagttggtgtacctaaggtagatgaaaggatatgggaacagaggagtgctggtggtggtacctcattgctgccgagtgtccagaaaggattgcagaatttcacttggagtcaggctcgtggcctgaattcacatcagcagaagtttggcaatggagtgttgattgtgagcaatgaggctggacaccgcaacaacggagcagtggacagccctagcacagcccagtttcagcttcaaaaggtgcctcagcttcagaaactgcaactccagaaattgccggttgttcagaagacaccgcagctagggaaccagcagcctatgcagacacaggtacctaggcaaattgactttagcgctgggagcagttccaagcctggtgtgttggttacaagggcagctgtcctggatggagagagtgcagaggtggatggcttgtgcaaagaggaaggggcgccgcctgttatagaggaccgacgaccaaggaagaggggaagaaaacctgccaacgggagggaagaaccacttaatcatgtcgaggctgagcggcagaggagggagaagctcaaccagcggttctatgcgcttagagctgttgtgccgaacatatcgaaaatggacaaggcgtccctgctgggcgatgcgataacgtacatcactgacctccagaagaagctgaaggagatggagacagagagggaaaggctcctggagtctggtatggtggacccaagggagcgtgcgcctaggccggaggtggacatacaggtggtgcaggacgaggtccttgtacgagtgatgtctccaatggagaaccatccagtcaagaaggtcttccaagcgttcgaagaggcagaagtccgcctgggcgagtcaaaggtgacgggcaacaacaacaacgggacagtggtgcattctttcatcatcaagtgtcccggcactgagcagcaaacgagggagaaggtgatagcggcgatgtctcgtgcgatgagcagttgagcagagcagcgtaggatcagattgtcgcggtagagatgtggcagttgatcctgtttggttgcgagcgaaaacaagaggcggcggcggacagcagcccttgacatggtcgataggagatctgtaggtggagagaagcaagatgagattcttctgacttttttagcaacgcaacaacaaaagatggggctcgagttaagcagccgttgtactttaggtttcttttggttggtaatagtgttcctagtgtaagcttgatgatgcagcagaacaatgaacagcagtacatgtttttttcccttattttcatgcgtgatttggaaattaaatttattgcgatctttcttttacttctctgtctgtgacgatggtagtttagtattatgtttaagaggagcgatgtattagtttgaaggaagacagaagaatgtactccctatgttgcaaaatagtaccaaaaaagtagtcattttagct

SEQ ID NO: 22712 - DNA, 175 bp, Zea Mays
gtcaagctcaacagggtcttctttccccgctgattccgccaagacccgttcccttggctgtggtttcgctggatagtagaccagggacagtgggaatctcgttaatccattcatgcgcgtcactaattagatgacgaggcatttggctaccttaagagagtcatagttactcccc

SEQ ID NO: 22713 - DNA, 5111 bp, Zea Mays
atggccgcactgccgcgccacacaccgggcggaaaggcgcgggcagcggcagctagggtttggtgtggcgggggagaccgatcgggggcgagatgtgggcggcggaggcggcgttctcgcgctccgggtcgtggcgggaggcggaggacgagcgggaggcgctgcggtgggccgcgctgcagcggctgcccaccgtcacccgcgcgcgacggggcctgctcaggtccccggctcccgacggggccgcggccgtcgagggcgacgacgtgctctgcgaggtcgacgtcgccgggctctcctccggggaccgcaccgcgctcgtcgaccgcctcgtcgccgactctggcgactccgagcacttcttccgacgcatacgcagccgcttcgacgcagtgcagatagagttccccaagatcgaagtgaggtatgaggatgtgacagtggacgcttacgtgcatgttgggagcagggctctaccgaccatcccgaacttcatatgcaacatgacagaggcttttctgaggcatctgaggatctatcgaggaggaagagttaaactgccgattttggacaacatcagtggggtaattcgcccatcaagaatgacactgcttttgggccctccaagttccgggaagaccaccttgcttcttgctcttgctggacggctcggtcctggactaaagatgtctgggaacattacttacaatggccaccatttgaacgaattcgtgcctcagcgaacatctgcttatgtcagtcagcaagactggcatgcttcagaaatgacggtcagagaaacgctggagtttgccgggcgctgtcagggtgttggaataaagtatgacatgcttgttgaactgttgaggagagaaaagaatgcggggataaaacctgacgaggacctagatgtgttcatgaaggcgttggctcttgagggtaagcagacaagcctcgtagcagagtatataatgaagattttaggactggacgtctgtgctgatactattgttggagatgaaatgatcaaagggatctccggagggcaaaagaagcgcctgacaacaggtgaattgctagttggttctgcccgcgtgctgttcatggatgagatatcgacaggccttgacagtgcaactacatatcagattatcaaatacctaaggaattcaacacatgctcttgacggaactacaatcatatccttgcttcagccagctccggaaacatatgagctatttgatgatgtcattcttatagccgaaggtcaaatcgtataccaaggtccacgtgaatatgcagttgacttttttggtgctatgggattcaggtgtccagaaagaaaaaacgtggctgattttttgcaagaagtacacacctcttcacttttgaattctataccgactggaatttctcgtggattcacgtttctttcatcgcaggttttgtccaagaaagatcaacagcagtattggtgccactatgattatccataccaatttgtttctgtatcaaaatttgctgaagccttcaaaacatttattattggtaagagattgcatcaggaattaactgttccatacaaccgacatcacaatcatcctgcagctctttgtacatcaagttacggtgtcaagaggcttgagcttctcaagtccaactaccagtggcagcgtctgctcatgaaaaggaactcattcatatatgtcttcaaattcattcagcttctacttgttgcccttatcacaatgacagtgtttttcagatcaacaatgcaccatgactcagttgatgatggaatcatttatctcggtgccctttactttgcaatagttatgattctgttcaatggcttcactgaagtctcaatgctggttacaaagcttcctgttctttacaagcacagggacctgcacttctacccaccttgggcgtacacacttccttcttggctcttgagcatccccacctcactttacgaatccggaatgtgggtgcttgtaacatattatgtggttggttatgatccccaatttacaagatttttgggacaatttttgttgcttttctttctgcaccaaacatctttggctcttttccgagtcatggcctctttgggccgcaatatgatagtcgctaacacctttggatcattcgctttgttggttgttatgatccttggaggattcatcataaccaaagaaagcataccagtatggtggatatggggttattgggtatctcctatgatgtatgcacaaaatgctatttctgtcaacgaattccatggtcattcttggaacaagcaatttgcaaaccagaacatcacaatgggtgaagcgatactcactggatatgggttattcaaggaaaaatactggttttggatcggtgttggagcattgtttggttatgcaattattttgaacatcttgttcacaatgttcttgacacttctcaaccctattggtaatctgcaagctgttgtggccaaagatcaagtacggcacagggattctaggaggaagaatgacagggtagccctagagctaagatcatatctgcattcaaattcactaagtgtacttccacctgcaggtaatctcaaggaacagaaggggatggtgttaccttttcaacccctttctatgtgcttcaggaatatcaactactatgttgatgtaccagtggaattaaaaaagcaaggtgtagcagaagaccgcctgcagctgcttgttgatgtcactggagcttttaggccagggatactaacagctcttgttggagtcagtggagctggcaaaaccaccctcatggatgttttagctggcaggaagactggaggtctcatagaaggaagcatcactatatccgggtatcctaagaaccaagagactttcactaggatatccggatattgtgaacagaatgatgttcactcaccttgcttgactgtgatcgagtctttgttatactcagcatgccttcggttgccttctcatgttgatgcagacactcaaagggcttttgttgaagaggtgatggaacttgttgagttgaatcccttaagcggtgctcttgttggtctgcctggggtaaatggtttatcgactgaacaacgtaaaaggttgacaatcgctgtggaacttgttgcaaatccttctattgtgttcatggatgaacccacgtcaggattggatgctagatctgcagccattgtaatgaggacagtgcgtaatattgttaatacaggacggaccattgtctgcacaatccatcagccaagtattgacatatttgaatcttttgatgaggtaaaaggagtaaatagaagtcattatctaagctatcgtttctataaacatgagagtttgttagtacagacaaacatttttcatacctgtgatgaatctccactggttagttatgcttacggacttccagtttcactacgaagtaaaacagtacgatgttatatctaatttaacaatcgttgtgatgagaaattttagtctgaacactgattggtggaatttccatcggtctcatttactgaacctactattgtccccatgatagtactatgtataatatgattacaatgcttaacttgcatatgctgctcagcttttattcatgaagcgtggaggacagcttatatacgctggtcccttaggtgccaaatcgcgtaatctggttgacttttttgaggcaattccaggagtgcctaaaatcagggacggctataatcctgctgcatggatgttggaagttacaagcacccaaatggagcagattcttggagtggattttgctgaatactatcggcaatcaaaattatttcaacagaccagagaaatcgtcgaggccctaagcagaccgagcagtgaatcaaaagaacttactttcgccacgaagtatgctcaaccattttgtgctcagtatatggcttgcctatggaagcacaacctatcgtactggaggaaccctcagtacaccgcagttagattcttctacacagttattatttccttgatgtttgggacaatttgctggaaattcggttctagaagggggacccaacatgatatattcaatgcgatgggtgccatgtatgcagcggtgctgttcataggaattaccaacgccacttctgttcagcctgtgatctccatcgaaagatttgtatcttatagagagcgagctgctgggatgtattcagcgttgccttttgcattttctctggtcactgtggagttcccttacatccttgtgcagtcactcatatacggttcaatcttctacagtttgggatcatttgagtggacagcagccaagtttctgtggtacctgttcttcatgtacttcacgttgctgtacttcactttctatggcatgatgacgacggcgatcactccaaaccataccattgcgcctattattgcggctccattctacacgctgtggaatctcttctgtggattcatgatcccaagaaagcgcatcccagtttggtggaggtggtactactgggccaacccggtgtcgtggacgctctacgggctcctgacctctcagttcggcgacctggaccagcccctgcttatggccgacggcgtcacctccaccaccgtggtggctttcctggaggagcacttcgggtttcgccacgacttcctcggcgccgttgcggccatggtggccggcttctgcgtcctcttcgccgtcgtcttcgccctggccatcaagtacctcaacttccagcggcgatgagagagcaagtggttcagctagctagctagtatagtagccaccgccgacacagacccaccaaacggatcgcagcctactgtacatgcatacaccgatcagtgcaggagggcagcagcacaatgaattatgaatgcgatgtacctaccagcgcgtcgtattggcacagttaatttgcccattacccccagaacatttcgccggggtaaataatcttccggtcggtcacgggagcgagagtgagaaaaagtaaagggtactgtatagccagctattccatgtacttgctgccttggcctcccctccatcgttatacggtggcgtcgcttcatgcagggttt

SEQ ID NO: 22714 - DNA, 1069 bp, Zea Mays
ggacaacaccgcacggcacggccgcgaggcatccggcagccgcgtgggaacgaacgaggaaacgtctggtcctcacgatgaaccgcggccacgtgaaaatgaatcgaggcagatgccaggctacgcgggcaccacacagccaaaggagatgccggcgggatgcaaaggcaggcgcggccccggagaaaaagcacggcttctcggccacaccgtgccgtgccgtgccggggagcaacgaatcatggaaaggcgggcgatgctcctgctgccggctggcctctctccccgcggaccgcctctgcgcgccggtgctctgcaccccggcgcccgctttcttgcaaaggttttttatttttattttgacagagagaaattcctgcggagattctgggccaatgggataagctttgtggatcatgtccccggccggcatcccgcttccgttcgggacgtcctggcctcacagctgacatggactcaggactcttggtgttggcgcactgtctggggcatgacctttgactgcattacattagaatcttctattgcattaaaatcccttctcatttctagaccgcttccattttcgtttgtggtttgtcagatcaactagaccgcttacttgctcttctgggcgagatgatccaactgaggagtggaaagaatgcaaacaagaaggtttaacttgagatgacaattgctttgttcatccagcctctcaagggcactgtacgagggtatttacgtcttcgtcttcgccccaacaagcccaaacacgccggttcgatccgaccactttcggtcaatgagtgttgataaaataggcaatttacatatgaaattagtacgataatcttagatgttagtataaattttacgtttattttcaattttacgtctatttacctcctctatgcatggatgcctataaaaagctcttatacttggtttggatatcgatattggaggtaatgaattgaattgggttcaataccgaatcaaccatagtattgaaatgagatgtaattctaattctattgtttggatgttacggaattgaggttcaaaa

SEQ ID NO: 22715 - DNA, 5088 bp, Zea Mays
  misc_feature (1)..(1): n is a, c, g, or t
ncccgtctccgtctccttctcctcctccccgtcgccgtctccgagtctccctctatttctctccgcccttgttcttctcctctctccctctatcttattacctcaagtagaagtagtatatattttttgtccgccttttcaatttttccttttatctccctgcgtctcttcgtcgtcctcctgctgtggcggccgccggcgatccccgatcggcgatactcagttgtccattgtgctgcactgcagcagtagacaatcgtgtttttcggtgttttgtctgtctctccttgatcattcagatgcctgtacagctcaactgctatagctagctgtatatatctggttgaagaggactaatctagcaacaatgtcatcgcttcagttattgcaactaacagaacgggggcgcaaccttttgtcttcaagaaggagaacacttgcaattgtttctggtgcagtacttgctggtggagctttagcatatgcgcagtcaggtcgatggaaaaaacaccaggaagcaaattcttgcagtgatgcaaactcacatagcagtaataacggaagaactagtcagaacggcattgatggtaaattggttaaaacaaggaaaaagaaaagtggactgaagtccttgcattttttggctgctattttacttaagaagattggcccgaatggaacgaattaccttattggcttgatactaacagcagtcttgcgtacagctgttggccacagattggcaaaagtacaaggatatttattcagatctgcattccttcggcgtattccgacctttacacgtctcattattgaaaatcttcttctatgctttctccaatccacgttatatcagacatcaaagtacttaacagggtctttaggcctgcgcttcaagaaaatcttgacagatcttgtccatgctgattattttgagaacatggtgtactacaagatctcacatgttgatcatcggatcacaaacccagagcaaaggattgcaagtgacataccaaagttctgctcagaattaagtgaccttgtacaggatgatctggctgcaattgtagaagggttaatatacatctggcgcctctgctcttacgcgagtccaaaatatgtgttatggattctggcatatgttataggtgctggtggtacaattagaaaattttctcctgcttttggcaagctgaagtctacagaacaacagctagagggggaatatcgtcaactccattcacgattgagaacccatgctgagagtgtggcgttttatggtggtgagaacagagaagcatcacatattaagcagcggttccgggcacttgttaaacacttgaatgttgttcttcatgaaaactggtggtttggcatgattcaagattttcttctgaagtatcttggcgccactgtgggagttatcctaattattgaacctttctttgcggggaatcttaaacccgaatcatccaccttaggacgggcagagatgttgagcaatctccgataccacaccagcgtgataatatcactatttcaatctcttggaaccatttctattagttcaaggcgcttaaatattctcagtggctatgctaatcgtattcatgaattactggatgtctcgcgtgagctatctggtggccgtgatagattgattactcaaaattcttctgatggaaattatattagcgaggcaaattatatagagttttcagatgttaaggtggtgacaccttctgggaatgtcttggttgataatttgaaccttcatttggagtcgggctctaatctgttgatcactggtcccaatggtagtggaaaaagctcccttttccgtgttcttggtggtctgtggccaatggtatctggtcatattgtcaaacctggtgttggttccaatctcaacaaggaaatattttatgtgccccagagaccatatacagctgttggaacgcttcgcgaccagttaatctatccactcacagcagaccaagagactgaaccacttagctatggtggcatggtggatcttctaaagaatgttgatctggaatacttgctagaacgctatcctcttgataaggaagttaactggggtgacgaattgtctcttggtgagcagcaaagattaggaatggctagactgttctatcataagccaaagtttgctatcctggatgaatgcactagtgctgttacaactgatatggaagagcgcttctgcaaaagggttcgagcaatgggcacatcttgcataacaatatctcaccgtccagcattagttgcgtttcatgaaattgttttatccttagatggtgaaggagggtgggatattcaggacaacagaaatggttccttctctcccgaagttgagtttgatgtgctgaaggcatcagaaagtgatcgcaagtctgatgcacttaccgttcaaagggcttttatcaccagcacaaagggaaatgcgtcaatgaagcccaagaaacattcttattcaacagaggtcatagcatcttcccccagtatggagatagaacatacagtacaatcatctattgtcacacaattgcaatgctctccaagacctttgcctgtcagagttgctgcaatgtctcaaatactggttccaaagctatttgataagcaaggagggcagctgcttgcagtggtacttcttgtattctcccgcacttggatttcagaccgtatagcttcattgaatggaacaagtgtcaagtatgtcttggagcaggacaaagctgccttcattcgtttggctggcactagtgtgctgcaaagtgcagcaaattccatcgtgtcaccctcactgaggaaccttacttcaagaatcgcccttggatggcggattcgcatgaccaatcatttgcttcaatattatttgaaaagaaatgctttttacaaggtattcaacatttcaggtatgagtatggatgcagatcaaagaatgacacatgatgtagagaagttgaccaatgaccttgctggcttgcttactggtatggtgaagccattagttgatattatttggtttacatggagaatgaagcttttgtctgggcgaagaggggttgctatactgtatgcttacatgttcctaggtcttggttttctaagagctgtgtcccctgactttggggatcttgcaaaccaagaacaagaacttgaaggcacgttcaggttcatgcactcaagattgcggacacatgctgagtcaatagctttctttggtggtggatcaagggagaaagctatgattgacgctaaattcatgacattgctcaaccactcgaaggttctattgagaaagaagtggctttatggtatttttgatgattttgtgacgaaacagcttcctcataacgtgacatgggggctgagtatgttatatgctttggagcacaagggagaccgagctttgacttcaactcaaggagagttggcacatgctctgaggttcttggcatctgtggtgtcacaaagcttcatagcgtttggtgatattcttgagttacacaagaagttccttgaactctctggtggtattaacaggatatttgagcttgaggagcttctacaggcatcacaaagcaatcctgtcatgccttctgatgccacaaatgccggttccgaagaaataatttccttccgtggcgtgaacattgtgacaccatcgcaaaagctattggctagccaactgtcttgtgatgtatctcaagggaaaagccttcttgtgactggtccaaatggtagcggaaagagttccatctttagggtgcttcgaggcttgtggcccattgcttctggtagtcttagcaagccatctgaaggaatttttaatgttcctcaacgtccatatacttgtcttggaaccttgagggatcagatcatataccctctctctcacgaggaggcaaagttgaagatgctctcaggcgaaacaagtgacaagtctacagcttccgagctgttggatgatcacctgaggacgattctagagaatgttcgcttgctgtatcttctggagagagaaggttgggatgctaccactaactgggaagatactctatccttgggagagcagcagaggctggggatggctcgtctgttctttcactgtcccaagtatggcatcctcgacgagtgcaccaatgccacaagcgtggacgttgaggagcatctgtacaggctagcaaccaacatgggcataacagtcatcacatcctcacaaaggcctgctctgattcccttccattcgttggaactgaaactcattgacggcgaaggaaagtgggagctatgttccatccaccaataaccgattgccatcaaccagtttatttatgttcaccggagtagggtatttacaagttgcaacgcacagaggaaaaaaaactcgtccactcgggtgtagagtgtgtgacggagtcttttttttttttggtttcccttttcttttctttttctctcccctttgatggaaatcttgcgatacggaaagggagggaggaaggaaatatacggcaggaaaggaaagtattaggagaggttatagatgcaggcttcgtcatttgggatagcatagtacatgttcctggcatgatatgccagcctgattgatttttatacgagatacagaataagttaaaataaaaatggatatggcacaaagtgtgcccttgtaaattaaatgggaaactaatctataggaaattcatcctctctgtgtcgcccttgcatcgaacgtatcccaatccatatgtaatggcctaatgggaagataccgtatgcaatcactcatatttgcgagaaaaggaatcggcaattaaaatactacacattctgtgaggttgtggtgtttggaattctagtttatgctattttagtggtaattatctacaatgttctagaagcaagtcacttttatgatgcgcccgctaacaaggcaagggtattttatagttagaatctaattgacggataccgtacgacaccctaactaaatttaatactcataaaaaataaatttaatatcaaagtactcataaaaataaatttaatatcaaa

SEQ ID NO: 22716 - DNA, 2144 bp, Zea Mays
cagctttgctttgttattgcaaggctaggcaaaagggcatggcacaaggcacccaattgaataatgctaatacagctcaagcgctacaagggatgcagcacatgggtgtcatgggtactatggggatgaaccagatgagaccaaatggaactattccctatggtgctcaacaaaggttcgcccatgcgcaaatgagaccacaagcgtctcaacaacctgcactgtctccacagaaggtgcctggtcaaggtctgtcgaggacagcatcaattgcagcattaaattcacaactgtctggatcatcacaaaatggacagatggtggcaatgtctatgcctcagcaacagcagtggttgaagcaaatacaatcatccatgggctcaccagtttccccacagcaacaatatcagcagcagaggctcctgtttatgcagcaactgcagcagaagacaggattgagccaacaacaacttctccaaatccaacaacagcatccacatctcactgcccaacagctgattcagcagcaacaaattttgcagcagtttcagcagcagcaactgctacaatctccgcgtgtttcagcatctggttcacagaagtctgcgaaccttacaggctcgcagccgggtacaccattgtcaggtggaaccatgactggtggaagtgcaagtcagggagccgaaggaactagccaacttcttgggaaaagaaaaatacaagatctggttgcacaggtagaccccctaggcaaggttgaccctgaagtggaggatttacttctagaaatcgccgatgacttcattgactcggtgactgcatttgcgtgtaccttggcaaagcacaggaaatcatcagttgtcgaagccaaggatgtgttgctgcacttagaaagaaattggcatttatctgttcctggtttctcaagggaggataagaatccccaaagaaattctgtaaagccattggtagatccccaacaatcagaaagtgacgttactggtattagaggtacaagcaataaactaggtgctaataactcagttggcaaccatcaaatacgacctccaatggcagaaacttcggctgtgccaacagtgggctctctatcgaaagcccctcgcttctaagggctatgctgctcttccctattgaaggaaaaattcctgacaatctacgtcgaaaacagcccataggctctaactcaaggattgctagcaagtggaagcaaaataaacccacgagcgtctgtggcaaactgcagatgcttgtgtcttacaggaaagcagttgctgacttaccaatcgtctctggcagatcctctctacctggggtcgtatgtaactgtattttctttttgtgcccgtaaatgcccccatccgttgtatataaatgtttttgcaatgggggcattatcgtctccagttttgatgttgctatgtaggcgaacaaatactaaagtggaagttaatgaagtgtaagattgatgtcgttttccgttactgaacagttgtgccatatctaacacgctggccgtcggtgggaagctttggcatttggagctggtggtcgtttggggccaccaacccgtattccaattttcagatagcgaaaatgcatcgtgttaaggtcttgaacctgtacttcatggctcagacaacgaaagtacttgaagacactttgctagggttcggggctccaaaaacgaaacatacatttttgtgatttcgccctctacccctgaaacggctggaacaacttttgaagccaaaaccaagtcaaaaacggcgaaaccgaaactgttttgttgtagaagccatagccactaaaagatggtttttcctgcattctccgttttttataagcctaagcattataaaaaaacctttggtttcggttttggcttaaaaaactctacttgtatgtgcttatttggtaggacttctaataagccagtgaatatgtcataacaaaagcccggccaaacaatatcggaatcgcaaccatcacgatacacaaacattaattattttggagatctgtcttctgcaacgaggaacgcatcggttgccctgtctagcttgtggaattttgtacattagcagcaacggaggaaatgcacaatttgtcgaggcaatcctact

SEQ ID NO: 22717 - DNA, 1637 bp, Zea Mays
tgctagtaaaaatacagatatacagctggtgctcgtacagtactccgcaagtccgcatacatacacagccacttcatttttaaagcattttacctgtgagctcggattttttaaagtgcagaacatgttcccatcgcctcaaatccagcgccgcaccaaatccgggacaagaatttaccacctctccatccatctcgttgcctgcctgcctgcctcgggctgcgactccactggacgaccctacttcaccctggtcttccaccccaccccacgcacacgaagacagagagagccctccgggcgtcgattccgccatactgccaccattactgacgccccctcaccgcctccgggcccaacgagcaagccagggaaggggagccgaggcctcgcctacgcctaggcacgcccctccccctgcgcgacatgtcaggggaccgctcgcccacggtagagcgccggcgggggatccggcgcctcctgctgcatccccgcggcgaggcctcctcgtcctcgcctccgccgccggcgccggcgcctgaggaggggaggcggaaggggttcgccacggcggcgctgcgcggcctgggctgcacgtcggcgtccgcgtcgcaggcgtacgcgcccggggaggccgcggcggcggcggccgtgcggtcgtcggcggactggcaaggtcggcggcgcaggagggggagggacaggaggaaggagcgtggcgggggcggaggaggaggcttcgtcaccggtgggatcggcgccgacgtgtggtgcgcacccggcatacccttcgcggcggaggcgtcctccgtgaactgcgtggtggcgcgccaccagatggtggggaggggcggccgcggcgccgagggggacaggtcccacagagagaggccgtgcttgtcccggagggtgaccgtgcaggagcagatatcctcgtccttcatggactcgccgccgccgccgcacctcgatgcccccttattcggcgccgatctcatcccctccggccgcctccgccggatgcgcgggtggcgccactcccccggaggactcgaggaagagataaggatgtttcagacaagagtgttactgggaggaatgaacatgtatgaccgctaccaggattggcgccttgacgttgataacatgacatacgaggagttgctcgagcttggagacaaaattggatatgtcaacacagggttacgtgacgacgagattactcgcaaccttcggaaggtcaagcacccatccttcagttccttacggttcgcaacagaaatggaaagaaaatgcagcatttgccaagaagaatttgaaacaaatgaagagatgggaaggctagactgtggccatagctaccatgtgtactgcatcaagcagtggctctcgcagaagaacatttgcccagtttgcaagactgccgtcagcaagaattgaaatccaaactccagtcacgctaaagaaaatgccatgttttggtcatgttccagcaaactacagacttgataccctcttatcttagagtgattaggaaaaggttttgcagtaacagataggatgaacctctttcataatgtatctaggctctatttagattttgtggtctttaacctatttagattccatggtcttag

SEQ ID NO: 22718 - DNA, 2089 bp, Zea Mays
ccgcgactgccgaggcagggtctggggccggtcagtgttgtgccgcccgttgaaaccaccacgtaacgtctcggacggctagacgcggtccacgctagctccttgctatctccgtcctactcctcctcatactttaccgcaaagcgcgcaccacgaattgcacctacccatttcgctaatctccctccacgagccgaccaaatcgaatcgaatcgcgcgcagcgcgcccgcgcagcgattgccggcgatggcgagcctcaccctgccgccggcgccccccaacccacggcaggacgccatcgacctccaaaaggccttcaaagggtttggctgtgacagtacaacagtgataaacatacttactcatcgcgattcagtgcagcgtggactcattcaacaggaatacagggctatgtatcatgaggaactctcccatcgcatttcatctgaactcaatggaaaccacaagaaagctatgttgctgtggattcttgatcctgctggacgtgatgcaactgttttgagagaagctctaagtgttgacactatggatctgagagcagccactgatattatatgttccaggacgccatcacagttgcaaataatgaaacagacttattatgctagatttggtacttatcttgagcatgacattggtcaccacacatctggcgatcaccagaagcttttacttgcctatgtggggattccacgctacgaaggtcctgaggttgatcctaccattgtgacacatgatgcaaaggatttgtacaaagctggtgagaaaaggctgggtacggatgagaagacctttatccgcgttttcactgaacgcagttgggcacacttggcatctgtttcgtctgcctaccatcatatgtatgaccggaaattagagaaggttatcaagagcgaaacatctggaaactttgaattcgcacttttagctatcctcagatgcgcggaaaacccagcaaagtattttgcaaaggtactgcgcccatgttgttttcagtaaagaaatattgtagattttgaaatcctgtgcaggcaccataggtgtataaaatcactgattgatttagagtcgagttatgttttgctgatagatttagccatagccaacagctgttctttcttacgaaattataatttaacatttggtgaagcaaagatcactagttgatatgacactgatataaagtttgctgtaccatctagagttgatctttttatttcttatttcaattatatgtaacttgccaccattccaaagtgttattttctgctaatgctgcgaaatgagcatgttcaagattgctcttgtatcttcggtgccgaatacagctcttacgaaaggccatgaaaggtctaggcactgatgacaagacacttataagggttgtggtgacgaggactgaaattgatatgcaatatatcaaggcagagtacttcaagaagtataagaagccattagctgaggctatccactccgaaacatcaggaaactatcggacattccttctttcacttgttggtcctggacattaggttatgtttcgaccatgggacatgatattccatccatccaccctaaatgcagcgacctacctggaaaacttatgatgttgccatttgtcagtggtgactcgtggattcgtctaacttccacatatgcggtatctagtatgcttgactaaagtattcgtgtttaaatttgtatctgggtttcttgttggaaaattctgtgcgggggcacaacagctgttgttggtcacgctaggcttgacttgtgtctccatgacatcaataatattatgtcatgttcgtgtgtggtcattccactattagagaaagcaccatatgtaccggttgggaattggctttaaagaggagattttagtaccggttcttggtatgagctgatactaaaagttacatatttagggctagtttgggaaccacattatttgaaggaattttcatttttcaagggaaattagtttattttcttatgggaaaatagaaatctttcggaaaaacgaggttcccaaactaggcttaacattagttcattccactggag

SEQ ID NO: 22719 - DNA, 2238 bp, Zea Mays
cgcgtgccatctatcagtgaatcaacgatacacaatgaggctgtggaggcggatacagtatgaggaaaggaaatgtgccaatcagagaaagcttctctctgatgcagagactgtcaggtggcttaattacgctgtggaaaagatttggccagtttgcatggagagggttgcatcccagcagttccttttacccatattcccgtggttcctagagaagttcaaaccatggacagcaaggaaagcagtaatccaaagcctttacttgggtaggaacccaccgatgtttacagatattagggtagttaaccaatcaaccgatgatgaccacttgaccgtgaaacagctaaaatttacatgccaggttctagagatagggatgaattttctttcagctgacgatatggatgcaagaatggctgtgcaactaaggaagagattaggatttggcattacaacaaacatgcatataactgggatgcatgttgaaggaaaggttctggtaggggtgagatttctgcggcagtggccatttattgggcgtgtaagagtatgctttgttgagcctccatacttccaaatgacagtgaaaccgctgtttggtcatggacttgatgtaactgaactcccaggaatttctggatggcttgacaggatgctggatgttgccttcggacagacacttgtggagcccaacatgctagttattgatctggaaaagtttgcctctgaatcaacaggcccattttcctttatacacttagctaaatcacttatgcttaggcatgcagctgtacaggggaaacatttgttagctgcagataactggtttagtgttgatgagaagccacctatcgcatatgctcgagtggagatcctggaaggtgctgatatgaagccatctgatcctaatggactagctgatccatatgtgaaaggacaacttggaccctaccgttttcgcacaaagatccataagaaaactcttgatccaaaatggctcgaggagtttaaaataccaataacttcatgggaagcactcaatcttcttcatcttcaagtccgagataaggatcccatttttgatgacgctcttggcgattgttccataagcatcaacaagttaagaggtggaataaggcatgatatatggattgcactgaagaacataaagacagggaggattcacgttgctgtaactgtacttgaagaagaaaatgaaaaggtttctaatgatgaagaggaacagtgtggaatacacaaggttgacaaggctagcacaccgaggtcaagtttctcctccaggaccaaccatgaaagtgaatgttctgatgaattccggaagatgtctgatgaatttgagccagttgacatagaaggatcggaaaagcccgatgtttgggtgcatcgccctggcagttatgtcaccagtacatgggaacctcggaaaggccgtgcccggtgccaggattccagaattcaccgggagaatgattcttgtagtgatagtccaaggtcatcagtgtcaggatctcatagaagtgactccagcactgaagaacccacgagcagtaaatcgcatcgccaccttcaaaaggtcaagaagggtttgggcaagctagctggagcagtgctccaccggagcccaaaggagaatgatgacgaagcttccccatgtgtaactcctcaccaaaacattcgaccggtcggggaaagcagggtttcagtaacatatgtggtcgatcaagatccagcaggggttgacggatcggggtcgagacgagatgaccaccagcaaagccctgagagagaggagctggacagcccgagtaaaaggcatctgaggaagaaggcggtgcacatggtgaaacatgctgggaaaaccgctcataacctaaagagcatgttcagcaagaagggccttgacaagagcaaagaagaacaccgcagtgatgaggaatgcgacgaggaaggcgacgttgttgctgctagaagagtgtagaatatgcaaggcttagttctattcctttggggttgtagtatacatatagtatgtactgatgaagtgttgcacaagaggcgcttgggccatgggtctcatcggctaaatagagtattacataccacatttgacaccctctcacaaacctagacttaggtgaagcttttgatcatgaatacgttccgtttgacggtgttacactgattttcgacgactactaaagtcataatatttagacc

SEQ ID NO: 22720 - DNA, 979 bp, Zea Mays
attggccaagtgtttatagatggcactgacatctgcaccattggactacatgacctccggacaagattgagcaggtggtggcaaatcaaccttgattcaggcactatttcgcattgtggacccatgtattggccaagtgtttatagatggcactgacatctgcaccattggactacatgacctccggacaagattgagcatcattccacaagatcctgttatgtttgaggggaccttgcgaaccaatattgacccccttggggagtacagtgacgagaaaatctgggaggcattggattcatgtcatcttggggatgaagttagaaagaacgagcttaagcttgactctacagtgacagaaaagggcaaaaactggagcacaggtcagcgtcaacttgtgtgtctgggaagggtgattctgaaacggaggaagatcttggttttggatgaggcaacttcatccgtggatccaattacagacagcttgattcaaaaaaccttaaaacaacaatttctcaaatgcacaatgattacaatagctcaccgtatcacatcagttcttgatagcgacaaagtcttgcttctggataatggtgaaattgcagagcatgacgccccagcaaaactgctagaggacagttcatccctattctccaaacttgtatctgagtataccatgggatctgataagtggcgaatgcaagaaagcagctaaatcaatactctacagataatacaggacaaacgccctaggaagtgtgagtatctacgtgtcaccaattttatagcttaataaaaagcaaatttttaaaaaacaaaaaaaaaactatgaatatccatattccccaaggcccttggaagtgtgatatatttgtttcattgtatactagttaggggcctgtgcgttgctacagtttctatatatcacattgataaacttgctttattgagataacttttgaaacatgttcaattgagc

SEQ ID NO: 22721 - DNA, 133 bp, Zea Mays
acaatgttcaggctcacaacatgcaatggtgcatcatagaatgcaacggcagtaattcagagccagtccttttatcagtgtgatcttaggaccagaaagctatcagtagatgaccttgaatagcggcacagca

SEQ ID NO: 22722 - DNA, 1197 bp, Zea Mays
tccgtggcttcgtgcgttcaatttgcttgtggaacgtggaagaagagcgagaacgccaaacgagaaaagaaacccaagccttcgccatcaaaaaaaaaagaaaaaaagaaaaaaaagagcagaaaaagtagagtagactacgacagcgtccggcgaggaggcggaggcgaagatgaggaagaagctcggcacccggttccccgcggctcgaatcaaaaagataatgcaagcagatgaggatgttggaaagattgcactagcagttcctgttttagtttcgaggtctcttgaattgtttttacaagatttaattgaccgtacttatgaaattactcttcaaagtggagcaaagacactgaattccttccacctcaatgtgtgaagaggtacagttcttttgatttcctaactgaagttgtcagcaaggtaccagatcttggtggcgctgattcctgtggagatgaaagaggattacctagaagaagaaagtcaaatggcagtgacccagagaatgatgaatcaagatctagtaaaatggccataagaaatgcaaacatcagccccagaggacgtgggaggggtcgaggcagaggacgaggtcggccaccaaccaagagaaaggaggttggttatgtacaatttgaagatgagagcagcatgtttgctgaacaaggtgagcccttgccaggagaggaaacagttcaagagatcaatggcaacgagaccatgcctcaaagcacgcaacctccagtagaggctccgccaacagcccttgcacaagctacaacaagttctaaggcggaagaagcgaacagtgatcatcagtcagattggcctatgccagatgccattggaagcatcggtgtcgtgccatctggttttggacatctgacagtgcaggttgaagatgaggactacgacaatgaggattagtcagggtcatcttctcattgtatgcactaacaggactgttctggtgttgtaaaatgtaaatatagtttgaaatagttgccgcagtttacctgtgattgtctgtcgttttatgcggttatgtagtcctgtgtaactttcgttctccaataattgcttggtagttgcttttttacatgattcaagtgttttgtgacatttaacacagtatttgagcagggattgcctattttaagtatttttgtcttatttcaccgcagtctttga

SEQ ID NO: 22723 - DNA, 3599 bp, Zea Mays
accaaaccgccgctcgcgtcggtcacgccaggcctgacgcgagcacatcgcaatcctagccaccaaaacaatgcccggcggcaagcgccgccgcgcacgcaaccccaccgccggcgggcctcagcgtagcgccggcgcaggtcgtcgtcgtcccgtccccgagctcccgtcttttgtctcccccgcttctgtcgccgccgccttctcccccgcctcgggcggccgcagccgcgggcggtgcgcccggcgttgcggcgcctactccgatggcgagtcctcccacgccgtcccctttagctatccttccctccgctcctgctccgcttatccggagcgtgatcaggcgcaggcactggaggtgaccatcgacaccgcaccctgcgccgacccagccgcttccgtcccgatgtactcgtacggccccgccgtgctcggtgagaccgggcttgtgctgagtgcggacgaggaggaggcctgtgatagagggctgcatctcgggttaggattccgggatggaggacacgatgagatggagctcaaattgaaagagctgacagaggaagatgtctccttcaagacgcccaagcggaagcaggagcagagggcgaaggccaacccaggatttttgttgattgggggagtcaggatttacacggaggacatctcatcatcagaatcggatcggatgagcagctctgatgtggatttagagcccaactcaggtgatggggagagatttgagaatgatgatggtgacagtgacgaggaagataggcaaggcgaggagagagattcaatatctgatagcgagtcattaggatcggaatcagatgaagatttgagcaccggggattcttcttcagttgacaatgaggttgttgctgattacatggagggtattggtgggagtgacgagctgttgagcagtaagtggatcactagtatgaatttgggtgatgcagatactatagagcagatgtatacaaatgacaatgatgggtttgtgaagaaggggaaggaaaagcttgagggttatgcactaatgactgcatccgagcagtatgggatgaagaggcggaactcccttgagcagcggaagggaaaaggaatggtttgtgacagggatttgtcaagcatgcaagtgatggaccaggaagatatgttcatggtgaacaatgtctggatgccaaacaggtcaagaaaggggatgaagacaggatcatcatcctctcagctctcacagtcgtggcctaaagatgataggaaaagcaaaaactatcagagcaggccaggtgaaaagaagcagcataggaaggaactcattgcaaagaagcgtcaacaacgagctctaagcagaggagttgacttagggcaaattaatagtaaattgaggaaaatggttgtggatcaggttgacatgttatgttttcatccaatgcactctcgagactgttctcaggttcaaggctgtgcttggtacgacaagagtaacaacaacacgagctgatgtaactactgctaatgcgcaacacccttgtggttgttgtagtcggatagcacaacgtcgacctccgccctagatcgtagttatctggagacggtgtacctgtcgctcaaggcgccacaccatcttggttgtggtagtcaggcaaccaacggcgacctccaacaaattttcaacctccatcatctcatcgaaagatcgggctccctcctacctgaaaaaagcttaggcgagccagaacagctctccgctgctggcaaggatagccttgctgagcgaggcgaggcaagttgagcaggacagaaaaccaaacatgccctgaattgctaaagcttgaggtacaacgccttgcatctatttatcaattgaagagcgggtgtcaaggttctggcaagaagagagcccaggcgatttactgcaaggcagcaaggatagtggtttacagaacatctttgcatcatttgtcatgcagtaatagttcaagggttcctgagcagttgtggctgttgcagatcatcctgattacacattactgattctttcaatgaaccattatgacatcatttttcgctacacattcttagtcaactcttgaggtaggaaggtgcatgacctctcccgcaacgagccatttgtcttgtgtggacaatggtaaaggttttaggggcttactcaaaccactccctttgtttgcattggcactgatacaagaaacatgacactgacattcttgtcatgttcattgcacatactgtctgataaggacaaatatgtaaccgatgtgtccctgcatgtagctactaccataacctggttaatggttatattgctagcttgattatgggttaatgagctggaggactttgcacctgccatgaccttactgtgctcattgctgaccaattccttgtgttacatttcaaaattattactaaaactcacaccggtgagtattttgccacaatattttgtacctcaacattcttactggaagtttgttctgttcatttgtatctaataaatttaaaatgtacaaacctttgttgttattgttattaaggatcttatttgcttggtttatttcgcatttatatagcttatccttcctgtcaaatcaataattcttccttgcagatttgtaactgtgacattgactgggcactcttccttgccatctgcagatggccaagttcgacttgaaaagcttttggggactgaatctgagaactctgtctcgagctctaaaggcccagcacgactgaagggccattctgctccaggaaagtgtgtaaaacactgggaatccagtggaaataaatctaccaagaaacaggtctccttcgcagagcgtccagtatcttttgtcaagtgtggaaccattgtggactcccttactgaggcaatagctggcccaagtggtggtgatacctcgtgtgttaaacctgttgaaagtaactccacccatctaggctcctttgaggtgcacaccaagggctttggttcaaagatgatggccaaaatgggattcatcgagggcactggccttggtaaagatggccaaggtatagtgcagccgatacaagccgtgcatcgtcccaaatctcttggactaggtgtagaatttgacagtgtggctgaggcgatcaaagcaagggcagaacccatcaaattaatttcagagctgaggcggaatgtgtgggcaccagagacgagtggcgttggctcctttgagaaacacaccaagggttttggctccaaaatgatggtgaatatggggtttgtcccagggtccggactggggaaggatggccagggcattgccacccccttgaccggagtaaggcgaccgaaatcacggggactgggagccgaggacaaatattagcttacaccattttcgcatttgatgtatctttcttgtcgtgttccttgttacatgcggattacatagtttgctgggagggcgaacctttgagcaccctgaatggtgaaacaatgggttttcacttgtttctttcaacttctcaatgaagttttatatatttgttctatcaatgttatatttgtttcatttttctatggcccttgcttgtgc

SEQ ID NO: 22724 - DNA, 4171 bp, Zea Mays
gccgcggcggcggctgacgggctgagaataggagagagaaacccctctttctcttcctctccttctcgacgaacccgtcccacaagcacgtgcgagccaaggcagacaagagcgaggtggagagagggagagagagtgagtgagagaggaaaaccccgcccccgtccaggcaaccttcgtcgacgcatacggcggaggccacagaggcgccacgcgagggagccccgccgcagcagcggccgcgaattcggcacccccggatctccttgccggcgcccggggccccgatcgcctcctccccatggtcgtgcccctccgggcgttctcctcgcgcgggcgcctgccatgtcggacctcgcttccaccagcaaggataaacttgcgtattttagaataaaggagctcaaagatatcttaaatcagctggggttgccgaagcatggaaagaagcaggaccttgttgacagggtattggcagaattatcagatgagcaaggtcaacgccatcatggatggggaaggaaaaatgctcttacaagggaggcggtggcaaaagttgttgatgacacatacagcaggaaaatgcaagtatgtgctcctgaccttccctctaggagtcacagtgggtcagatttcaatcattttaggcccaaagaggaagccactgacttctactatgtggagactaaggtccgctgcctttgcaatagcacaatgctaaatgacaagattatcaagtgtgaagatggcaaatgccagctgtggcagcattttacctgcgtactcattccagatacacccacggagggtgctggccctgatattccacctcatttttattgtgaactgtgccgactgaaccgggcagatccgttttgggtgactacagcaaatccactactacctgtgaaatttatctcatctggtgttggaaatgatggagcaagcgcacctcaaattgtggagaagaccttccaactttcccgagcagaaagagaaacagtccagaggccagaatacgatctccaggtttggtgcattcttgtaaatgacaaagtccagttcaggatgcaatggcctcaatatgcagaattgcaagtgaacggtattcctgtacgagtaatgaccaggcctggttctcagttactagggataaatggacgtgatgatgggccactggtaaccacatgcagtagagaagggattaataaaattagcttatcaagagttgatgctcgaaccttttgctttggagttcgaattgttaggaggaggactgttcctcaggtattaagcttgatcccaaaggaaggtgaaggggagtcttttgaggatgctcttgctcgtgttcgtcgttgtcttggaggtggaggtgctacagacaatgctgatagtgatagcgatctggaagtggttactgaatctgttacagtcaaccttcgttgccctaatagtggatccagaatgaggattgctggaaggttcaagccttgtgttcacatgggctgttttgatcttgaaacttttgtggaattgaatcaacgctcacgcaagtggcaatgcccaatatgtttaaataattactctctcgagaacttgatgattgatccttatttcaatcggattacttctttgttgcacaattgcagtgaagatgttaatgaacttgatgttaaacctgatgggtcatggcgtgtgatgggtgatgccgctaccagagatttatctcagtggcatatgcctgatggtactctttgtgactcaaaggaagatacaaaccctggtgtcgcaagtgttaatgagttcaagagagagggtgcttctgatgaacatagaactttgaaacttggaattaaaaaaaaccctattggattatggcaggttagcagtaaagcagatgatatgaaacctgtggttagaaatcacatccaaaataacactgggttttcaacaccaaacattgtgcctatgatcagtagccccactgggagttacagagatggcgaagatgtaagtgtgaaccaagaagggggtggtattcaatttgatatatcattgaaccaagagtttgacagttttgcccacaactttggtcagacatacaatacagaggatagaccacaacatccacaccataatgctgcagatgtcattgttcttagtgattctgatgaagaaaatgacccgactgttcagccgccagctgtctatgaaaatactcctacaaatgatgacagttttcctttcgtcactgatgctgccggatctggatatcctgaaaggtaccaggaggatgctagtgttggtacaagtggtcttggtttattgaggcagaacactggtgaatttgaaataaataactggcaaatgctttcttacccacaaccagagcaagggtttcagttttttgtgactgatactgatgttggcaatccttttgttgctccacataattcctttactattgcaccagaagactactctcttggctgtaatgttggaatagaggacccctctgcagctcacgatgtttcaatttgccgaaacagtaatgatgtgcatggaagcttggttgataacccactggcattaacaggtgacgatccatctttgcaaatttttcttccaagtcaaccttccactgttccccttcagcaagaattgagtgagcgttctgatactccaaatggagtccaccctaacgattggaggatatcgcttacgcttgccgctggtggagggggcaatgaagagtctacaagtgttggcggtctaaaatcacaaccaaaagtttcatcgaaagaggcaggagttgaacctttacttgatgctgcctgtcaagcatttccaggatcatcgaggttaacttttgaagcttctgctcttggaagcatgaacaatgacagatgcactggatctaatctaaatcctaaaaggattgaaaatatattttctcatcctcgccaaccgcggtctgttaggcctcgtctgtgtttgtcattagatactgattcagagtagtttggacatcacactgggatagctgaatttgctattaatctggtaaagttggcttccagaatcttgatcgttactgtggagggctatctggttattctggttgatacaaagagatacaccagtgtggatgctttgttgcattaacctggtaagattcaagtgttctatatgatccaagtgggatctgcatagagttcatctaatggttggtacaggatattttctaactgggagtggtttaatgtggctagtggagcaggctgtacattgtccctgacatttactgggtataaaggaatagggggccatcacttggcacaagacaaatacatgtgttgtgtgtaccatcattgtatttagggtttgggtgctaatttagatgtttattaccctgacgtttgatggagaataaattattccttgaagtggtggtcaataaacagagagcccttcggttttgagtcggagctgctgaccgttcatctgttcttgttgcgaagtggtcgctcccgctttggttcagctgcagctttcatggcgggactgaccatgccaaagtcttgtgtagcagagggcaatctccatgatgtcatgcgatacaagtgatctgtattttgccctacaggatgacaagtttctttgtgcaacatgctgtattattggttcgatactctttactatgtgggttcagtgcaggtgcataggacataccggcagtctccggactttgctgtgatctgcctggagcagagcatctgccgcctatcgcacatgtaaacttgcaggtggtggtggattgtaccagctttatgaaccctggcgattgaaaggcgctgggattgagtactgggtacgaagaacgtcgtttctttcagaacatgaaagcacatcgtcggtgcacagatggtgaaatcatgctctgggcgcaaataatatatctgttgctcggctgaccatcctctgatgccagcttgatcggtagaagacaggttgttaaagtaattgtaggaatgtaacttttagggctagtttggaaacttaaaattcacttttagatttatgagaattgagtagaaagttagcttatttccctggagaggatttaagttttcagactagtccttagctataagacatcatgagaatatca

SEQ ID NO: 22725 - DNA, 996 bp, Zea Mays
catgcatagcccctcacgccagccgccaacgccccaatcccgtaaccgcagcctcgccctgctcgcatcttcctctccctctcagcgctggtgctcaatctacaggtcgtcccgctccctacacacccgccctccggtgtgaaccttcatgacgtccgcaaccactctccgatctgctgtcgtgacctcatccagccgtgctgtggcagtggatcggagttcgctccagctctgattgaattccactactatatgtgccacttaaagttgttatgtcaaaatattatggtgaaagcgagcgtctattgggatctattttttatcttgcaaatgatcttcctgaaggagattgatatgtcaagatacgcttgtttcatttgagctcactgttatctgaaaatctatagactgccttcgtccccttcatcactgccaatgaccgtgacttggccaccacagcaaaagcacgcaggatccttgatgtgtgtggtctagacgtgattgaattgggcgtgcctgactttgatccattagccgaatgtccagttattcagctcagattgtttgcctatacaatttgttcttatactatactgtctatgtatgctcctgcttcctgcgttttggtccagtagaagggtgcaagctcatcagaaaagaaaagacaaatccccacgtccagagttacaagaagatcaagcttggctgtggctgcagctgtgttgcctcctcttgttggaccgaagagagggaggggagaagcagctggcgtgcagacttctactcaggtggtcttttattctctatggggcttctaggatacatcttctccagaagcaccataagtcttgtcttgggcattacaccagggctagccactctgctacttggcactctcagtctgaagttctggaggagcgacagatccagcttcctgcttatcttggctcagaggtgatgctgatgtgcaagcatcttcaccttgagttctgccta

SEQ ID NO: 22726 - DNA, 186 bp, Zea Mays
agcatatccatcccctgttcctctctactgactcatacaccaccgacaacaccatgacgacgaagaggtgttcttgtcctcgcttcatgtatgtgataacgatgctcctggctgtcatcgtgtcttgctatatcattgtcgactgctccgccgaggtccaagaagctcagccagacggagggcatg

SEQ ID NO: 22727 - DNA, 2026 bp, Zea Mays
ggcacctcttgtatttgcattcttcccctagcaacctctatgctgggttgaacatatgtcgttggacaatgaaactggattagacaaacctggaataagggtcaggtcagtcacaggccttgttgcagcagactatttcgtccctggatattttgtttgggctgtcttaattgccaatttagctcgtattggatatgaagaaaagaccatgtacatggctgcatatgattggaggttatctttccagaacactgaggttcgtgatcaaactttgagcagaataaagagcaatattgaactcatggtagcaacaaatggtggaaatagggtggtggtgatcccacactccatgggggtcctctattttctgcattttatgaaatgggtcgaagcacctcctcccatggggggcggtggtggtccgaactggtgtgagaagcatattaaagctgtaatgaatattggaggacctttcttaggagttcccaaggctgttgctgggcttttctcatctgaagccaaagatgttgccgttgctagagctatcgctcctgatgtcctggactctgattttcttggacttcaaactttgcgccatttgatgcgtatgacccgaacatgggattcaacaatgtcaatgcttcctaaaggtggtgatacaatttggggaaatctggattggtctccagaagatggccttgaatgtaaagctaagaagcataaaaccaatgataccgaggtttctaaggatagcaatggggaaaatatcgaagttcaacctgaacctataaactacggaaggctggtatccttcggtaaagatgtagcagaggcaccttcttcagagattgaacagatagaatttcgtgatgctgttaaaggtaacgatatcgtccattcaaatgcatcatgccgggagatctggacagagtaccatgaattaggatggggtggaataaaggcagtcgcagactacaaagtttacactgccagttctgttatagaccttcttcactttgttgctccaaggatgatgcagcgtggaaatgtccacttttcatatggaattgctgataacttggatgatccgaaatatcaacattacaaatattggtcaaaccccttggaaacaaagctaccgaatgctcctgacatggaaataatttccatgtacggagtaggcattcctactgaaagggcatatgtctacaagttggctccacaggcagagtgctatataccattccggattgacgcctcggctgatggcggggaggaaaacaaatgcttgaaagggggtgtttacttagctgacggcgacgaaactgttccagttcttagcgcgggctacatgtgtgcaaaagggtggcgtggcaaaactcgtttcaaccctgccggcagcaagacttacgtgagagagtacagccattcaccaccctcaactctcctggaaggcaggggcactcagagcggtgcacatgttgatataatggggaacttcgctttgatcgaggacatcatcaggatagctgccggggcaaccggtgaggaaattggtggcgaccaggtttattcagatatattcaaatggtcagagaaaatcaaattgaaattgtaacccatgggaagttaaaagaagtgccccaacccgttcattgcgttcctaaatgcttgcctgagcgcaactctggattttgcttaaatatcgtatttttttcacgcctcattcgtccctctagtaaatttacattgacaggaccccggtgcgacgcggatgttgtaccgtatttttggcattgtatattaaaatgtacaggcgtaagttacatttgctagctgaaattattgcagtagcttgccttttcttttgagcacggaagtgtgctctccattacgtgataacctgtgccaaatctttgacaatcatatcctgaatataagatggaacattatttcgttgtgtgaccatattacaagagcggggaatgtaattgactatccttgacacaaaattacataacagcaa

SEQ ID NO: 22728 - DNA, 1819 bp, Zea Mays
agagggggaaggaaccgcctccgctaatctctcgatctatgtatgcatgcgtggtgcggaaggagtcaggagcgagaggagaggactcgggcaaagcagcaaccgccgccccctgcgaaccgctcgttcgccggcccttgatttataaaaggagccgaggcctgttcctcacttgagaagaagacaagtgagaacaatcatatatatattgttgcttaaagagaagagaagagaagagaagatcgacaagagattggcggtaatggactcctcggagctgcacatactggccttgcagagggtgaagcaggtggagccggagaacgcgagcaagatcctcggctgcatcctcctggaggaacccgacaaccaggatatgctgcagctcgcctacggcaacgacgccgaggtgcacgccaagatcagccacgccaaggccatgctggacgccatcgtcgcgtgctgctcctcctcgccggccttcggctaccactactggccgccggtgcccaataaggcgcaggcagaggagtacgcgttgcagccgcagcactacagtggcggagggtgctactacgcctctgagaacgcgctcatctacaatggcggggggccgccgaggtccaggctgtcgtcgacgcggcgcccctgccactacttcatcaagggaatctgcaagaacgggcagagctgccactactcgcaccaccggcaggaggcccaggtctgctccggcgcgctggagaagctggagctggagatcattgagctgctcaagtcgcggcacgggcagccgctgtccatcgcgtcgctgcccacgctatacggcgacaggccgcacgggcagcactatgtggttctggcggaggacgccggcaggtacaaggagttgatgagcaggggcgagagaggaggagacatgggcagcagctcgcaccaggtatacctcaccttcccttcagagagcaccttcatggaggaagacgtggccaattacttcggtttgtatggttcggtgcgcgacgtgaggatcccatggcaggagaaacggatgtttggcttcgtgagcttccacaatccggagacggtgaacaccatactcacgatgcgcatcccacatttcatcggcgaatcaagggtcctggtcaaacgctacatagagaaatccaagtgcatcgaacgctatcgtccgagggcgcttcgtcgcttcgtcggcatggacatggacatggacatgaacgacgatgatgatgactacgacgaccagcctccagcccggatggtgatgaggaatcagcaacgactactggcgacggagaagcggctgatcgagctcgagaggaagcgcttcttcgcgatgccgccgcagcagtaccagcacgtctacttcgactgcagcatcggggacgacgacggccagggccagccaccaccacgacatcttcccctcatcataacccaaccagctcgggcaagcagcagcagcagttacgacgacgacgacgacgacatccaactcccagaaagcccattcacgtcgtcagccgtgccgatgctgatgtaatgggccgggaaagggaaaccaaggtccacttaattagcttcctttgttacacaggacaggacaggacacaaaaacaccctcttttttgttgtagatataaacaaattaagggagtcacagtacacagagagagttggtgttcttagaatgcaggcacactggtgagttttaaacaagggtgccagaaagaattacttattagctgtgccataataataataagatcgtcgtctctgtttgtgccttcaaaaaaaa

SEQ ID NO: 22729 - DNA, 659 bp, Zea Mays
gtccatatttgggtaggtcccgatgtcggtggggagtttgggccttatcgccagtcagaacggaattcacttcaagaagtatgccgagaagcttttggactctggtgcggtttaccgctacttttgctccaatgaggaatttgagcaaatgaagtagcaaagcagagacaacttcctcctgtgtatatggggaagtgggcaagtgcttctgatgcagaggtacatcaggagttagagaaaggtacgccgtacacttaccgcttccacgtgccaaaggaagggtcattgaaagttaatgacttaattcgtggtgaggtcagttggaacttagacactcttggtgatttcgtgattatgagaagcaatggacagcctgtgtataacttctgtgtgacagttgatgacgctaccatgcaaatatctcatgttatcagagctgaagagcatttaccaaacacattgcggcaagctctaatttataaagctcttggatttgcaatgccttcatttgctcatgtttcgcttattctggctcctgacacaagtaaactgtctaaacgacatggagctacttctgtggggcagtataaagagatggtcaattatttagcactactgggctgggtgatggtactgaaaatgagttcttcactatcgaa

SEQ ID NO: 22730 - DNA, 191 bp, Zea Mays
tcggccgccacaaacctgagacccgccacacttctccagagtgccagcgccggccctagcacctccaccgcaactctgacgcttggaccactggatctgctgctggccgtcgaccgccatcagaagggacttgttgcaagctgaggacaccaggaaacccttgtttgctactgctcaagatgggttcaaag

SEQ ID NO: 22731 - DNA, 1003 bp, Zea Mays
gattacctcctaccgtccgacccggctccctcggtccctccctcggtccctcccggtctcgcagttcctccccgtcgtcttccaccgcaaatcgccgaagcaagcaggcgagctcgggaccagatccactgcgggcagctggagcggaagggccatggggacgccgccgcctttccaggagtccggccactgcgacgtctgccgctgcaccttcaacaccttccgccgccgtgctctcccgcagtatgggatatatacagacgtcagagtctgctacggttgcttcaacaaatcctccagccaaggacacgctgataatccggtgtcagctggtagcatttctggagcagctgactctttttcagggctgagtttgggtaaggaggatgattcgtcgcctatgaagaattcaacggttcagagcacggcagcccttattgagtgcaaatgtgggatgcctttgtgtatatgtgaagcaccaaaaccagaaccttctcctacacctgtaaagaatatcaacaccgttcccccaaccacacagtcaaatccaaggccaaagaagcctgctaacactcaacagaaggcttcagctacttccagtagcaactcaagcccattcttaaatattggattaatgaacaacgatagcaatgataagggcattgttgactatgaagttagtggggagggactgagagaagcaattaaaggcggggatgttaagggtgtaaagaaacttcttacacagggagtggattctaactactgcgacaaacaaggatttactttgctgcatttggctgctttgtttaaccaaactgaaattgctcttattctcatggaccatggggcaaatgttgaaagcaaaaatgggcaaggggaaactcctttggactgtgctccggcaatgctgcaatacaaaatgcgccaacgggtggaagaactcgcggcttcggcttcgaagggaccactaggtcgtggactagcggacgaatgaaacgcg

SEQ ID NO: 22732 - DNA, 10022 bp, Zea Mays
atggacacaccgacgcgagttcttccccctgctgggcaaatccgatccataaatgtaactccgggaaggctcaccgatggcttgttacccttaccaatgatgaacatgggcccagatttgagccgggtctggtcatggttcgtggtcccatgcagacttgatgcgtgtaggcacacaacagcaaaacagctatttgaggagatgccgtcattgtcatccttactctctggctccaatactgcgagtgctgagcttcctctaatcccttgcaagctctgcaatggggtggtgattgagcgggtctccaaacaaccagaaaccacgtcgaggaagttctaccggtgcagagccaagaaaacggttatttctcaatttttgctcaattggtaagttatatggtttgggtaattttgagggcccaagtctctcttctttacaggatgggtcttaatgtgattttttccactggcaagcgagctatgttgttttgttaatcgaggatgggtttgtcagtggtgatcgacgccttgagttgttaatgatcgcacttaatgatcatggcaaagccgttgaatctctaaccaattccatcagagagatgaagaaaaagctgtccaacctggagttagtgatggaagagctggataacgtgaaaaatttgatgaaggcagccatggttgaaattgaggaaaacaagaaatcgacagctgctgcattgaaactgatggagaatgagctgcaaaagctgaaagggtcaactaaagtgaaacctaggaatatggcacagtgttttctgcttttggcattgattgggtgtgttatgttccatgtcccgtgtcactttctggagtctaccgtggtgctcctgctaagtgttgagtcggatgttgattttgggaggacccacgggcgaagggcgtgtcactttcatgaggacccacgggccgaaccccgtgtcactttcatgaggtatagtgttgggttccttatcagagttgcgttcggatatatagagttgtgttcctccaatctgtgctgggtttcagggttccatgttgatttttgggaggacccgcggtcggaagcccgtgtcactttccggagtctacagcgttgcgttctgaatgctagtgttatgttccatgtcccgtgtcactttctggagtctaccgtggcgctcctgctaagtgttgagtcggatgggcggatgttgattttgggaggacccacgggtgaagggtgtgtccctttcatgcggtatagtgttgggttccttatcagtgttgcgttccttcaaggcgttgagtttcagggtcccatgttgatttttgggaggacccacggtccgaagcccgtgtcactttccggtgtctacagtgttgcgctctgaatgcttgtgttaggttccatgtcccatgtcactttctggagtctaccgtggggctcctgctaagtgttgattcggatgggcggatgttgattttgggataggactgggcgttcgggttacccgattagttcgggtcgggtagttcgggttttgataaattcgggtaatagaaactaatacccgatcacagctttaaaaacccgcgacccgtaatttcgggtacccgtaatttcgggttcgggtttgggtatacccaatttacccgaaatatataaagcacatgcgagggcgcgtttggctggtggcgcggcggcttgacagcgaggctgcgtacgcgtgtggccgcctggccgctaggtagtgcagcggcttgccggcgagggcgctgtccgctgtctgcgcttggtcgcctggccggtggcgcgacggcttgccggtgaggcagcctgttcgctgtacgcctgtccgctgtctgcgcgtggccgcctgtccgcctggccggtggccgcctgtccgctgtacggctgtacgcgcttcggcgcttggctgcctggcgcctggtgtgtggttgctagttaccgttgtgccttgttgtgagttgctgttgccgccatgccttgctgttgccggagaacaaagatctgaagtgctccttgctctggagtactagccttgaagttgcaggtggcgatagccgatggggattgggggacgtcgtagccaacgctggacaaggcagcggctgtggggctagcgttgtgcctggacgatgttggttatttcgggtcgaatgggtacttcgggtaccgcgggttaatacccgattaggcccgaacttagttcgggtatttagtttcgttacccgctagagctgttcgggtaacgggcttcgggctaaacgggtacgggttcgggtatttcgggtatagggcttcgggctcgggttttatgcccagatctattttgggatgacccacgggcgaacccccgtgtcactttcatgagttcacagtgttgagttctgaaggtagtgttacgttccatgtcccgtgtcactttcaggagtctacagcgttgcgttcctgatcagtgttgagctctaaacgatggtgttgcattgctgatcagtattgagttgggcgcatgttgattttgggaggacccacgggcgaacgatgtgtcactttcatgagttagtgtcgggttccaggttgagtttcggggggccatgttgattttttgaaggactcacgggccgaacctcgtgtcactttcattaggtatagtgttgggttccttctcaatgtggcgttcggaactatggtgttgcgttcctccaatctgttgggtttcagggtcccatgttgatttttgggaggacccgcggtccgaagcccgtgtaactttccggagtctacagtgttgcattctgaaaagcagtgttaggttccatgtacagtgttggagtctaccatggggctcctgctaagtgttgagtcagatgggcagatgttggttttgggaggacccacgggcgaagggcgtgtcactttcatgcggtatagtgttgcgttcctccaatctgttgggtttcagggtcccatgttgatttttgggaggacccgcggtccgtagtccgtgtcactttccggagtctacagtgttgcgttctgaatgctagtgttatgttccataacccgtgtcactttctggagtctaccgtggggcccttctaagtgttgagtcggatggggggatgttggttttcggaggacccacgggcgaagggcgtgtcactttcatgcggtatagtgttgtgttccttcatctgttgcgtttcagggttccatgttgattttttggaggacccgtggtccgtagtccgtgtcactttccggagtctacagtgttgcgttctgaatgctagtgttatgttccataacccgtgtcactttctggagtctaccgtggggctccttctaagtgttgagtcggatgggcggatgttggttttgggaggacccacgggcgaacgacgtgtcactttcatgagttcgtagtgttgagttccatatcccgtgtcactttcaggagtatatagtgttgcgttcctgatccatgttgagttctaaacgatggtgtggcgttcctaatcagtattgagttgggcgcatgttgattttgggaggacccacgggcgaacgacgtgtcactttcatgagttatagtgttgatttttgaaggacccacgagccgaaccccgtgtcactttcatgaggtatagtgttgggttcgtgctcagtgtggcgttcgacactatggtgttgcgttcctccaatctgttgggtttcagggtcccatgttgatttttggcaggacccgcagtctgaagcccgtgtcactttccggagtctacagtgttgcgttctgaatactagtgttatgttccatgtcccgtgtcactttctggagtctaccgtggcgctcctgctaagtgttgagtcagatttgcggatgttgattttgggaggacccacgggtgaagggcgtgtcactttcatgaggtatagtgttgggctccttctcagtgttgtgttcggaactatgctgttgcgttccttcaaggtgttgagtttcagggtcccatgttgatttttgggagttatagtgttgagtttcagggtcccttttagactggaaaagtcttctgccataatcgtcagatttacctaaatgatgtaaaaaatggtttggaaaactctaaaacattaaataaagatcacataacattaattaataaaaaatgatataatacacaaacattaagtaagaattatagaaagttgaggcaccagtttgtatgcaggattcttcctcctaagatgtggaaagctaattagttttaaaccataatccacctcaatatatatgaattaaagtgcatagatgtggcaacaacgttgaagataaacatctatttgtacagcaaacgcaggcttcccaaagcggcatggtcagttcgagctcgccctggggatgccgccgctctgcccatcgcagacgccgtggagcatcgacggcgacgtcgcaggacatgaggtcgcctaccagctggtgacccgaaacacccaggcggcccgccgccacgtcgagataacggccctgacggtgccgacattttggggcagcgggcattgcccggagccgctcgtcatcctaagaaagggcagcacggtggcctgctagtacgtgacgggatctggcagcgcagggaacggagggacagacggcaagagcatgcaccacatcgacgtgaacatggagtgagcgagccaacggagaaatggcgatgggaatggaggtgcagctggtgggagcagttggcacgccgatgaccggacgaagcaagtgaggcaagggatggacgtcgcacttcaatacgtgcctggcggcaccgacattccgatgcagcggctacccccggagccactcgtcgtccatgaaaagggcgacgaactggcctggcaagatctggcggcgcggggatcgaatggacggacgacaagagcgagcgaagaagtcctggcggcttggtgagaaaatggtggcgctgggggcgatgggaacggaggtgcggatggtggcagcagtggagtgagcgagcgtggcctggtttcttcttgaggaaatggcattgcagaggcgatgggaatggagatgcgaatggggggaggagttgccgtgccgacggccgaccgcgatttttttgggaagaatcgtgagaagggataacacacagagagaaaaatgagtgttaccttcgcgttacaggaatgaagcgacggcgacgtcgagactgattgtcgtcgtccgcggccatggggcggagcaccttccggagaagtcgagacttatacgattaaaaaaggtaggcgaagagtcggcgcagcatttcacacgcagtagtgactgacacctggatggttggattagtggcacggacaaacgatcttacggctacggaaatttggacgatgtgtccaccttcgtttgcgagcagcggaccctggtttgatatattaaaaaaaggcagccgaagagtcggcgcagcatttcacacgcagtagtgagtgacacctggatggttggattagtggcacggacaaacgatcttacggctacggaaatttggacgacgtgtccaccctcgtttgcgagtagcggaccctggtttaatatatagaaatagtgttgagttctcaacactgtatactcctgaaagtgacacgggcccatggaatgtgacactatcgttcagaactcatgaaagtgacacgttgttcggtgtgaaagtgttgatttagggtttagtgtaaccgcccgttcggtgtggaagtgttcaaatttctctacgcgcgttcggtagcctcaccgacggcgacggcgacctcacctcaccgacggcgacggcctcggcgacggcgacaacgatccccaattctcttcgcgacctgaccgtctccacttcggtaaacccaccttcccttctctcctcgttccttgtcagggaaccgcctcaccgattctgatgtcgaaggtaacctggtgccgatccgcaggggtgaagaagaaagccaacatgccacaggggaagagtaagaagaacgtggtgaaggagaaagccaaaaagattaagaagaacgcggaatcgaggtattcactaggatcagtaacaaagttaatccaactccttccacctgctgcccgttagaaaattgtagaccttgatttccaaaacttactcaatctgaagttaggaaacaccaatagagtttttacccactttctcatggatagagccaaagttcatgaaaatacagatcaaattgagatcaacattagagaaggtgtttcaatttggataacaaaggctgcagtgcaaaaatgttttgagtttccccctggtacagataagaagctgccaatagatccaactacaaaaacatttgattcactctacagagtattgagtgtttcagaaaaaaaaatcaatgtaaagaagaagaagatgaaggagaatatgaaggagaagcaggttgaggaggagaagattgagatgaacatggaggagaagaagcagaatctggttgaggatgaaggtagtcaacaggaggaaagtgaagaggaggacggtgaagatggggaaattggagaggaggaaggtgaagatggggcaattggagatgctaaagtggggggagatggagacaaggaaagtgctaaaaggggggggataaaggttgctgtcagaagaaatgttttgactcctttgaacatcaatttgatgttacagaacatcaacaacgatgagattctcaaacttcttgttaaaagaaatgaagacactgatggtacagaaccgaatcttgacattgacctgattgtcagatgtttctttgcggtggtgttggacagactgttgttgccacaagccaccttttatctgagctcagctacattgaaagcagtgactgatctagacagactgaaaacagttgactggtcaattttattttcgaaaatttgaagagcagtgttgctgagtttggcaaggataagaagaaactgatatcagggtgtacaactgtgctaatggttgttttcttggaccatctcgtggaaaaccctttggatcctttgaccatccctaggatcaacttgtatacttcagattttatcgcagacctgataatggtacccaaggatagccctggccctgaaaaaaagcgtcgtaagtttaagaattcggaggatacatgctatcatgaagattcagaaatggtgccaagtccagggagagcatcgccggttgttgcttctgtacaatctcataagaactttgttgatcatgcagatttagaaattgtgccatctcatgagaactctgttgatctacatagtgtttacatggcacatgtattggaaagaagcagacaaagcatagtagtggacatattggactacaatatacctgaatctacttttgcagattgtttgctacctacaggtcatatgcacacagatgtattttatttacaatgccaactgttgtcaaaggattggaaggataaagtaattcttagctggaaagctactcaagaactgattcatcaagatattggagttaaggagctggacaaggaacttactgcagaggttatgaacaaagtggatctggtttgtgctttgttttatattacagtagagttttttcagattgacagtagagtttgtgctttttttagatatttattcctatcattcatgccggtcactggtcccttgttattctttccactgccaaacaagagacatatatccttgactcctacccaaggcacagtggggtggccaaggatgttttaactcaactgcagaagtatttggataataaacacaactttgacatgtctaactacactgaccatgtgccacctgttcagcatcaaaaaaacaattacgattgtggctttcatgttttattgtatattgaagaattcatgaaggagaagatgtataaaatcaacaaaaaaatggtgttgaaattcagaaagcagctttgcatgaatctcttgtaccatcctttgaacagaataaatcttgtggaattcagaaagaagctgggtattacattgaaaagaaaacttcctggtatacttgatcttactattgaaggtgagaggagtgaatctgaggctgcagtgataattgaaatagagaacagagatgataagactctagaggatgaacatatttcagttgagaaagagtaaggtaaaaaagaagagcatgtactatcaactgacacaaagaatgacgaagcttcatccccatctgacgaagagcctgagcagagtgagtcatctgagcagactgtgtatgaaagatggatgattccaaaggatcattatcacctgagaaagagcaagctggagaaaaatatcctcaaacgaaaaaagaggttgggcaaagacaacatgtcctctcaggatatgatttctccagtgtttggcaagaggcttgtgcctgcaaacacacattttacctctcttaggaagttgcgaaaacacaagtttacgtctgataagatcaacgatgagatctgcaaacatatcttgaactacaatgaacgggagttgttaagtgtggggcagactaccatgactgggggtcagctggaaaagtacgtaaatgaaggtgacaatggtgataaaatactcagagcattcatcacatgcttcacttgtgatgaaaagttcaatcaagggaacatcacaaccgtcatcccgccacatgaagtatccgaagagggtgaactctccaaagttgatgctgcacaacttgtagaagaaatcaaagctgtactcaaaggcaccaatgttgcacgtgtacgcaaagacaccgaatccaccaaagatcccaaagtgaaagtctttcgaaacatgaggaggacatttatattttttcctttctacaagaatgaagaattgtttgtatttcatgtcgatacgaaaagactacccatcattgatgctctgttttgcaagatgtcatcattgtcgtttgaagatagatcctgactaggaaagtctatcatgggctgtctactcaaagccatgaaggattccggcttcatggtgaaaaaatatggtgattgtaggttcacagttactgtaactgaactcgaattcaaagatagtgcctcagcgctcataagttttattgagaacttcacttctaagttggacgacaatgccaagaaactgaaaaagggtgacaaggactggctggaaccttacaagaagtcgacagtggcataccttgtttgtcacactgaaaataaggtggtgttgcctgacgatattgtgaagtacaagcaaaacaagtgaggtggttgagtcgttaatgggtccagtggctgtgttttaagacttgtatcacactacttgtatggctttattctctgaagctgttccattgttgccgttagtaacaggtgttgcttttgtctctgctcagtgggtgattcatttcatccagagttgctgcaactttaatcagtctatagtgttgggttcctagctcagtgttgagttctaaatgatcgtgttgtgttcctaccaagtgttgagctgcacgacggcgtgcgcagccgcagccgcaccggcgaggagcgtttagaactctgttgatctacatagtgtttacaccggctcaacagagttctcatgttgatttttgaaggacccacgtgttgggttcctgctcagtgttgagttctgaacgatagtgttatgttccatgggcccttgttgatttcgagaggacccacgggccgaacggcgtgtcactttcatgcgtctatagtgttgggttcctgtctagtgttgagttctcaactatggtgttgtgttcctccaagaagttgagtttcaggggcctattatattgtctcagttaatgggtaactcagttaatcctatatattgtgtcagttaatgggaactcagttaatggtatatgttgtctcagttaatgggtaactcagttaatccagcatatcattgatgag

SEQ ID NO: 22733 - DNA, 1992 bp, Zea Mays
catccctccaccaaataaattggagtcgaacttaaaacaataaaaaccaacggttcatatcgctcgataaccctctcacttactcaaatccaatgaaaattattatttggatcatccctcatctctccccctcccccacgaccccgctgccctgaggccaacttcatcggtcagtgtaaacggctgtgtaaagtactgtagattgtactatttacagagtgaagtttgaaatagagagtgagataggggtaggatagggagtctgctggagatagtttgagcctcccactccccttcccctgcgtccccgtcgcccctctccctcactcgcatcgccgcccgccccctcacacgtgtcgtcgccaccgccatcgtcgtcaacaccttccctcgcgccgccgccgccgtcgatccatcccctcccctccgcaggatcgtagcattagtatgagctatatgctagtattaagaagaagaccttctcacgtaggtcaagaaaatatatccaacattgttggtatgactttttcccgtgactgtctaagcaatgtttcactaatcccataggttattatcttctgatctcaaagcaatgtcctaatagctcacatagacaagagaaggcaaaagttgtgtcaggggccgtcgaaaataggcttattttcggcggccaggtcaagccgccgaaaataacagacaattttcggcggccaggggtgggccgccgaaaatgatccacagtgctgttgtgtaagggaaatcctagctacatcataagtttccagttttcatctcacatgattgaaaaggggcagaaagaaaggcggcgagggctgaaggacaagaacatctcaatcttcaagtgattatactttttttctaataatcaaatcaaatagctatgaatggtctattggtgtattgatattcatgctgccagggaaatccaaagctatccaataaaaatgagaaacaacagtccattttgctgggttcgtgaaattcaaaggcttatcaagactaaatatttgcataacaacttactcggaaatagttttaattcttgaatcaactatgctagactagaaaacaagaaataacaaaggtggcgtttaatccgcgtctgatctccagaactaacctgtagccttgttagagtttagtccctccatgaactaattggtcactaacgagatagtggttggttcttaccacagcctccaagccagggaggtttgactaagctttattaatactccaagccagggaggctcgatctgtgaaaccgacactcacatgacaagtagcaaaagtttcagacagcctgcctatcctaccgcctcaatctggaccaactgcacagcctaagaagtaagaatagatggccgtagagatggccttctacgggtagtcaaagctataagataacacgagtttcacggccaattaaattccaaacaacacatgcttcccctgctgcgacgaaatcacttcacatcaaactgatggggagatcggagcatccatccatccaaggaagatccggatccaattactcagagtcatatagcaaaagaaatatgctatctatcccgcacaactcacagctcgttctccgaacaatccgtccaagcaaggtaggcttccttaccagcgagcgataaagtcggactatgtcggcacggatctccactccgacgcagtcccttatagaagaggaggaacaaggccacgaggatgagtgctagagaagctgatcccttcgaggccggtggcgtgcttcgcttcggttgggctgggaatggaagcacgcgacttgggtgatttcgtctggtggtgtgtgcaaggaaagggaaggcaagtcgaaggagagcaaggcccgggcggtgaaaaggtggaccgggagacaacagacaagaaagaaatcacgcgtatcgaaatcgcggattccctacgctaattgatactcccccgttcagaaatgatgtggtt

SEQ ID NO: 22734 - DNA, 871 bp, Zea Mays
cacgtccttatcttccccagccgtttctcctccagccacgcgcaacgcacccagcttttcttcttctccttgccaagctcccacgacgcccatcccctatgccgaggcctcccaactctctctcactcagccggcgctttgcccaatccccaaactcgtcgcgcccctgctcctccaggctggccgcacgcccatcttcctaccgtgctcgcccagctcggatctcttcttgccggcgctcttccctgccatggccgcaccccccctcagctcgcctccctcatgcacgccacgctcctccctgctcggccatggaagccacgctgtcgaccccgctttgttgggggtcttcggctttcgaaggttctcaaaagcatgatttaacaatgtttctggagtataataaatgagcacaacctttggatttggacccttcggaattgagtcaaaatcacagtataaagaagcccaagggaaacaaaggagggaacagagccgaagctgtgcagaagggagcttcggcataatgacaggaaaaaggaaaccgacttaaaggggaaaaggctatctagaccccgatgaattgctatagagttattagcaaatgaaaagggtctggatgtaattttacaagggctgtgacccatgcctataaatagatgaacagtactcccgtactgttcacgctgactggacatctttgccttcgtgtcacgcttgtactttcattttctttcaagccgaaggtacttttgtaacttgttaacattcctatttttccttaataataaaataaaaatgagttgatggtaataaatgactgttttatcttttacatctcatatgttatctttttctcgttcatatgttg

SEQ ID NO: 22735 - DNA, 1188 bp, Zea Mays
gcacgagagaacaccgtgagcactcttggccgcttcgtcctcatcatctggctcttcgtggtgctcatcatcaactccagctacacggccagcctgacgtccatcctgacggtgcagcagctgtccacgggcatccagggcctggacagcctcctctccagcaacgaccccatcggctaccaggtcggctccttcgcccggagctacatgatggacgagctgggcgtcccagcgtcgcgcctccgggagctggccatcgacggctacgccggcagcctgcagcgcgggcccagcaacggcggcgtggcggccatcgtcgacgagctgccgtacgtggagctcttcctctccaccaactgccagttcaggacggtgggccaggagttcaccaagagcggatggggattcgcgttccagcgagactcccccctggcggtggacctgtcgacggccatcctgacgctgtcagagaacggcgacctgcagcggatccacgacaagtggctcagcccagggacgtgcgcgtcgcagagcaccgacggcgtgggcgccgacaggctcaatctgggcagcttctggggcctcttcctcatctgcggcgtcgcctgcttcgtcgccctcctcatctacttcgccaggatactctgccagttctgcaagtaccacggccacgggaccaccgacggtgccggcccgttccccgtcccggagaggagcctgcggcggcccgccaggctcaccagcatccgggacctcatgtcctttgtcgacatgaaggaggccgaggtgaagagggccatccggagcaggtccgacaggcgactcgacgggtccatgggcggcaggagctacacctccgaagggccgtccttgtcacggccgtcctccatgtcgccggtgtaagacgggccggcggcgttcttcttcaagacacgttttttgtttgtgctgatctgacttaggtagttggagcctggaggcgacgatctgaaatcgatgaaaccgtgcgtatgcacaaattgctattcaacgaacatacacacacacacgatctttcggaagatagaatctgtaggtgctagtatgcaacgtagttctcccctagaattgcaggggtattatgtacaaaagtttcaggtttttatggacagctaaagttgaaatgagaatttcttttctatacatata

SEQ ID NO: 22736 - DNA, 2433 bp, Zea Mays
aaaaccccaaaaagaaatatccaaggccgcgccgtgcgcgcaatccccctcgctcgcaccatggcgctgcagctccagctgccgcggccgctcgccgccgcacggccctctatcctcctcccttccccagcccatggtgcctccgcttccgcgaccccccttcacgcccgcgcaggcggcgttgcgttttcgctccagaccaacgtgcgcctcctcaagcccaaccgccgcgtccgccgctctcgggacccctactacgatctcgacgaggacgacgaggaggaggcggagttcgacgaggacgatgaagacgacgaggagggctacgagagcgatgatgacttgtcgggtttggaatatcctggtgtactttattcaaacagccctcgtgcttcaagcaagaaaccagtggtaaaagaaaactgggaaggaagacaaaccaaaacccatgacaaatacggtagtccaggaagaagtaagtccatgcatcctaggagtaaagtgggacgatcatcaacagatcttaagaacatggacagagaagttgagttgaaaaatgcaagtatctctcgaagtctgttccagaaactacaagaagaatatgacttcgatgacaaatggttaccactgattgattacttgtgcacctttggactaaaagagtctcattttacttacatctatgagagacacatggcctgctttcaaatcagtcaggcttcagcagaagaaaggttggatttcctgctaaatgctggggttaaaagcaaagatatgaaaaggatactggtgaggcagccacagattctggaatacacccttggcaatctgaaatctcatgttgattttctcgtgagcattggagttccaaatagacgaatagggcaaattatttctgctgctccttcgatgttctcttacagtgtggagcagtctctgaagccaacagtaaggtatctgattgaggaagtaggtattgaggagagtgatgtggggaaagtagtgcagctaagcccacagattctggtgcagaaaattgatagtgcatggaaatctcgatcgcttttcctgtcaaaagaactggatgctcccaaacatagcattgttaagatggtcacaaaacaccctcagctgcttcactacagcattgaagatggaatcttacctcgactaaatttcctgagaagcattggtatgagaaactctgacattctcaaagtattgacaagtcttactcaggtgttatctttgtcattggaggacaatctcaagccaaagtatctttacttggtcaatgacctcaagaatgaggtccaatccttaacgaaatatcctatgtacctgagtttgtctcttgatcaaagaatccgtccccgccatcgttttctggtttccttgaagaaagctccaaagggcccatttcctctgagctcctttgtgcccacagatgagcgtttttgccagaggtgggctgggactagcttggaggcataccatacattcagacagaggttgctgctaacaagtttcgcagagaagtctggaaggaaaacactagtctcaagacggtagatgcctaggtggtgggagtttgtttctcttgagcccacgctcctaacaggtttatactgcatcattaactatagcatatacttatcgtccatatcacctccctaatggtgaaaagtcttcaccgaattccctcaatcagctgcaaatggatgacaatctaagagaaatgcattattgccagtcgccagaatggttggatggacacttggttacctagctctaggagtacctcgccttgacggctaaaactgttgtgcagtcaagctttcggtggaatcgccatgcaaccaaactaccaagtcataaaaagtttccaaaaaaaatatagaggtactttattatttattctatcaatatactagattttaagttctaattcatcatatgttaagagattaaaaaagagaaaatttatcattttttaatcctttatattggatataatttttctcttttttatttcccttgacgaggataagttagaatttaaattttgatatattggtagagcagataataaaatatctatatctatggtttttttagatttttcatgacttttggtagtttaattgcacaggaagcttgattgcacaacgaattttcccagcagttttttcccgtcttgattgctagttttactattaagtacagcttctgaacaaaatgctacgctagaaacatgtagcctaactgtaagagtgccatcacaggcagccttgtgtactgctgtaattctgcaatgccttttgacattgggggtttcctttttttgtgaaggcttgctatcatgaatcatacacggcttgtacgtcctaccatttcatggtggttgggttagaactctctgtgatggactgc

SEQ ID NO: 22737 - DNA, 467 bp, Zea Mays
gccaagcgcactgtgttcttccctgcagggtcctgggctgggctggcgctggcgatggcgctagtattagggcgggaggaggagctcctggcgcagctccgcgcgctactgacgttcctaccacctcctgcgtcgcccccggcgccggcggctcccgttaaggtggagtccatcatgggcactagtggcggcggacgacgactggggagcaagagagaccgggacgacgacagcgaagccgaggccgagcagcacggcgacgaacctgcggctgcgcagcctcactattgtcctcatcctcctcctccctgcaaaaggacgaggaggaggaagaataagaagaagcggcagcagagcaagtgccttgtgacgacagtgcccgacttcgacgggtaccagtggaggaagtacgggcagaagcagatcgaaggtgccatgtaccccagttaaaaaaaagtccaagaaat

SEQ ID NO: 22738 - DNA, 2045 bp, Zea Mays
ctgtttcctattgtaaggttggaagggtttgctgtatcatgcattttttgtggataatcttcattttctcttgagtcaccgattcttttgttgtcttcaaaatgtcgggcttgctgaactcaaaccttaatagttcggcatcaaatctttcagactcagctggaaggccatttacagcatccttttcgggtcaatctggatcaattccaggttttcatcattctggcttgcataacactcatggaagttacaatcttccgagtatgcctggatcacttgcacaaaggaatgctgccatgagtggccttccgtcctctggggttcaacaacctggaggtagcattcctgggagattcccttcaaacaaccttccagttggcatgcctcagattcctcatgcacattcaggtgtcagtggtagagggatgaattttggcgcaggtccggcatttagtagcagcatgaatattggtggtaacatccaaggcttatcctcgggcttgggctccggtggtaatcgcaattctgttcatgggatgccagtatcttcatctataggaaactcgggtcaacggataagttctgtaggaaatatggtaagtgcaagcaatattggaagaaatataggcactggtggtttgtccgtgccaagtattgcatcacgaatcaatttgaatggtagtggtgggagtggtagtctgaatgtgcaaggatccagtcgaatgatgaatggattgcttcatcaacaagcaactcctcagttgataaatatgcttggaagttcatatccaacatctggaggttcattatcacagagccaaattcaagcaggaaataattcttttagttctatggggatgttgcatgatgccagtgacactgctccatttgacataaatgattttccccaattgtctggtcgacctagttctgctggtggtccgcaaggacaatatggatcactgcgcaagcaaggagttggtgttaatacccttgtgcaacaaaaccaggaattcagcattcaaaatgaagacttcccggctttgcctggatataaaggtaacccttcggattataatgctatagagttgcatcacaaggaacaactccacgataatgtacctgtaattcaagcacagcagtatcctatggcaaggtcaggcttaggaagtagctacctacccaatcgacaacaacaccagcaaggtgctaattcagtccagaatggcggatcccacaatattttactgagaccacccagtcaaacttctagtttgggatcatatgatccatttctgcagcaataccagcagcctcagcctcaaaatcatttcagattgcagcagatgtcttcagctgcacattcatatcgggatcagattcaaaagattcaggcgggaccgacaccacctgatccatatggcttgttaggatttttgggtgttataaggatgaatgatgctgatttagcatctcttgctttaggaatagatttgacagcattgggtttgaacttgaactcgccagataatctatacaagacatttggctcaccctggtcgaatgacccagcaaaaggagatactgattttcgaattccagcttgttacctctttgacaaaactcctccactacagaccttactttttcagaggtttcacatagtaacactatttttcgtcttctatagcatgccaaaagatgaagctcagctgtactctgccaatgaactgtataatcggggatggttttaccataaagaagtgcacttatggctcaccagaatttcaaatgtggaacctctagtaaaaactcacctctatgaacgtggatcttactattgctttgacccagaatcctgggacacaatacgcaaggacaactttgttctccactatgagatggtagagaaaaggccagttctgccttcaacatcaccaaaccttagatgaaaagaaaatctagggaaatacgacttgcaatgctctttggactgtagttcattgttttagatcttgtaaaatctagacttggatcttgcaaat

SEQ ID NO: 22739 - DNA, 178 bp, Zea Mays
gaagtctttgattgctgcatagcatgtcgagacattttttatgttgaattgttgtgtttgtgcgcccattcaaactcattaaatatatttgaatatttgattcaaaaactatatttaaattcgaataggaaaactaaaaggaagaaaaacaaaagggaaaaacctcccctcagcccac

SEQ ID NO: 22740 - DNA, 781 bp, Zea Mays
ggcgttagcccaagctgcactgcctagcacctaggcgttgtgtctaggcttgtttcagcgttaaggtgttgggcttaatctatgcatgaaaatgggacagattagagatggagaaagatgaactgtggtcatattatttatcgatgcatgttggcttgtggctactacgacaatcacttccacaataggttatggtgtgaagcactaccgaatcaaaccaaggagtcggtgactgttgctgcaggctattcatggattaatttgctgctgctgatgacatacatcaagtgacttactgacttgtatcaagcatgctgttgtttcttaagcttcgtcaacttcccaatttgcagctgcacaactataggtcttgttgcccccctttgtcctcatggatttccttaacggcaaaattttgggcaatattggagaaaggagtgaagaacggtctcatgaattgaatgtaatcggtgcatgatttgtgcggtaggcctctggccgtcctcctgtagctgttaagtcgtggtgactacttttgcctagttttggcctaaagtgtccatcaatttgtcagagatcaaactagccgaacctttgccttttgctttgtccagacacattagctatattgcaggtgtacatatgtacttcagaatacttgaacttggcaaatggcgatcgctaggtgatatcacgcttccagatgtctgcaggttaaatgcatttacaactatgttcatgcatcaatgcaactgtttagcagggcttttttatgagaaaa

SEQ ID NO: 22741 - DNA, 915 bp, Zea Mays
ttagaagctgatgagggagtctcgtagcagaacttcaatgttgagatggcatggaggtactgctggtaacaagttctggatgtcattaggtctaccattgatagctactatgaactgtgctggtaacactggagccaagaacctctacatcatttctgtgaagggaatcaagggcgccttaacaggcgtccttctgcctgtgttggtgaccatggagaatggaaagcctaaccttaggaagaagaagcaagacaaatataaggatgctgaacctagtgcaatagatctttttaaggagatgcattgcagcaaaaagaaaggttttagcaaaaatgttcagaaagctattgttgatatggaagaaacggtggcaacatcagttcaagatggacaacaaccgaaatatcctacagaagttgtttatagtgtgcaactgggctccagtgtgttcttatgcaatcttggtctttagtccgtctccaagaaaagctcaacatcaatagtttctataaaggttcaacaacttcaggatcgactggaggccaagaagcaagaaaaagatggacttcgggaagaagtgtaaaccttaaatgctcagtcagtcatctcaggagaccattgatagtatgaagaggtcgaccgaagaaaataacaatctccttagtcaactattaagcttcaatagaggccaagtgcctccatctcaagtctacttgaccactataggatctgcagccttatggttgctatagtagctagttacaatagctctggatttgaagagtagctctggatttgaatttataggattattttcaattaagcttaatgtttaattccttgagttgaagttataggattttctttgcatcttatgtaaaaggatttgtagatattttttttgaagttatatga

SEQ ID NO: 22742 - DNA, 304 bp, Zea Mays
cttcacttcattgacatttggagttagagaactcacttattagtcgactggaaagtgaattttctgcatacaaggtccgggcacatgcacttctgcaaaaaaaggatgctgagcttaccgcagctaaaagttcagatttcattaaagaacatgaagaggccataagggaagctgaaaaggaggtggcagctgctttagcagaaagagataaagcaatagatgatctccaaaaggcagaatccagacatggtgatgagattgaggcaaggtaggggtacctaatcttctgctcagcaaaataaaa

SEQ ID NO: 22743 - DNA, 1372 bp, Zea Mays
tcgaactcccattagcaagcaaaacgaagcagatcaaaaggacatacttccggcggaacagagtctttgggaagaagacttcaagaagaccacatctatcacaacgttcttttggtgagcactttgagaaagttacttacaatgatcttgccaaagcaacaagggacttctcagaatacaacctaattggaagaggaagctatggttcagtgtacagtgggaaattgaaggaagtggaagtggctgtcaaggtttttaaccttgagatgcaaggtgcagacaaaagcttcttggtagagtgtgaaacgctgagaagtattcaacatcggaatcttcttcccatcataactgcatgctcgagtatagatacaacgggaaattcttttaaggctttaatttatgagcttatgcctaatgggaacttggataaatggatacatcacaaagacaatgaggcacttccaaagcgtctaagcttagctcaaagaattgcagttgtcgtcaatgtagctgatgcattggattatttacaccacgactgtggaaggcccaccatccattgtgacttgaagccaagcaacatccttctcggtgacgatatgaatgctgtcttggcagattttggcattgcacatctttattctgattctcagtcaacttggacaagttcatttagttcgatcggtgtcaaggggtcaattggctatatccctccagagtacggaggtggtggctctgtatcgacgtccggggatgtttatagttttggtgtagtgtgcttggagattttgatcggcaaaaggccgatagatcctgtgttcatcgggggactagacatcatcagcttcgtcaagaacagttttccagatcaaatatttcacattatggattcacatcttgtggaagaatgcgagcatttaattcaggacaataaagtaacaaacgaagaaatgtaccagtgcctggtggatctgctgcaagtagcgctttcttgcacgtgctcattaccatctgaacggtcgaacatgaagcaggtagcaagcaaactgcatgcaatcaagacgtcacaaattggatataaataatccatgtaaaattaggtgtaccgtgtactcccacgactaggagcgtaaaaatgtactctagcataaaattaagtgttgttcatctactgtgtgcatgtacttcaattgtccaaaaatatagatgcacctatactgtttgtggacatcgttaatttcttttgtaagttcacgtagaatatcttatatttctagataaattggaaatgttcgaatttcttgcatttgtaaatcgaggtcgtatagaaccgcattggtatgtacaacccaactcaattcacgcaaaccaa

SEQ ID NO: 22744 - DNA, 1984 bp, Zea Mays
cacggcgttgccttggaccctgcatgtagatgttggtcgcgatctgcagtccgcgacgatcttgagcatctgatggctggggtttataaatggaaactggcatcttataaacagatggaacgtacgaaagttgcatcagagaggttgtcattaagatctaatagcaccaagcatcacgatactgtacatcttggtcttggtcattttgggaaggatggcaatctcatttgtcgttcacttaagtcaatattaaaaccaaaggcaagacagtatgctattgtcaaggtacataataaagatgttgacgagggttgcagctccaaagacaatgagattatttctagtccatctgataggaaagaaggaagtcagctgagggcactggaatcttatttttctaaattcaatccctctcagcagttatactctttgcctcagaagaagcacaaaagtggtccatcatcgtcaaatgaagttgatgcaatcattgctgatgaggatgctaatttgaagaacagggcagactctttgcaggtatcaagagtaatcaaaatactcccaacgaggtttacaaggagtacttgatatttgatgaaaaaagtctcctggacatgcatacagatgatcaagcgtctggtttctgtttgacaaacttattggctggtgttaatattgcagttctgttatttgaaatagcaagtccagtgaaaaattctgaaaatgaatatttatccctccctttgttgtatggtgccaagataaacaacttaatactttcaggggagtggtggagactactaacaccaatgtgcctgcactctggtttcttacatatagcccttggttgttgggcattgcttatatttggacctcgagtatgcagggcatatggtcaaaggacattttttctgatatacatacttggaggaatctgtggtaatttgagcagttttgttcacactcctgagataaccgtttgtggcacaggcccagtattttctttaattggagcatggctggtatatcagggtcaaaacaagcaagtcattgacaaggacgtttcagaaagtatgttctggcaggctgtgatagctgcagctttgagcttcttattgagcatttttgggagaattgacaactgggcacatcttggggcgaccatttctggaattttctttggttatctgacatgcccaagtgtagaatttgacaattctgcaaagaacggtcaaaaggaagccgtggctcttattaggcaacaagctcatccatgcaaatccgctgcagtctttttcataaccatacttgcgtttgctgtactcgccttcgcttatgggacacaattcaacaatatggatctggaataggcaaatagctaagtgttgtcatggttcacttcatatatatatatatgcatgcatgtagcccgacagctatatattccggaatgtgaatgagcccgagatgtaagaaaacgttgtacactatagatcagttctatgcgtaaccaggttggaatttttccattccgtatcatgtatacactacaatagtgaatagtctagtacagttggtttttggattggctagagcttatcagtgtctgtaagcaggtgaagccacggacggcataactatttgtacactcggtttgcataagaaccgactgcacatctgcatttgcaccgtcggttgcaagttgtgatagactcggcgggaagttttatgtaatataaaataaagtataggtgaagtacatgtttttagtataaatttttatcctgtaattttatagttattgaattttatgactaagagttggtaatcgtgctagtagtgttttatcttggatcactgcatatgtccccttgatgcagtttttggttgtaatccgagcggtttgagttcgtttgaggaaaccccaatacaaaatcttagttttgtctgtattttcagatatgtgattgatttataaatctgattg

SEQ ID NO: 22745 - DNA, 3270 bp, Zea Mays
ccagtgtctcctgtatcaacggggtggtccgtctggaggaggtaccgaggtcccgccgttcgagagacgagctacgcatttaagccggggaggtcggagcagtgagtgggagtagttcagggactgggagaggagaggaagcaggacctgggagacctcgcctcgtccgtcctcctgcctacttccttgcttttggtgctgcttgttttatcttgaaatgggctctcatgatggcgaggatgaagagttgccacccccccctccggtgccaccagatgtgattcccattaaagctgaagatgctgtgggtgaatcaccagcaaaccatatattaaagccaaagagattactgatggacaggcctggtataggaagaaaagggcagccgacccagctctattcaaatcactttaaagtcgctgtgaagagtacagaagacgtcttctttcactactatgtaaacctgaagtatgaggatgatcgacccgttgatggtaaagggatcggcagaaaggtgattgataaactgcagcagacatatcgtgcagagctttctaacaaggactttgcatatgatggagaaaagagcctgtttacagttggtggtcttccacaaaaaaagaatgagttcaccgttgtcttggaggacgtatctactggaaagactgctgccaatgggagccctggaggtaatgacagtcctggaggtggtgataggaagagagtgaggaggccataccagacgaaaactttcaaagtggagataaattttgcagcagaggttcctatgagtgctattggtcaagtcattagaggcgaagaatctgagaactccctggaggcgcttcgtgttcttgatatcatactgaggcagcattccgcagaacaaggctgccttttggttaagcaatcatttttctacaacaacccttcatgctttgttgacttgggtggtggtgtgatgggttgtcgtggatttcattcaagcttccgtggcacacagagtggactttccctcaatgttgatgtctcaacaacaatgatcgtgaaacctggccctgttattgattttcttctttctaaccagaatgttaatgatcctagcagaattgattggcaaaaggccaagcgtgctctcaagggcttgaggattagaaccactcctgcaaattcagaattcaagatttttggtctcagcgagaggatctgcaaagaacaaacgtttccgctgaggcagagaaatggtagcaacggagattgtgataccattgaaataactgtctatgactactatgcaaagaaaggaatcgatctaaagtattctggtgatttcccctgtataaatacagggaaggcaaagcgcccaacatattttccaatcgagctatgctcgcttgttccgcttcaaagatacaccaaagctttgtctacgctacaaaggtcatcccttgtggagaagtctagacagaagcctgaagaaaggatgaccgttctaaatgatgcactgcaacgcagtaactacgattctgaccccatgttgagggcatgtggtgtttcagttgctccaaaatttacccaagttgaaggaaggatccttcaagccccaaagctgaaagccggcaatggtgatgatatcttttcacgaaatggacggtggaatttcactaataggaagttttatgaaacctgctctgtgaataagtgggcggtcgttaatttctctgcacgttgtgatgttcggaatcttatccgtgacctgatgaggaatgcatctgcaaagggaattcaaatggaggaaccttttgatgtgtttgaagagagtccctctatgaggcgtgcacctgtgtcaagaagggtggatgatatgtttgggcagataaaatcaaaacttcctggagctcctaggttcctcttgtgccttctccctgagaggaaaaattgtgaaatctatggtccttggaagagaaagtgcctggccgagtttggtattgtcacacagtgtctagctccattaagagtcaatgatccgtacctgcttaatttgctgatgaagatcaatgcaaagcttggtggtctgaactcgttgctgcaagttgaagcatcttcgtcaataccacatgtgtcgcaagtacccaccatcatcttaggtatggatgtttcacatggtcatccaggacaagatagaccttcggttgcagcggtggttagttctcgtcaatggcctcttatctctagatatagagcatcagtgcacacccaatctgccagactagaaatgatgtcctcgttgtttaagccgcggggtactgatgatgatggcctcatccgggaatcactgatcgacttctacactagctctggaaagcgaaaaccagaacacataattattttcagggatggagtcagtgaaagtcagtttacccaggtcatcaacattgagctggatcagatcatcgaggcatgtaagtttctggatgagaagtggtcacccaagttcactgtgattgttgctcaaaagaaccaccacaccaagttctttcagacggcatcaccagacaatgttcttcctggaactgtggtggatagtaaagtttgccatcctaagaacttcgacttctacatgtgtgcacatgctgggatgattggaacaacaaggccgacccactatcatgttctgcacgacgagataggtttcagtgccgacgagatgcaggagtttgttcattcgctctcttacgtgtaccagaggagcacgacagccatctcagtggttgctccagtgtgctacgcccacctcgctgcagcccaggtgagcacgttcctgagattggaggagatgtcagacgcgtcctccagccagggaggagggcatacctcggctggcagtgctcctgtgccggagctgcctcgcctgcatgacaaagtcaggagctccatgttcttctgctagctgatgtgcgtgcgcatcaggatcgagctccatgttttgtgtgaaaataagaccctcaaaaaggaggcgaatgagctcattcacgtcttaattaaagcctacagtggtttcgaccagggcgcgcaccaagactttggtgatcattgtgaacatgcttcggacgaagctaattccgaaggtcctatgggcgacgacaaactaagtcgagaggaggagaaggatgactttacccttgacatgtacattagaatgaatgtataggaattaaggatataattgtaattttacttgagctatgtctcgagtttataaatagagaa

SEQ ID NO: 22746 - DNA, 782 bp, Zea Mays
aacctacaaacgtatattcttaaataccttccccggcgcgatggccgcggccgcggcagaaacacagatgggcgacggggctccgccgccaggggctctatactccttcggaacgccgtggccggagctcaatcaaggcctcacctacaccgacacgttccgttgcgctgatgcggacgccgctaccaccttgattgagttctactctactaaccacaagagctcggcgccattgccagggtggatcaagaggattcgtaatgggcagataaccgttgatggtgaagttgtcactgatccagatatgactctgggatgggtctaagttggtatatcatcgttttccttggcaggagccatttgcgccgtatttgctggaagtgctctacgaggatgatgacatggttgcccttaataagccttctggcttgcaagttctgcctaaaggactgtttcagcagcgaactgttttagcacagcttcaattgaaagactggaagatggcctcatcttgccggttcaagagaaaagatgtgcagtcacatccagtacctgttcatcgtttagggaggggaacatcaggcctcctgctttgtgccaagacaaaagttgccaaagttcgacttgcatcttattttgctgaaggtgctataaatgctgcaaagaaaagggataaatcagagttcagtgaagagcgaaaaatttcaaaattttatcgagccttagtgactggcatacttgatgatgatgaggtactatctcttatttgatacagtgttctg

SEQ ID NO: 22747 - DNA, 2035 bp, Zea Mays
agaagagagaagagggcgggcatcggccagtgggggctctgaggccgagggaggcgaggaaagcggcgggtgccgggccgcccgcgccggtgccgagccgcccgcgccggtgccgaggccctcaccagtcaccaccccctcccctcttccgtctgtcccccgcttgccgccaccgccgctgcccgctcgcgatccttcccctttttaacgctcccgcggccccgcgtcgtgctcccttttgtcgccgctgccttcgtgcccgtactcgcgggttctcctcgctcctcaatctccgcgcctgggcgcggcgttcgccgccggatctgggcgcgggacggtgccccggacggtcgatggcgcgggcggcgctccggttgggcgaccgcgcgctcgcgctcctcgtcctcgtgtcagtggctctgcttccacttgtcagttccgacgatggacacaaacactgcgagggtgttgtcaggggctgggcggattcctccacggggcgcgtgaaggacggggacaaactgagcctcaaggatttgctcttcttcctccacattcctaggactggaggccgcacctactttcactgcttcctaaaaaagctgtatacaaatgcgcaggaatgcccgcgttcttatgacaaactacggttcgacccaagccatcctgattgcaagctggttgttagtcatgatgactatagcttaacttccaagctgccaagggagagaacatctgttgtaacaatactaaggaacccagttgaccgtgtatttagcacatatgagttttcagttgaagttgcagctagattccttgttcacccaaacttaacttctgcaaagttaatgactacccgtgtgttaaaaaagtctcgtgctgtcagtactttggacatctggccttggaagtacttggttccttggatgagagaagatctgttttccaggagagatgccaggggtatcgacaaagttcatagtagtaagaaggttaatgcatatgatgtggaggatatggttatgccgttacatcagtacatcaatgatccagttgcccatgagatcattcataatggggctacctttcagattactgggttaacgaacaattcatactttgatggagcacatgaggttcgacattgtgccagaaagcatccagatcttggtcgtattgtgcttgaagttgctaagaataggctggaccagatgctgtatgtaggacttacagaggatcatgaagagtcagcgaggttgtttgctcatatggtaggagcacaggtgcttttacaatctgggacattgagtttggatctcaaggaagatctgcacagtgagactgactcacacccatccatggtggagcccggggatgaagaagcaagcgaacatctgatgactgtgggtaaactgatggaagcttatgaaacttgcatcgctaaactgcggaagtcccaatctagccgtcgtaaaatatcactaaagaaagtggaggaagcaaacttctcaaaagaggcacggaagctggtccccgaggcaattttgaaacaaattatctcgctgaacagccttgacatggaactttatgaccatgctaagaaaatctttacccaggaacatctgatgctgaaagctcagcaatccatggcggggcagcacagacagttggcggaacaagaggagggctggatcggcacgatgtgcagcgacgggacttgctctccctgggtggtggtcttgctgggtctagggatcaccacgatcctagttttggccacattagctgtaacgacgagaaaaagaacgtctaaacttaaggtttaaccagaacttttcatgagacaggtctctagattttggtgtacagtctgatgaatgccccttagcaatctttcggggcagaggtgctagcgtgcgcagaatcatcatgtactaactcgtgcggtcgtactggtatcttcacacaatttgagatgccgcggtggtagtgtggacgtgtagtctaaattgccactccataagaaaaaagcagc

SEQ ID NO: 22748 - DNA, 2044 bp, Zea Mays
caagaaggtgccatttttgaaaagtgtgtgaccgctggtggcactactgttgaagatcaagacaaggaaatggagcaatctgcaggtgacgaatcaagagaaaccgaggctgagaatgctgtggaatataacaagaaggtggatcaagaagataccattaacagacaaggtacagctaaggaagacagtggtgtggagccacaagaggagaacgttgtggatccagatcaaggtgtggatgacttttctgtactagatgagggtaatgtggtggcacagtgcaccagtgatcaattgagaacaaccatggaagataatgctgcagagatgcaagaggtggtggagcaagaaggtgccatttttgaaaagggtgtgacctcagatggcattactgttgaagatcaagacaaggaaatggaacaatctgcaggcgatgaatcaagagtgaccaagggtgagaatgctgtgaaagataaaaaggtgtatcaagaagatgccattgacaaacaaggtgcagctgaggatggcagcggtgtgaagtcacaagaggacaacatggtggttccaggtcaatgtacagatggccttcctgtactagatgagggtaatgtggtgccacagtacacaagtgatcaactgagaacaaccacagataacaatgctgcagttgatccagagttggtggagcaagaaggtgttgatagcatagtgggtgcagccaaggttggtattgctgtggaagaatcgcgagaggacatcatggtggaaaagcaagttgaaggtgttcttttacaagatcaagatgaggcagtggagcaatgcaccagtgatcaactgaggacaatcacagatggtaatgatgtggaagatcaagaggtgcacagagagaaggttggtctctctgaagggtacccacagaagcctggtaaactgaactgtcgtttttacatgtcaacagggaggtgctcatatgggtcatcgtgccacttcaatcatccacggctcaaagcaaaactagaagtttcaagtttcccttccgaacaaagaaatcatgaagctgaatttctggaactgaaccgtgttggcctccccattagagaaggagcaaggaagtgtatctattacatgcgtaatggtacatgcagatatggaaagaaatgttgttttaaccatccagagcaagttcttgatgttcaacgccacactgcaacaggatgggatgatactaacttgcaatcttcaccacactcaaagaagtcacctgaacataaaactatggatgacatatcgtctggatctgaggttcttcctccaaacatacttcggatgcttttacctccccagaatgtgccccctagtacaaaagaaaaggaaatcaggataaaaaagggagtgattgatggtactgactatggacatgattttgccacgaagtcacggaatgttctgcaggaactggcaatatatcctgaaaggcctgatgaacttgagtgttctcactacatgaagcatggctactgtaaatataagatgaactgcaaatttcatcatccaagagatcgtcttccaaagaaataggaccatttgctacaaccactgttgtaactggctgtcgttgatgagtggagcaagtactgatgatgggacagaaatgcaggaaggaagccatagtcttccttttttgaagagctcgattctactcatgtctatgtcgaatttctgccctagtgtcgttagagttctcgtaccagatgcgaactgcctggtggcttcccaactcccgttcattcatatactaccaaacattgctgtgatctagatctagcccgatgcggtgctaacctgagattgtgggttactgtagctcagtatgcagctcaggtacctgcacttgctcaagattgcgataatgatcagattaaaatagcaggccacgcatattctgcaacttgcgacttttacatcgttgttgagtctcctgggttcagcctctttattgtttttgtttgtgtgcgtgaccatgtgtgtcggactgtcggttgtc

SEQ ID NO: 22749 - DNA, 2584 bp, Zea Mays
gaaacaaacaggggctttcatttctccccgccctgcagcacgaccgcgaccagccaccgtctccgcccccgccccggttgcttcagatctcctcctcccccacccggccacccccagccgcaccagccaccggccagctcctccgcaccaggataatctctgcccttcgtaccccctcgccattgcgcgcgcatataaatcccacatccccatcgctctcgcctctgcccacccacccgccgcgcccctactgcgcagcacgcacgtcccctccgcggccctggatctaggctgatcggtcgccggccgggagcgaggatcgggatctcggcccggggctgcccccccgccggaatggaggtcttcggccccgtcacgcccggacaggtgtcatttttgctaggtctattccctgtcctcatctcatggatctactctgaaatcctcgaatacaagaaatctttgtctcatgggaaagttcattcagacgctaatttggataatggaaccatcaaggaggatgaaaagtcagtattacttgaaggaggacagttgaaatcaccatctacaaagttcaggaacttgtctaccaaagcgaatttgttacggtttataactatggacgagtcttttctgcttgaaaaccgtgctgtactgagagccatggctgaatttggcgttgttctggtttacttctatatctgtgaccgcacagacatatttccagaaagcaagaagagctacaatcgtgatctgttcctgtttctatacattcttctcatcatagcatcaacacttacttcactaaagaagcatcatgaaaaatcagcattttcaggaaagtctatactctatcttaatcgccaccaaactgaggaatggaaagggtggatgcaggtcttatttctgatgtaccattattttgctgcttctgagatatacaatgcaatccgtgtgttcattgcttgctatgtctggatgactggatttgggaatttctcatattactatatcaagaaagattttagtattgcaagatttgctcagatgatgtggagattaaatttctttgtggcattctgttgcattgtccttgacaatgatctcatgctctattatatatgcccaatgcacacactatttactcttatggtatatggatcacttggtctgtttaacaaatacaatgaggtaccatcaatcatggctattaagattgcttgctgcttcttgtctgtaattttgatatgggaaatccctggggtatttgaatcattgtgggccccctttacgtttctgctaggctataaagatccatcgccatccaaggcacacttacccctgctacatgagtggcatttccgatctggcctcgatcgatacatatggattattggaatgatttatgcttacttccatcctaatgttgaaagatggatggagaagctggaagaatctgagactaaggttagattatcaatcaagggaaccattgtcactctttcattgacggttggctttctgtggtatgaatatatatacaagctagacaaagttacatacaacaagtaccatccctacacatcatggatccctataactgtttatatctgcctgcgcaattgcacccagcagttgaggaatgcctctttagctcttttcgcatggcttggcaagattacactcgagacttatatttctcagatccatatttggcttaggtctagcatgccaaatggacaaccaaagtggcttctttgtttcataccagattatcctatgcttaacttcatgcttactacagcgatctatcttcttctatcataccgtgtgtttgagatcacaaacgtcttgaagtcggcttttatccccagtagggataatagccgcctataccaaaatttgattgctgggatcgccatctcagtgtgcttgtatctctgctcgcttattcttctgaagattcctggtgtatagatcttgatagaaggtttcttgtaaaatgtttgcttgataggatgtttcagctcgggcctcgatccccttttgctgttgtggagatagttgggatgcgcggagaagcggctaaagttggacatacggggaattgaattgccagaggctgcagatacagaagtccgaatcttgatctttttgttcattcaaaacacggatggatacaacaagtaggcaatccttccattcttttggaagttgtagcaactgttcgctagactatgttgatgcaacctcgttgtatgagttatcctgtagaactgcaccgtgttgtgccataggtattctgaagctgtaaaaaaaacgacgggcatttcttcttccttgaaaagaagaaatataaaggcagaggcgcagagccctttcttctcctaattgtaatgtcgtgtttgctttggagtttgaaccatccagtctatatcctgcttcttcaagtgttcgtgctcgtgctgtacgtgcgtacccgcgggctcagtcgaccggtggacggtggtagactgtatgcacggctcaaacttggtgtatgtgtgaaaaattacccgccactgttgttggttacattgaaata

SEQ ID NO: 22750 - DNA, 1079 bp, Zea Mays
tcccatttgatttggcccactgcagcccactaaaccgtcctgtacgcagagcccatgcacggttttgagacgagagcagctcagcagcagagcgccagccgccggactcccacgcagcacgtacggacgccatcgaggaaccctaacaagagcacatcacacggggcgacggtttggcgccgcgccaccggcgactggcggctgctgcagcagatggtaaattatttctcagactcagagtgcaagaaagttggttcgtccagggaagaggaatagaggttatggttttgtgtgagattgattagcatctaccttcaaatcattctcttggtatttattgagcactgcaagtggttgaggacttgaggtaaacatgctgaagtgcatcttgagccagtcatggaagagaggagcacatatgctacatgcaggaaattcagcaccagctgtactaacttgctggagtcaatttcacagtgggcaggtctggagttcttccaggagcttcttcggcgtggaggacttcgtggacgaggacaacagtaggccatacacgtacaagaaggagaagaggtccaagaacccccacaagcacatctcgttcaagcagcgcaccatcgcccacatggagccgttcacgctggacgtgttcatctccaagcgcttcgtctcggcgtccctcacgcaccggtcgacctgcaggcaggtcgcggtcgccgggaccaactccaaggacatcaaggcggcgctcaggtcgaggtccgacgtgccggcctgcctggccgtcgggcggttcctggccgagagggcgaaggaggccgacgtgtacacctgcacgtacacgccgagggaacgggacaagttcgaggggaagatcagggcggttgttcagtcgctgatcgataacgggatcaatgtgaaactttaccttgactgagttcggtgctgtatgagtatgagtagtagttctgttggaacttgcgcgtgggtttatctgttgccagggttgcaggtcgaattattttgtgtccttatgttgatattttttttgctcaaatgaacatcattggatacccagt

SEQ ID NO: 22751 - DNA, 315 bp, Zea Mays
gaggacgatgaaggagtgcaacattcagatatttttagatattttacggccggttcagatcagacaagaaagggtcatctagcaaaggttgtcgggatgtcgatctttttgtcaaacaagtagatgggaaaaatgttactgattcagagaaattgagattttgacttggagaaagcccagcttgacctagggcatggctacaacagggctgagatgaagttcaatgtgaatcgtgttgataacatggtgattcaggcaatctttctattggatatgcttaacaaggacatcaattccttctccatgagagtcagg

SEQ ID NO: 22752 - DNA, 436 bp, Zea Mays
cacgcacagcgccaagggcaccaccagcaaggaccaagacagagcacagcgcagctcgtcggcctctcgacgccggttgctgcaaccaccgcctttattgcccacgcgggccgtgcggaagaagcaagaagacacgccaatggaggtcgccgcagcatcggcagcgagctacggattcaaggccgacgacgacgttgacagcctcagggcgacggagctcaggcttggcctgccgggcacggaggagaaggaggaggccgaggagccccagcacaaggcggcaccgccgccgccgtccacgcccagaggcaagaagcgcgacgtcgtcgccagcagcgggcccgaggacgcgcccaagaagcgcgactgcgagaccgacgccgacgccgacgccgcgccgccgccggccgccaacaagcagagcagcgtgcaactc

SEQ ID NO: 22753 - DNA, 2187 bp, Zea Mays
ccggtagtacgtagcgtaggtatcgtccactcgtccggccgtcgcgcgcgctgctcctgccttcttcctctcgctgatatattggcgacgcacttacgatcgaggccagcagctggggttggacttggatagctagctagatggccaagccactgaacctgactcctgccttcctctcgctgatggccaccagctgccgcttcagctccggcgggcatgcgcaccgcttcgcctcgtcgctaccgtgcgggaggacgacgccgacgccacggaccacgtcgtcgtctacgcgccctgcggctcaggttagccctgacagaagcaagcaacgcgatgacgaagcagcatcggagactacgataaggcagcagctccagcaagtcgatgtgcttgagaacacggggatttctcggcattttgctggtgaaatcaagtgtatccttgacaggacatacagatgttggttagagaggcacgaggaaattatgcaggacacaacaacatgtgcgatggcatttcgtattctaaggatgaacggatatgatgtctcttgtgatctgttgtatcatgttgttgaaacatccgggatccatgatccacttaggggacatttgaatgacacaagaaccttgttagaattacacaaggcctctacagttagtatctctgaagacgagtctatcctggatagcataggcttaaggtcaagtaccttactgagggaacaaatggagtctagtggtgctctacaaaatcctccactctttagagaggtggaacatgctctgtaccatcccttctacgccacattggaccgtctaacccacaggtggaacattgaaaatttcaatactacagagcaccagatgctagacacaccatacttgtccagtcgatataccagtagagatattctagccttgggtatcagagacttcaattcctctcaacttacttaccagcaagaacttcaacatcttaaaagttgggtgaaagaatgcaggttggaccaactaccatttgtgaggcaaaatttggcatacttcttattgtccgctgctggctgcatgtactcccctgaactgtctgaagctcgcactttgtgtgcaaaaaatggtgcactcataactgttgttgatgacttctttgatgttggaggatcaaaagaagaacttgaaaaccttgtcatgttggttgagctgtgggacgagcatcgcaaaattgagttttactcagaacatgtagagattatattttcttcaatttacaactcagttaaccagtatggtgcaaaggcttctttgttacaagaccgcaatgttaccaaacacctagtacaaatatggttggatttgctaaagtctatgatgacagaggtagagtggcgtttgaacaaatatgtgccaacagaggaggaatacatgacaaatgcatctttaacatttgcattgggtcccattgtattgccagcgttgtattttgttggaccgaagatcccggagtctattgttaaagatccagaatacgatgagttgttcaagctaatgagcacatgtggtcgactcttgaatgatgttcagagttttgagagggagtacaaggagggcaagttgaacattgtttctctcctcgttcttcatggtggctccatgtccatatcagatgccagaaggaaattacagaagcccatagacacatgtaggagagacctcctaagactagttcttcgtgaagaaagtgttgttcctaggccatgcaaggaattattctggaaaatgtgcaaggtgtgctacttcttctactcgacgacggatgggtttagctcacaagtggagagggctaaagaagtggatgcggtgatcaatgagccactaaagctacaaggaagtcatacgctggtgtctgatgtgtgaaaggaactaagcgtcgatgtgatgtgttcttttgatttattagtagttgtgttttctctatatggtggtttggtaggtgactgtataatgtaaaggagttggcacatgttgtcagtgtcgtaacatcttcttgatctattcagcgctctcttgggcttgcgttatggcgatgttgttgggtatgatgtagttgataactagtgtagactcatgtacatgataatacttcatgttacactaacatgcgcacgtgtggctatatggttgaagctca

SEQ ID NO: 22754 - DNA, 3972 bp, Zea Mays
gggaagagagagaatcgcaggaccaaaccctaaacccccgctcccgcctcctctcgctgctgcagcttgccgggagctcacgcggcctttgcttctcgcttctttcgctggccacctgatcccggttgttcttcgctgggctcccgagccgctgcactcgctgggtgctgccgcctgccaggaggagcggcacggccgtctacaggattaaagggagggaaggtttgtggtttaagttcccggaggaagacttgtggcggaactgtactgacttcagattgaagtcaaggagctaatttgggggaagaatgtcttcaaagtggcggtcactgcagcatcggcaccgatatatatgatgatcaacctactaccacttcagaaagagaggagaagaatgcaaaaccagggagtaatggcaaaccagccgaacaagttgttatggttggttgctggcttgctatgaaggaggtcagtttactttttggaaccatcatcaggaagataccattgcctggctgttctcattcagcttcatctcagaatggcttgcctgacagtattgaagagacaagtatatctgaagaaattcttgatgtggggcagttaaagatgatgggtgaccattttttacaggttcttcttaaaatgaagcataacggtgcaatagataaaacaagggctgggtttactgccctttgcaaccggcttctttgctcaaatgattcaaggctgtgcaaaatgacagagtcatggatggtgctactaatggataggacaattgctaaagggcaaactgtggatgatttgataaggaggagtgcaggaattcctgctgcatttatcgccctgttcctggcagagccagaaggaacaccaaagaaactacttccaagggcattagaatggctgatagagtttgctaagaactctttagctaatttccagaaagactccaaccagaggtctggagtaatgaaagagctgttggaatcacagtcagaaactacaagtgtatattctaatggtaacctatctaaaggtcgagatgagggtgttgttcccactgtgcatgtgttcaatgtgcttaaagctgctttcaatgatgcaaatctggcaaccgacacttcgggtttcagtgctgaagcaacaatagttgctatacgagcattttcatctccctactgggaagtgcgcaatgcagcttgccttgcgtatactgcactagttcgtcgcatggttgggtttctgaatgtgcagaagcgtgaatcagcacgacgatctttaactggccttgaattcttccacaggtatccagcccttcatcctttcctttctagtgaactgcaaaccacaactgaacaactagctgatggagtgtccagcaatttggagtcacacattacaaaagcaatacaccctagcctgtgtccgattcttattcttttatcaagacttaagccttcacctataagctgtggaactgatgattctttggacccttttttgcttttgcctttcatccaaagatgtgctacccagagtaactaccgggtccgtatccttgcatcaagggcattaacttgtttggtatctaacgagagattgcagtacgttattagtgatatactggataatttacctcgtggaagtcacaaagcaatggctcacagtgttcagcatactgatcctgccatatcagctaatatgggaaaagcaaatgtacttctgctgtctaagtcattcaattcaatacatggccttttgctgcagctggcttctcttctggataacaactttagaggtttgacagacggtagcatgaaggatcagattattggcctattactggaggttctttcaagatgctcttggcttggctgcacgaaattatgctcatgccctatcgtaattacatcttacttgcgggtattggatctcatgcttgatgttgcaaggacagggaaaagcagacatactgaagtcattcaggcattgctgctagagttaacttcccagtgcttgagcaacacagcatcaacccagtacgcattccatgatccaacccgtattgaactaaaacaacaagcaactgaatcatttttgagctgtgttggtctttctaagaaaaccgatgaaactaacgatgatgatgtgcagttgcaaatactcggtgaaccaactttagagatgcctagagtggattactcccttcatgaagtacacaaggagatcctgtcatgtctcactgatccttcatatgatgttagaattacggtgctgaagaggattctttggctcacaaaatcaatcagacatggttatgcagataacattttgcaccagtgggcaggagttaatctgcagcctgctttaatggaacggttgtttgtggaagaacaccctaagtgcctttattataatctgaagatcatcttttcatggaacatggaattcccattcaacaatggagaagattctagcacacttttgtccttgtgggataggttagttcatttaaacagcaccatgtcacatgcaaaaacgagagaaatagttctatgttgcatgggtatgtgcatgaaattgttcactaaacaatctaggggtggtatttcaatggattgtcttaagaccagtgagatctctgcatcctttgtcagaatcaatgaaggggatggattatctgatgccatgcttagattaaacttgtttgtcacacttgtcaagaaccaaagtgaaccatcagaaagcatgaatgctcgacgggctgctgctgaggcaattgttgcttctggtcttcttgaagaagcaagctacgttgcttcatctgtgtccaacatgtactctccttcagaatttgatgaagaccataccaaagagaaatgcatggaagatagcgtttttgaatttgttagtctttatacatgcaagatacttgacttgtggtttgtatgtattcagttgctggaggatgaggatgcatatctgaggcaaaaacttgcgaaggatattcagaaaataatcgctaagggttcagctaataccttctgtgatgattccacaccactacaagttgatagagtcattgaattaagcttggactatttaacttctttgtttggcctctggctgaaatacgttgaattcttgttaaggatagtcttgggcactggaaacgctctgaactcccgtggcgatttggtccgtcagatatttgataaagaaattgataaccaccatgaggagaagctattgatatgtcaaatctgctgttcaaacattcagaaacttctgaattcaaaatgccagatggaagcaggagcagagactaaactgttcctgcagaattggagggagatatttctaaagcagctcacatcgctgactggtggctatattgagaaagaggggaagaacgattggattggcggcataggtaaccacaaggacgtgttcatatcagtgtatgcagtcctactcggtttatacgcgctcacgcagtctggctctctggatcaattggaggaccactgtgcagtttatttgcaggaatttgcaaaccttgaaaggtctatcacaccattcctcaagaacccgttgatttctaatctttacgctctggtaaaattgtcacacgagaggttcatatcatcagataagcctgaggaccaagtgggtgattcaggatcaagttttgacccatattttcttatcagatgattttcgctaatgtactagtaattcttcattgttattcctccgttgtaagactcaatactaattgcttttttatacaaattaccatactatagattctttacttgatgccccttctctgtgtatcagtgcattttaagtgccttgggttttctagcactcaaaaaatgtatgacaaggttgtgactaacgtccgaacaactgataatgatataaatatttttccgattaacataggactacatcaagattcag

SEQ ID NO: 22755 - DNA, 1695 bp, Zea Mays
ctatcttcttgctaggattacagctggaccatggaaacaataacagcttgacatcttggaaaccgtacggtgttcctcttcttgcacaaatttctcgcaatgaaattgtcacgggttttgatatccatgagttggtccataaaatgcttgtgcccgtgctaaggaatccggactctctgcatttggctgttcaaagttctgtttccacaagaactcatagttatcataccgacagcagcaaatgtcagcttctgttggttgatgatagcaacacagtcattgaaaaatcaaatgatgctatcaggatcccacaatcttcacttgcaactgtattttttatcaactggcccaaggcagatctgaaaaagatagacactcatcatttagagtaccttccagaggtgtttatgtatgctccgcctgcgaagagaacccgtggtgaagctctgtcactctatgcatgcttggatgctttcttgagagaagaacctcttgtacctgaagacatgtggtactgtccaaggtgcaaggagcaaagacaagctagcaaaaagttggatttgtggagacttcctgaagtactagtcatacatctaaagagattttcatttagtaggtcaacaaaacaaaaactagaaacttttgttaattttccaatacatgacttggatttgacaaattacattgccaataagaagacttcagagcgccagatctatgagctgtatgctgtgagcaatcattatggcaacatggcaagtggacattatactgcacacattaagcttgtggatgagaatcggtggtacaacttcgatgatagccatgttgcttccattgatgaagatgaggtgaagactgctgcagcttatgtgctattctatagaagggtcagagaacaagacatagcaaggggaactagtaatggatctcagttatatgcaaaaagaagtcacggatatagccataggtaggctgatgattactgtggttcggtgcaagggggattctggaaatgacacccgcacgcctttagtcattgccaggagtatatggcttgctggaaaaaatgctcatcacgtgcagtcaatgcaccgttgtccagttgtcacagaagatatttcgtgcagtgctggtacaagatgggaattttgtatgaggtgagttgaaggagtaattgactctttatgataactgggtagcttcaacaggaacgccggggcttggtggcattttgttcgtctgttttcttctagaagagaaacaaggggaggcaagaaaacatttaggaaacaccttttcgttaatttgattttttatttccatttttagatttagctagtctgtacactgttgttggaaatgggtccgctgttgttggtcgatgcttgtggtggccaataatactacacccaactataccaggctctgcaatggcgaatcatggtgcacattatggtgctctgttgcgggaagaattgtagctgatgttgtacttatatactggcaaaaaggccccagaaatgtaaaaatgtatcgatatgctgacatcttaaaccctattttggattcgtgctctttcctatggatgaaggtgtgcgccatttaggggttgtttgtttgaagaatcaatccattctaggtaggtgattatcacgagaccatttcataaatttggtgaaatgaattcatttt

SEQ ID NO: 22756 - DNA, 245 bp, Zea Mays
ccttgctcttcatatgcaaattttctcgccggttttgggccaccagcatgttcttacctagtttcttgccatatcagttgccaggccaaagcaaatcagggagctgatgaaggtgaacggcctgacaaacgacgaagtgaaaagccatcttcaggtgagctatgtaattgacccaaaaggcacttcaagcgggcaggaaagtctaaggcccttacttagtacttccaaatttatatgagccatca

SEQ ID NO: 22757 - DNA, 2531 bp, Zea Mays
tcctatgcagccgatcagactgcgaggcgtcatcgaagtccgtcacaacttgatggaggcggttctggtgtcgatattacttttatcgagcctgccttgaatggtggtcctgttaattcggctgtacaggaagtgcatggagagaatttggcagtgccgggtgatacctgtgttggatctgtcgaaaatgctgtgcttccagaggacacgctggtgcaagcagctcagttgtgctccaatgatgaggcacggagtgagaacacagaagctctaacaaaaaacaatcaggttgagctttcaggggatcagtgtgggtatcttcctcagccagattttgattctggagttcaaccaggggagaaggtggagagtgaagatttgccgagaccaccaagactatcacgggttgctcctcctgatcttgatgaattcaagacaagagcaattgctgaaaggggacctggtatttctagtcaacctggtaatgtcatccaccgaagggagcctagcgggaagttgtataattatgccgcggcatctaaaggggctaaggttctggatttcaataaggaggctaagggtgcttccaacatcttagataaagacaaagacaagtacctccgcaatgcttgctcagcagaggggaagtttgtcatcatagagctttctgaagaaactttagtagatacaattgcaatcgcaaattttgagcattattcgtctaatccaaaagaatttgaactgctgagcagtctgacatatcccacagaaaactgggaaactcttggaagattcactgccgcaaatgcaaggcttgctcagaattttacttttcttgagccaaagtgggctagatatttgaaactgaacttggtaagccattatggttctgagttctactgtactctcagtatgctcgaagtgtatggaatggatgctgtagaaaagatgcttgaaaacttgattccagttgagcataagaaaacggaacctggtggcaagttaaaggaacccattgagcaaattcctttgaaagagtctgctggaggaaaggaatcctcacaggaaccacttgacgaagatgaatttgaactagaagatggtaaaccaaatggacatggtgatccatcgaagaatggtgctagtgatccagtttcagagacaaggacacttcaggctggcaggattcctggagatactgttcttaaggtgctaatgcagaaagttcaatctcttgacgtgagcttctctgtcttggagaggtacctagtggagttgaacaacagatatgggcaaatatttaaagattttgattccgatattgatagcaaagatgccttgttagagaagatcaaaacagagctgaagaatcttgagagcagcaaggacagcattatgaatgaaattgaaggtatcatctcctggaaagtagttgcttcctcgcaactaaaccagcttgtcctagataatgctctactcagatcggaatttgaaacatttcggcaaaaacaggctgacatggagaacaggagtcttgccgttattttcctcagttttgttttcgcttgcctagctcttgctaagctgtctataggcatcatgtccagattttgtagattctatgactttgagaagttccataatgtaagatccgggtggcttgtgctgctgcttagcagttgcatcatatccaccattttgataatacagtaacacaagcattcaacctcacatgttcaaggaatcaaggctgtacattatagtcgcatgaggtttctgtttcaaaaacaaactatacctctttcacagctcatgcaatttcaaacagcgcagttgtttcgcgccattagttgctgtctcagttcggaggtccttttacagccgcagcagcagcagcagactactgcgagtagaatatttttcttgttccgctcaaggttttggggaatgtaaagcaaatcgacctggaaagcatgtgcagtctacctggcatacttgtggatcggcgcgcttctttatttgttcaaggaaccagagcatggtccccatgtggcttccatgttgccaatgtattcattgtcatggaggcatgggttaataattaatatactagtagtattcctccttccatgagcactgtgcagtccatgttcttcagctggccttctggctcgtgcacatggcctcaacgctgggactgccttgaaaggcactgtggagtccatgtttgtttccagcaggaaaggcgtcgctgataacttcagtcagcactcagcagcaaagtcaacgcggaaaaatactactacacgattgtgtgaagtgaaatccactcctgtctggagctcttttgagttggttgagagttgagaccgtggttgggttgcagtaggtcgctgatgcggactagtccaaacagtttcagaaatggtcggtcatccacgatggctgacagattttgtttcatattatgtacagaagacgcgaactgtatgcaaactatgaatgtgaccaacggtcagcttactgggtgt

SEQ ID NO: 22758 - DNA, 1487 bp, Zea Mays
ctgcatttgccgttgcctctagatggcgcagagactattctagtttctgcgcatgccctcacggatctttagactccagggttcaacttcactgtgaatacgctgacgctacgagaagtcatcacggaaggggtctcgaagcaaggtgcaaagactcacctgccgtctctgatgggctttgctggctgggtatccatgctgctcttcctcctggtcgccggtgctgtagcaaatgaccagatcttcaccacttcaggtgtgccatttgggcggagttcgcgtgagccaagttaccgcgtcgaattccatcctgttgattcaccattccatccagagaatggtcaagaatcggtaccaatggctagtcatgatgggaaacgttataaatgctttctaccagttgaagaaactaaaaccatgaagtcaatgcttccgcaaaatgcaactaatgttataatagaaagtgaaaggagaattaagccaaaggagccagatgagttacttgaggttctcaaggaccagtgcttctacaggcatgaaggttggtggtcgtatgaattctgttatcatgggaaaatcagacaggtccatgtagacgacgataaggttatccaagaatttgttctaggcgaattcgatgacgacgcgactgctgcataccatgaaaatatcacttctgagttagttgacgatgaccatcatgtgaaagatatatctcagaggtatcatgttcacttgtatacaaatgggactgtatgcgatctcacagatattccgcgggagacagaggttagatttgtctgctcggagcctactgtactgattagttcagtcaaggagatctcttcctgcagatatgttgtaacgattcaaagtcccatgctttgcaaaaacccgttattccaggaagaaaaacgaaccctctccatccactgcaatgagttgcctgctagagcggaatccagcgcggaggatgactcgcttccaaaagaagctcagatttccatcatccccgatcaggatgagctacatgatttcccagcctatgctacttgatttgcctccaataattatgtttgatgtagaaaaaaaaacaccattttggaggcgcaggggcaactgagcaacactatgtattaactatctcgtagatactacagcagaggctccttgtaaagcaggttgagacgatcattctgcagttcttattatataggatgattacgaaggtaacatgtttgggacagtaacatttgcttgaaatgtatatagtctacaacaagaataatgccagcattcttgaaatgtaggtgtgcgagcacttttacacgaagtaatattgctctggtgtgacgaacgatctgttgtcggttgagatgaaaaggcgttcgccttctattaagaatgtaaatggtacaaaaggatgtaaatggtacggatattatctgttcgtatttgaatttaatccggtttgagatgtatccgag

SEQ ID NO: 22759 - DNA, 664 bp, Zea Mays
agaccaacttgttcttgctttatttatggttcgagcgagagcggacttgccccttgtgcagagcattggtaaaacctgctgatatccggtcatttggtgatggttctacaagtctattcttccagttgttctagactgcaagcggtaaaatcctaacataacaatggacgagctattgcatgaaaactcgagtggaggtccttttaacgccatcatgtgaaaccatcttccgcaatgttgagatcaatgtgagaaggttcatgacagtcacgacagtgcagtcgttatttgtttatatattcaaccaaatagtttacagagctttttagttgcaacagaggcaaaatgtttccagcagactgctttcagagcctttagaactctgctggacaaacaatttgatcgttgaggtctgctgagccgacaaccgtatgcctcctgtaaaattctggtatttttttttaattttttttttgcatatgtgggcttacgtgggtgtaactgaaatttgaaagtaccgcttgcacagcaagaattgccggtgggggttgaaagtggtaaatgaatgtaactgtaaagcgttgttacatgaagacaaaaatttccacccgttgcaacatagtaaatgctgacagacgcgacttgtgtactgttttaagttggg

SEQ ID NO: 22760 - DNA, 1485 bp, Zea Mays
agccacctagctgaacccgaactggcgcacgaaccctagctactacctactagacgtccctgcccccttcccctccggaggtgctggattcacccctcctctccctcgcgggtcccggcgcggacgcaaggcaaaggcaaaaggcggcagaggtggcgctgcagtccaccaattagcggctatggtgcttggcaagatcgccatcgtcatcggctccggagttatcggatcagtactcacaggtggtgagtctggtcttcccgacttcaaggatgcaatctctggtgctttcaagttcttgaccaagagttcaaagcaaggcaaagatgggccgtcgaccagcaggccacatacttctgagttgttgacccaggtcaattatctcagagaggagctacaaatgttgtctaaatcaaatcatgttgctattgtcactgttgatggtagacctgggcctggtgcatatggtattacagctgttattattggagctattggctatttattcataagatggaaggggtggaaactttctgatatgatgtttgtgacgaagcgtggattatctgatgcttgcaatgttgtggggaaacaagtggatcaggtttcagaaagtgttaatgttgcaaggagacatcttgcaggaaggattgatcgtgtagattgtagtttagatgaatgtcatgaaattacagaagccacaagggaacaggtcacaatcatccatggagatctaagtgccttccagaaggaaatggaaacagttcatcttgtagttcgtagtctggaggcaaagcttggacgcctagcttatactcaagatcggacaacacgaggaatatatgatttgtgtgaattcactaaaagattggatcagagcccgaaagctgagactcatcaggttacatcatcaactcctcgccctgctattgaatcctcagagagaattgctagggctggttctttgcccccagctttggaaccagagtctcctagaatagaggcgcctaaggttgtgcgctcatctacaatcatgtcagcatcgggacttagtttgctagctggaactacaacaccacctaaaagagaccagccgggtgctttcagcagaacaagttcaatgaaggaaggatcctctgagttaccgagtggtgtccgaagctcagcagaaccaagccccaggagatctggcggttcaaccctttttggagggcttggttttctaaggagctacaccagctgagacgaacttaataccttgcagggcaatgcctggagggttgtatattgcactggattatactagtagaatacatgtttggcaaggagcagttgcaactaaatttgtgcttttcttggactcaaacctgctggctgatgatgcttgcttggatagcatgtatgcaacatttgttgtggcagctgcaggctgcaggcatatctggaaactctggatccactcacggttggatttccacccagtac

SEQ ID NO: 22761 - DNA, 2711 bp, Zea Mays
ctgaaaaatccccctcccctccccgaggttgcagcggcgagggaggggagagataataataatcgcaggagggaaaagcagcagcgcaggcgcaaaaagcaaatcaaagccacaccaccaccaccaccggcagctgccgagagccgcgcccgcgcccgaacacaagggagagcggccggagaggaaagccaaatccatccactccaccccgtacgccgccgccgtccctgtccctcccctcttcccgcgcgcatgggccccaaatcgccagcgccgcgacgagcgcgcctgcccccgcggcggcggtagcagcagcagcagctgctgctgtgtgcttcgcgtcttcgccggggatggcgcggctcgggcgagcgggctgccgctccggtccagcccgagcttttttttcaggaattcctgaagacacattgagaaattttatgtccaatgtcttgcctgctgtattgatcctggagtttctcagtgggaccaatttgattgttcaaacgtttgctctagaagtagtcgcccctgccatgcctccattccaagatctatcacgtcctccagtgcagcataccagacacttagcaacagctgctcctgctcacgtagatgctgaccctccggatgcagcttcaaattctagcgcagctcctttgggattagtgcagcctccagtgtctcctcacagtggttgttgtgcaccgaacatggtacaaaaacgagggacccgggactgccattgtgtttatccagtgagaattgagctcttccttcgtaatgtttccttgacttcaaactggagcaacaaatttcttcaagaacttgcttctcagctcaacctgcgcgttaatcagtttgagattgtaaatttttatgttgttggagcttctgggctaaatatcacaatggatatagctccctacactggaattagctttgctgctgatcaagtcaaggcaatgaattattcacttactctgcatacagttcggattgatcctgtgttggtcggggactataatcttcttaatttaacttggttcaggtcattggctccagctccagctccagcattcacaatggcacctagggcctctccatctacagcatctacctttccaagacagagtgagggtccaagcaaaaatagacatgcaagcctgatcacagtggttattatatgtgttggttctctaattggagtcttgctgattgttttaacaatatgcttctgcacatttaggaaagggaaaaagagagtgcctcatgttgaaactcccaagcaaaggacagcagatgcagtttctacagtggagtcccttcctcgccccaccagcacaaggttcctttcatacgaagaactgaaagtggcaacaaataacttcgagccttcaagtgtgcttggagaaggtggttttggccgtgtcttcaagggggtactgggtgatggcactgctgtcgctataaagaagcttactaacggagggcaccaaggagataaggagtttttagttgaagtggaaatgctgagcaggttgcaccaccggaatcttgtgaaactgattggttattacagcagccgtgaatcatcacagaaccttctttgttatgagcttgttcccaatggaagcctagaggcttggcttcatggtacacaaggtgctagccgccccttggactgggacgccaggatgaggatagcacttgatgctgccaggggattagcatacctccatgaggattcgcagccttgcgtaatccacagggatttcaaagcatctaatatattgcttgagaatgatttccatgctaaagtgtccgattttggtctggcaaaacaggcgccggaaggtcggacgaactatctttctactcgtgttatgggaactttcgggtatgttgcaccggagtacgccatgacaggacacttgcttgtaaaaagtgatgtatatagctatggagttgttctacttgaactactaactgggaggaggcccgttgatatgtcacagccctctgggcaggaaaacctagtgacttgggcacggccaattctccgagaccaagatagattaggagagctagctgatcccaggcttggcggccagtacccgaaagatgattttgtgcgggtgtgcacaatcgcagcagcctgcgtttcgccagaggcgaaccagaggccaacaatgggcgaggtggtgcagtcactcaagatggtgcagcgctctgtggagttccaggaatctgtgccaacacctcccgctcgccccaacgtccggcaatcgtcgacgacctatgagtctgatggcacctcgtccatgttctcttcgggccccttctcaggcctcagccccttcgagaccgaaaccattccaaggactgcggttttctcagaagatctccatgaaggtcgatgactggtggggggtggctgccttgccatcgccgagccgagccgtttctctagagcctgtagccatgtagtcaagcattcaaaggctggtggtccaattggcctggccagccattgggaggaaaggggtacctgtaaattccatttttctgcgccgtctcaaaagactactactagattattacaacccacaaggacgttctctggctttgtatggaagaaatggttttgttcgaagttgctgctgtcctcagtccatagctcctgaattacgcagacagacagtcctaac

SEQ ID NO: 22762 - DNA, 206 bp, Zea Mays
cacaatgcttcgaatattaataaagactaagtaataatactacagactatagtcatttacatgatataaatcaaagtgcacataatagaaacgtaaccaacgtaaataaacccgccacatacagctgactgggggaggtcgtcaaactcattgaagtcctggaactcctagaagtccgccttatcaccttcttcttcttctttacc

SEQ ID NO: 22763 - DNA, 3107 bp, Zea Mays
cttataatgtcaataagtattctggaatgtttttccgagctcaaatagagaacttctggagctggatatcagtattctgttagggatatgctccaaccaagggaagctgatgtgcctgcactctttcttgtcttcattgtacttcccgtggtagcttattttcttcttgggagatggcatgactctgcaagtaagaaggcaagggcaagtgtgcttgcacagcgagctgcagaagaagcctatagagaggaaacgatggcgtgcccagacattattccgccaggcccttccttgagaactatgccctatttcaaacctgcgccttcgttaagacaggaataccatgagtgtgcaacttgccatgcccctgcaaagactcgttgctccagatgcaagtctgttagatactgctctgggaagtgtcaaatagtacactggaggcaaggacataaggaaacatgccaaaaatggcttggtagtggttctagcagctttggtggatctagcactgaggctactgaacagatgccgttcttggctaacttgaattcacctcttccaggtggtgacattcacttgcgtgacatgaacttcgatactttatcagaaccatcctttcccacaactgatggttacaatctagatactgacccatttccggcagatagaagcaacatgaatagatcaaatcaaggtattcatatgagcgaaaatggtgctgttggtgtatcttttgaaaagaataattataatgctgctgatgaaatacactcttcggagattttatctggaaacaaggtgtcaaacaactattttggttcagatgcaatgagtggtaatggggatgcaacttatcctgccaaaagtaatgcacagcagcctagcagttgtgctcctgacgtgagaaaacaatcaaaagcaagcatcacagtttatcagcctgacatgagtgtctatttaacttctgacatggtcagttcttgtgagggatcatatgtttctgccggtgagccactgcaaaggagcttgtcatctggaagaactattgggaaagtaactgtggtgaataaaaggccttcttacccatcaagtaaggtggtctcagcacaaaagtcacaggataaggtgtctacatcatatcaaaatgatgcccatgagaagaatccttgcaacaaaaatgaccaaagatctacccccacatgtgaatcaagtcaatcaacaagcagcaatctactgaagtctggaacatccaaggttgaagttttaaagaagccttcaaaatttctcaaaaccagccttgtggcattgatcaatgataataagaggaacaaggtattgttcccatatgaagatattgtcaagttttttcagtatgaagcacggggtgtttcccctagaggtcttttcaattgtggaaacaggcatcttgtgatgtctatgcaagcagcttgcttggatgggctgggtggtgagaagcacgttgaaccaagtttgcaggaaacaacactgatacaacagatgtttggtggccgtcttaaatccaaggttaagtgcctcagatgctatcacgagtctgaaagatatgagaatataatggatcttactttggagattcatggctgggtagagtccttgcaagatgctttgacacagttcactgctcctgaagatttagatggtgataatatgtataaatgtggaaggtgttctgcctatgttaaagctaggaagcaactgagcgtgcatgaggtgccaaacattttaacagttgttcttaaaagatttcagtcaggaaaatatggcaagatcaacaaatgtgttactttccctgatatgttggacatggttcccttcgtgactgggtctggtgacaatccccctctttatttcttgtacgccgtggttgtacatgtcgatacagaaaatgcatcattctctgggcactatatatcatacgtcaaagatatgcagggtacatggttgagaattgatgattcagaggtccaggttgtatcagtgaatcaggttatgtcagaaggtgcatacatgcttttctacttgaggtcttttccccgaccaccaaggatatacatcgagaaggggctgccggttacatccgcaaagcggcacacgtcgaaatcttccaagggctctaaacacgatcgcaagcagacagagttactctttcctgcaaacgatcaggcatatggcgtctatgatttcagacccgatggcgaaggctatgcccaagatcagcatgcagagctgaggtccagagctttccatcacgccgacgatgcctttgcagactcggttagcgcggacttctcggaagcgacatcaagtgaatggtcgctgtttaccagctccgacgagtcctcgttcaccaccgagagcacaagggattcgttcagcgtcgtggactacggagacaacgccggcctggatccgatttcctccatattcgggccaagctatgctccggagcacggtgctcccggcagtttcgtctcgcgcacaaggttctcaccttccagtccacagacaaggtacttctcggagagcacaggctttgtctcggactcttccatgccggcccacccccacggcattgtacatagaggaaggtatccggatagtagggcgtgcgcctcttctgcggaaccgcttgcgtcggcggcgcatcagcggagcgggtatggccggtacccccttagtcgagatggttttgttcaaacatctggtttttgccaaatgtaatcggctcacatttcattagctgtagctggtgcatcggcagttgcggttcttagcactgccgttaatgctgcctcatgttcttttatttcagatgaggcttattgaatttttagctacatgtcgtttctaggggtagctcgattcgatgtagcgaaaaaaagttagattatgtctatatgcaggtgaaattttagagcatggtgacaagctctgtggcaaccgttttccaatgctaatctcgtaaccctggctgctgcttctggtcttagattaatgtatgtcccaagtgattattccccagcttgttactttctcggaacgttcatgcatttcttagagagaactta

SEQ ID NO: 22764 - DNA, 376 bp, Zea Mays
ggctgtgatggagggtacttcaatgcaataatgagcttcccacaaaattacccaaacagcccgccatcagtcagatttacctctgaaatgtggcatccaaatgtctatcctgatgggcgggtttgtatctctattcttcatccacctggtgaagatccaaacggttatgagctcgcaagtgagcgatggacacctgtgcacacagtagaaagcatagttctgagcattatatcaatgctctctagtccaaatgatgagtctccagcaaacattgaggcagctgaggcactagcatcctatatttcagctcgtgaagcctccgcatatatctgttaataaaggcttaaaactaatgctaatctgccaatggctgagc

SEQ ID NO: 22765 - DNA, 710 bp, Zea Mays
cttcctcatatcttactcatgtgggagccaccagcattggactgacaaaggcgatgaagaactgtgtagtgtgtatgtgccaacaaatcatctatacatcggtgacatatttctggtgaactctgaggagatcataagacctaatttatccattcgagaaggaattgaaataattgtgtcaggaggaatgaccatgcctcaggtgattgcatcactggagcccatgccacggaaaagccagaacattcgtctaaatagaatgacgtgatgtaaaacatgtcacatatgcaacaagatagcatgacctgtggggcacgattagggtgccttggctatatgcgtagccatgtgatttggatagaggagcaactttgtgctgagccattgtggcatttccatactgcagggaagcatcgtgttgatgccctgggatacaaaccagccctcaaacttgtgctactctttgtgcacttactagtactggttcaaaatgttagcgtctacgcgtgaggtgtataattgattaaattcgtttgtaactacgtgctgtataacatcttacgttacaaagagatcacacaacgctctgaccagatttcttctttcagatttacagacttgtttcttgattttattctatcgtgtaacgtggctaaagagatcacacaacgctccgacgctttccaacagggcaacgagtgctatgcaag

SEQ ID NO: 22766 - DNA, 2692 bp, Zea Mays
ccagttcccatcaagcagcaacaaactgagaggagacagaggggcgcaggagaaagagaggcagtgccgagcagggagagagagagagaatccccgacctctcgcctccgccctagccaccaaggttcctcctgatcgattgattcccatccatccaaaaccccaacaaaatacgacagtggcggcggttcgaggttcggtgcgagagcgcgacgtcccggaatcggcggcggcgaagatgtcggtgagccacgcggaggacatcgagatatcactgtgcgacggcaactcggaggacgagcggcggcggcgtaagatcggctcgctgcggcggaaggctatccacgcgctcaagaagcgagggaggcgccgcgtcgacttccgcttcccgccggcggccatctccatcgaggacgtccgcgacgccgaggaggagcgcgccgtcgcctccttccgggaccgcctcgccgcgcacggcttcctccccgacaagcacgatgactaccacatgatgctcaggttcctcaaggccaggaagtttgaagccgataaggcaatgcagatgtggtcggagatgctgaaatggaggaaggagttcggaactgacaccatcctcgaggattttgatttcgcagaactggatgatgtgctgcgctactaccctcagggctaccatggtgtggaccgcgaaggccggcccgtgtacattgagaggctagggaaggtggatcccaacaaactcatgcagatcacgtctgtggatcgctacatcaagtaccatgtccaggagtttgagagagccttcagggagaggttccctgcctgcacattggctgccaagaggcacattgactcgaccactaccatcttggacgtccagggtgtggggtttaagaatttctccaagactgccagagaacttgtgcaccggatgcagaagattgatagcgactattatcccgagacactccaccaaatgtttgttgtgaacgctgggagtggatttaagtggatctggaacagcgtgaagggcttccttgacccaaagacttcatccaagattcatgtgcttggttcgaactaccagagcaggcttcttgaagtaatggattcgagtgagctgccagaattccttggcggttcatgcacatgtagtgacaagggtggttgtcttggatcgaacaaagggccgtggaatgatccttatatattgaagctgatccacaatttggaagctggatgcgcgagggaaatcaaacctgtttctgagggggaagaaagaaacagctcatcctttcggttggaacagatgaaagtaacatttggcagggcttgctaagtgatacatcaaatgctgaatctggatctgatgttgatgattttggtgcatcatttgttcataaagtttctgactatggttgcttgactccagttcatgaggaagtaaagggcacagatcgtgtgacatacttcagctatgatgatcaaagccacccggatatggctcctgaatcttaccatggagcgcgacgagctactggaatggagcaccacaaaccaatggctgatttcagccaatattctgccaatagaaggcctggggacagtgctcttaacgtcaatggtacggccgctcaaagcggctgggaaaacgtggtgaagctagtggttacaactttggtcaagctcttctacttcatccggcttttcctctccacagccgagaggaggctcgagagcatccatcgccctgctccaccagcggccccagcagcggcagaggagccaagacctcgcgccatcagtgatgaagaggtgtgcgcctgcctgcagcgccttgacaatcttgagtcgatgtgcagtcacctcgccgccaaaccgccgcagatcccagaggacaaggaactcattctgttgagctcgttcgagcggatcagatccgttgaggctgacctcgagaggaccaaaagagtattgaatgcgaccgtggtgaagcagaaggcactggtggagactctggaatccgtacaggagtcgtcgtctagagtcaagaagaggatgttctgttcataggacattgagccgagctgagcaccagcagatcccaggaaccatgccatctgcgtcgtcattaaccaacaaactgtgaagctgacgtgcgaagctgccagcagccggagcggagccgccattttgacctcgtcgcgaccacccacttcgtcagccctccgaggaggatgaaccagcctacaccaaaatggaagagaagaccgtagcacccatgtcccttcctttcattcccactcgtttttgtagcctccgtacggttgtatttgttccctgccttccggcgctcccgttttttgattggtgaattctctgctccggccggccgccgagcgccatgccaagtgctgtgttacatcttcttttccttggtgccgtccgaatggctggagtcgttcttctgtatactgatgagtacagagtagtgacccccgcggcaggagctgagctggggagaagcacggtggcgagcttggtctggctgcagctcctgtgctgtcgtctgtacatggcacagactgcttctggtggccctgctaatacagattgctatgaaatggcctgtttgggttctgtgctgggatttgtcgctggatggattggtttaggccacctccccggctga

SEQ ID NO: 22767 - DNA, 4123 bp, Zea Mays
ctcatcgacaccattaaggcattagcaaggagcgagcacgagcagctagcagtagcaaaaatggaagccgcatagcacctgcaccggcgcaatatttttttctccgggccatcggcaataattgggcatatcttgaagcttacatcaccgatatcttttgcttacgacgaggccgaggccgaggccaggtccagggatgcagcagtgcagatgagcccgaacccgagccccacccagctcttcctcccctagcagccagctatcgctagcttcgcacagccaccaataagccccccctcccccgcggcggcatctctctccagctcgctcgctcgctcgtgattcacccgcaggagccacccaggcacgagggcctatctcttcccctcgatcggcagacagacgacggaagtggccgcgacccgggtgccggccttgtctttcggctttcgcgcgcggcgtggacgatgtgtgaccttgacatggcgatgcgggtggagaacaacgggcgcccccgtcaagtgcccatcatggtgaggaagaagagaactggccctggcggctctggagaaacttctggagagtcttcaggagcttctggacaaggttcctcacagcggcctgaacggactcaacaacctggggcaggacgtggctgggtgcctcagcagggtggccgtggtggcgggcaacaccagggtcgtggtggacattatcaaggccgtggagggccaggtccacatcaccctggtggactgcctgagtatcaccagcgtgaataccagggacgaggtggtgagtaccagggacagtaccaggggcgtggtggtgcccgctccagaggtggaatttcacagccatactatggtgggcataggggaggtagtgttggacgaaatgttcctccaggtccatccagaacagttcccgagctgcaccaagccccatacgtccagtatcaagccccggtgatttcaccatccccatcgggacctggctcatcctcacagcctatggcagaggtgagctctggacaagtccagcaacagtttgagcaacttgccattcatggtcagagttccatgagtcaagaagttcaagtggcaccagcatcaagcaaatcggttcgattcccattacgccccggcaagggcacttatggggacaggtgcattgtgaaggcgaatcatttttttgctgagcttcctgacaaagaccttcaccaatatgatgtaactataacacctgaagttacttcacgtggcgttaatcgtgctgtcatgggagagcttgtaacactatatagacaatcccatttgggcgggcgtctacctgcgtacgatggaagaaagagcctttataccgctggaccattgccttttacttctatgacatttgaaattaccttgcaagatgaggaagatagtgttggcggtggccagggcggacaaaggcgcgagagagtatttagggtggtgatcaaatttgcggcccgtgctgatctccatcatctggctatgtttctagctggaaggcaagcagacgctcctcaagaagctcttcaagtgcttgacattgtactacgtgaattgcctactgcgaggtattctcctgttggtaggtcattttattctcccaacttagggagacgtcagcaacttggtgagggtttggaaagttggcgcggtttttaccaaagcataaggccgacacagatgggcctttcactgaatattgatatgtcctctactgcatttatcgagcctctccctgtgattgattttgttgctcagcttcttaatagagatatttcagttaggccattgtctgattctgatcgcgtgaagatcaaaaaagccttaagaggtgtgaaggttgaggtcactcacaggggaaacatgcgcagaaagtatcgcatttctggcctcacctcacaagcaacaagagagctatcattccctgttgatgatcgtggtactgtgaagactgtggtccaatacttcatggagacttatggttttagcatccagcacaccactttaccgtgcttgcaagtgggcaatcaacaaagaccaaattatctgcctatggaggtttgcaagatagttgaaggacagcgttactcaaagcgactcaatgagaaacaaatcactgctttactgaaagtgacctgccagcgccctcaagagcgtgagctggacattttacagactgtgcatcacaatgcgtactatgaagacccgtatgcacaggaatttggtataagaattgatgaacgccttgctgcagttgaagctcgtgttctgccaccaccaaggcttaaataccatgatagtggccgagagaaggatgttttgcccagagttggccaatggaacatgatgaataagaaaatggtaaatggtggcagagtcagcaactgggcatgtattaacttctctcggaatgtgcaagatagtgccgctaggggtttctgtcatgaactggcaatcatgtgccaaatatcaggaatggatttttcccttgagcctgtgctgcctccagtgactgcaaggccagaacatgttgaaagagcgttgaaggcacgttatcaagatgcaatgaacatactgaggccacaggggagggaacttgatctgctgattgtaatactgcctgacattaatggttccttatatggggatctcaaaaggatctgtgagactgatctcggattggtctcccagtgttgtctgactaaacatgtttttaagatgagcaagcagtatcttgcaaatgttgcactcaaaataaatgttaaggttggtggaaggaatactgtacttgtagatgctttgacaaggagaatcccccttgtcagtgacagaccgaccataatatttggtgctgatgttacccatccacatcctggagaagattccagtccttccattgcagctgtggttgcttcgcaagactggcctgaggtcaccaaatatgctggactagtgagtgcccaagcccatcgccaggagctgatacaggatcttttcaaagtatggcaagatccacagagaaggacagtaactggtggcatgataaaggaacttctcatttctttcaagagagcaactggacagaagccccagaggatcatattctacagggatggtgtcagtgagggacagttctatcaagtattgttgtatgaacttgatgccatcagaaaggcatgtgcatccttggagcccaactaccagcctccagttacttttgtcgtggtgcagaaacgacatcacactaggctgtttgctaataaccacaacgatcagcgtacagttgatagaagcggaaacatactgcctggcaccgtggttgattcgaagatttgccatcctactgaatttgatttctacctgtgtagccatgctggcattcagggaacaagccgccctgctcattaccatgtcctgtgggacgagaacaagttcacagctgatgagctgcagactctgacaaacaacctatgctacacgtacgctaggtgcacccgctccgtgtcaattgtgcccccggcatactatgctcatctggcagccttccgagctcgcttctacatggagccagatacctctgacagtggctcaatggccagtggtgcccgtggccctccaccaggtgcggcacgcagcatgagaggagcggggagtgttgcggtcaggcccctacctgctctcaaggaaaacgtgaagcgtgtcatgttttactgctgagatgctgagctaccttcaccaagaaaatatcctgacttgttccatgtacccgcactgtttcggtgatactatctgacaccgaatttatgcattaagtcttccagtggtctggagattttaagtaacgcctgtttttattcgtgagttgtaacgctgcagttcgaggagcttcagtgctgtatgatgtgtaaactatttgttgtaagttgtaaccaattgttgtaagttgtaaccagccactatgttataatcctgtttgtttcagctttttacagtttctcgctaccaaaagctgttgtgaactgtcaaacgtttagctttttagttagctctataaaaatcgatttgttaaaaaccatccaaaattaata

SEQ ID NO: 22768 - DNA, 3574 bp, Zea Mays
catctgtgggcttctggggtcttctactacccatgttctcctcaatggatgcccagatactgctgaaaggagcaacaagggaagaacttaagaagattaagcgtgtgcttcatttcactgtctttgcagcttaccatttgatccttgaaacttcattctttgccgatcaaaaattgtttacgacagacaaaactaccacagggaaagagaagtgctttaaaactaatcaacagctgcttggttcctgttatgataattcaaaaaacagtgacaccatgaataacacaccaacttgtgatgatcagtatcctaatcaggaaaagcttattcatactgaaaaatctgtaccattgcatcttcatgattccaaaactatggcatctgaagattctgctggtgaagagcatattgacagcaaaggcattcagtcatattcatccctgcctgtttcagatccctcgacaaattttatgcaggacatgccatcaccagattgtgctgagtcaaaaatatctggtggttttgatggctcaacattcactgatacttccaaagaggtgcagaagaaggaattgtctagtgacaattttcagggaacttttgatgtaatttgtgctgagagtggagctgctttgaacactcaggatatcttggtatcaatgtctagccaacatatcaggaaccaagctgtttgtgagcagagtcacctgtcgcggataacttattatgggtattttgatacatcccttggacgatatttgcaagatactttacttaatgagaaacacagctgcctatcatgtggtgaatctccagaatctcacatgtactcttatacccaccataatggtactctaactgttcttgtgaaaagacttcccttggagttgacactttctggtgagactcaaggaagaatttggatgtggaccagatgtttgagatgcaatgctaagccgacccatagggttataatatcttcctctgcacgtaatctgtcgtttggaaagttcttggaactcagcttctcaacccactctgctaccaagaagctaccaacatgtgggcatttgcttcatagagactgcctacgtttctttggatttggatccagagttgctatgttcatatactcatctgtagaaatatattctgcttgtaagcctccattgagtttggagttcaataaccgaaacaaaaatgattggcttgacattgaagtgaagaatgtccttcttaaatggaagcagttatttacaacaattgaaaatgtaatacaagacttgagatcaagatactctagtcaagccatgggggaagacaccaacgtttcagtagatgaggatgaggggttacttttggaggtgtccaggatgcttacacaagagaaaaataaagttgaggtttctctgagggagtttagccgaattgccatacctgagagttttgcacatgggatccttggtttgaactggttgtaccagcaacttcttcttgggttctacatttgggatcttcggttgcttcatattctgcagtacactaaagttaatactgcatcttcagacaattccattcatgaaagcacagcaaagaatgaaccgaagagttcagcaaagaaattaaacactataccatttatgaatgatgaacaacctgcagcatccaatgtattgcatcatgttgtcattccaagtgacgatgaaggaaaatggttctggaatcaatttaatcaattggaaatggaatacaagaaagaacttgaaggtggttctttgtataaattttacctcatcaacaaatacaccccatgctcttcaccattggcacaattaaaacatcaaatggacttggggcattttatagctggccatggtggtaatatcttttcaatttctgaggaagaggcttctagcattattgcttatgctctaattatatctgaacaacaagggttctattatgaagctgcatctagtaacttggataaaaatgcttctatgctgccatccatgtcgtctccaaatgagtctttcgaaaacaaccataaattttcaaggtttgcaccaactgaggaattaacatcagggttttatgattcatttctgtcagctttaaaagatctgcaccacgaaatcgatctgaacaatgaaaagatagctctgagaagcaaatatactgtcatttgtatatatgcaaaacaattccatgatcttcggaagatgtgctgcccatcagaacttgcatatatttcgtcaataagccgctgcaaaaactggaatgcacagggtggaaagagtaaggttttctttgcgaaatcaatggatgacagatttatcataaaacaaatcaagaagactgaatttgactcgttcttaaagtttggtcttgagtactttaagcattttggtgcatctcaggtttcaagcaaccctacttgtcttgcgaaaattctaggaatatatcaggttaaggaaactaggaatggcaaggagacaagggttaacttcatggttatggaaaatcttctgtttggacataatatactacgcagatatgatctgaagggtgctcttttctcacgatatattcctgattcagaaaattctgaaaaggtactgttggatcaaaattttattgaagacatgcgtaccatgccaatctacattcaaggaaaaactaaaaacctcatggaacgcgctatttggaacgacacatctttcctaagtaacatgaatgtcatggattactccttgcttgttggagttgacaaagagaagaaagagcttgtatttggaattatagattatttgagacaatatacctgggacaaacagctggaatcttgggtgaagacatctcttgttgttccaaagaatctatccccaactgtaattttacctagggagtacaaaatgagattcagggcctttatgtcacaatactttctatcagttccagatgcttgagtcttgaggcccaatcattttctggtattggtgaccgaacatatcttgagttaggacttcggagatcatgttgccgatggttatttccctatccagtgagcagtacggcatattggcatcatgttttgagcattgaaattttcccatagtttcattgttgtgtgtgtctatccttgtccattttccttctcagcagttgtgtacatagtagcagctaggacacctgggaagtgcaaattttaagcaaacgaacggtgatggacgcacaaatagcctagtcattgttttttattgagttaattagggtggagatctttccaaaaaaagggtggagatcaaggtctgtaggggtagaggagcatgtaatgtactccggtttgtgtttatcggaatatattcctgaagtttaaagttagattaaagattcagcttttttactttaatcaaattactagcaaaggtttatcatagcagcatttgtgtgacgaacattacttgtggcatggcagacatagacacaatatcattgtccaacatagatacaatatcgtcgaatgctacttcgtcaggcgaatgtatgtcaattataagggtatctgttcggg

SEQ ID NO: 22769 - DNA, 1484 bp, Zea Mays
atacagcccacagacacttccttcctccacgcttgggcacggcagcggcgccgcaaagccgaacgagagagagaagcagagaacccctcctcgacctcggcctctcctcttcctcctccgctcccaaaatcctagggttttgctcgccgcggcgcgatggagcccacctcatcggcgtcgatcgcgcggcagacgtgggagctggagaacaatatccccgcggcggcctccgacccggacgcgatggacgcgatctaccgctacgacgacgcgtctcaggcgcgggcgcagcaggagaagccttgggccaacgacccgcaccacttccgccgcaccaagatctccgcgctcgcgctgctcaagatggttgtccacgcccgcgccgggggcaccatcgaggtcatggggctcatgcagggcaagtgcgagggcgacgccatcatcgttatggacgcattcgcgctccccgttgagggcaccgagaccagggtcaatgcccaggccgatgcctacgagtacatggttgactactcaaccatcaacaagcaggctggaaggttggagaatgtggttggctggtatcactcgcaccctggctatggatgctggctgtcaggaatcgacgtgtcaactcagatgctcaatcaacaattcacagaaccattcttggcagttgtgatagaccccacaaggacagtttctgctggtaaagtggagattggagcctttagaacatacccaaaagattacaagccaccagatgagcctgtatctgagtatcagactattccactcaacaagatagaagattttggtgtccattgcaaatcgtcatccctggattctcacctccttgatctgctctggaacaaatattgggtcaacacgctatcttcatcatcgcttctgggcaacagagattatgttgctgggcagatctttgatttagctgataaactagagcaagctgaaggccagctggcacacagtcgatttggtggtatgattatgccatcgcaacgaaagaaagagcaagaagagtctccactggctaaggtaacacgagatagctccaaaatcacagctgagcaggttcacggcctcatgtcacaggtcataaaagacatccttttcaactctgttcacccgtcaagcaaggcaagcacaagtgctccaccagattcatccggtcctgagcctatggttgaagcctgagttccagcggaaggggacaatggatatttgtgttatgttatctgattcagaaggtgcaaaacaagttatcttttgagtacagaatcatcatgtaattatgagttgccatcttgggctgccactgagagggtgtgatttgggtccggttagcaatctcatgtattggatttcggatcagtattcgaagctttcataacgaggagccatcatcttattttagctgtttgtttggcttgccatttagttattggaagggtcgcttctttaag

SEQ ID NO: 22770 - DNA, 1106 bp, Zea Mays
cgccaccctcaccactatccattttcattcaatgcgtccgcgccgcgcgcctccattcctctcgattccctccctccttccttgttcgaggacctccgcgaccgtggccgagggattgaggacggaaagcgaaaatgatgctgacgcgggcgtcgatgggggtgatggatgcggcggcggtggacgaggtggtgcgtcgcctcgtcgagggcggccgcgggggccggcaggtgcagatgtccgaggccgagatccgccagctctgcgtcgaggccaaacaggtgctgctttcgcagcccaacctcctccgcatccacgcgcccgtcaagatctgcgataagcttgttgaatttttggagaagaatgatcttgaccttgtgtgcagagctcatcaggtggtagaagatggctacgagttctttgcagagagaagactagtgaccatcttttcagctccaaactactgtggcgaatttgataatgcaggtgctctattgagcatagatgaaagcttgatgtgttcttttcagatcttgaaaccaaatgaaacaggtgcaccacattcaaggaaacctcttccaagcaaggcaccaaaaggagagaacgtctaatttgtatccagtgacctaatcacaatcgatgtcagctcgaagggggcgatctcgttgtctcggatccaccagggcatggcattagcgttctacacttgctgaatttgtgtggactcaatcggcagcgcttacattcttctgtacagcagcagtgtttctaacttggcatatcgtccgttctgatagtgacattgccacagctgcaatattttagtcgggtggacaaggcattttgttgggtacagtagctgttgttttgttagcctttttttggtaatgtttgtttggttgattgaacgctgtgagttttgtttgccgcgtatcttcgtcaggctcgggtatttacatcctgcaactgtgtaaatgattttgtctaacgaatgtctgttgacataaagattgctgcttacagtaacaaccacactaggtggcacaactgggcctgtatgtgtccgtcctccatggtcacgtgaatcctactcctttaaatcggca

SEQ ID NO: 22771 - DNA, 2542 bp, Zea Mays
ttttactagcaatggaaaggagaggagcaaaagagggagccaaaacatagcaaggaaaaggaaaaagaaaatgatcctctctccccagcacttgcgacaggtactagcaggctagcggctgcctcccttgtccccaccggccgccaccaccaccaccacggcaccaccacaccgacccccttcccctcccctctccctgtcgtgcggtgcctcctccgcccaaatccccaaatccgcgcctccgatccgccgccgtccacgatctgccgcagccgttgacccgctaaaaatggcctccgggccgccctcgccatccggcaaaccctactcgcgcaaatctcacgccagctccaaggctcccagcgtcccttccttcgacgcccacaacggccagctcctacccaccgtcaccttttcgctgccctccacgaccaccgcccgccgggagctgcgccgccgcctctcttccgagctctcccaggtgcgcgccgccgtcaagcgcctgaactccctcccggctcccgccccctcctcggcgctctctgccaccgacccctccacgccgcatccgccgtacccgccggcgtccaagcacaagtctaagaagggcggcggagtcccgcagccgcacctctcggcggaggcgcggcgcaagctctacgcgcccgtgttcaagacctgcgccgctctgctctccaggctgatgaagcacaagcacagctgggtgttcaacaagcccgtagatgcgagcgcgcttggcctgcacgactaccatacaatcatcaccaaacccatggacctcggcacagtcaagtcaaagctaggtgccgggcagtacaagtcaccacgggaatttgcaggtgatgtgcgtctgacgttccagaacgccatgacgtacaaccccaagggccaggacgtgcacttcatggccgagcagctgcttaacatgttcgaggagaagtggccggagattgaggctgagatagctcagctatcaccacagcctcctacaccatcctcagcagcacccaaaaagccaaagccaaaggagatagataattctaggccgttagagaggtctgattcgacagttcatgctgccgggatagaagctaccccgaagacacacactggcagaccccaagttttaaagaagcccaaggcaagggagcccaataagagggatatgacattctgggagaagcagcggcttagcaataacctccaggatttgccaccagagaagctagacaatgttgttcagatcataaagaagaggaacttgtcactcagccagcacgacgatgagattgaggttgatatcgatagctttgatgttgaaacattatgggagctcgatagattcgtgacaaactataggaagagtataactaagaataagcggaaggctgagctttctgcggtaaggccggatgaagctgatcctgatcaggagccggagaaggtagaacatgtgaggcagggcaaggcggatcaggatcaaattcctgcagtacaagaaccgattccagaaccagaaacagttgatgttgatccacctaaggaaagtgcagcagatgataatgagagatgtgtgggtgaatcatcacctggtcatttggaagatcagaagggagagaatgctggtagatcaagtagttctggaagctctagcagtgactcgggttcatcctctagtgatacggacacagatagttcatcagcagatggttctgatgctgggcaatcacccagaacgtagcatctataagccagatgttgatgggggcactggaaaccataacaccttagttcaagaaaggattctagcatgaatttatggggtgagattgctgtaaattttggccatttatggtgatatgcctgttcacaatcttctgtggagggagtgtgcaaagtcctcaagtgacgtttctgcacgattggcagtgattcctttggtccaggaagccagaggtctcgatgctggaccaaggttagtccaaaggttatctggttttggggaccatcgatctgcagacattgtggcaagagtagcagaggaagagcttgcacatgtttctgtaggtttgtattggtttctcaaagtatgccaaatgatgggtcgtgaaccaggcgatactttcaaagacttgataaaggaatacagtgttgtactgaagggtccatttaactatccggctcgtgatgaagctggtataccccgagaatggtatgacgagaagttcaaacaagaagcagcacaaaaactttcagaggtccatgatagattagcttgtattgttgagatggagaaagagagtgcaagtttgaatgactaagtgccacttgatgtacatgggagattgggcttagcgagtgccaaatgttgtgttcagccctctgatctatgatctgaacaagcagttatattgactgtacagtgagtaccaaatgctcgtgggcgcccatgatgcctatcaccctatagcacctttttttgtctttacttgacccactttgtttttaaactaactctcag

SEQ ID NO: 22772 - DNA, 5837 bp, Zea Mays
gtttgctcgtcccctccagccgtccagcgcccacggtggtgcgtcctctccgagacaccgctcgccggacctcttccgagtttgggaaactctggcgccatgaatccaatagtatagcacacgtcgcatgggagaaggcacattccaagagcagatgatccacacacacggtttcagcccggtggcccaacggcgcagctatcaccatccagccctggaagaagcaaggattcaccctcaagctcgaaactgaacgcaactcccgaagacccggtgaagccatgtctgcggggagaggcgatccaaacacccctgccaacaggcctctgttcctgagtgctggggtgcccaacttaggctgtcacaatgttgcagctccagctgcagcaggcaacagcggctcgatcgcctcgcaagtcttattctccccatgctccacgtctgtcctgaatactattcaggaggttcctgctccacaatctgctctgttgagtccgataaaccgtgcaactgaacaaggtgatgtgccctgcatccagccatcctggaatatgcctgggggttgcacgcaggtgcctattaatatcatagtgttccatagggaactcactagaaggggttcgaggccgcagttgtcgccgtcggccactgccttacctgatgtttcagagggagcttccattcggcttgctgggagtaatttcttgtcacatggaagaacacctagcatcgttgcaggtgatatgacaacgaattcttcacagctagccactgcagataaatacaattcagagcatcggatgaattgtttacatgatgaagcatccaagactgaaaatggaaaaggaagtacccaacttccacaattagcaacagcaattttccgtgacagctacaatgatttggaatcagtggttcctgcagctacctgggaaacacgagtgcaacattctcaagaatcaaccacctgtcttgcagaaagtaccactgatgacaacattcatatgtaccaatctatgcaaaaaaggctcaagacacaaatcaacaagagtgaacacacaccattgtcagcaccaactgtacccaaggagaaaacactgactcaaattgagacgcagctagcaagtgccgagaaaaccgaaatgttcaggaatgaggaaaccccagcgctgaaaatgaaggctcggaagaaaaaacacagaccaaaggtaatcagagagaataagccagccaaagtgcagaaacctgattcaacaccagatggaaaatctccgaaccaaaaggtcaagagaagttatgtccggaagaaaagaaacctcagctctctggagaattgctctggtcctgttagcgatcaatcaatctctggagcaacaggagttgcagctagaagcagaacatcatcagttcgacgaagtctgcaatttgaatccaaagaacaaggattgcagggcggccattcgtcaatggccaacatacaccatcacaactatgagaaacctggccatgctcaaagttctttctactcagagtcagaagtgcagactgggcgtgtgatgcaagaaggtatggagaattcaccaggagaattagctttcgacatgagtcgcagactgaacaaatttttagatgagtacatacatttgccagatatgctaaaacctacacaagaagtttcggctgcaacttctgcatcatttagtacggaactggcaagggaagaagataatgtgggaagaacttgcaaacctgatggcaaaagtaagtgcagtttgtttgctgatgaaagggtggtaaaccccacaatagaagggaacaaaaaggacttggaattaaactattctgatgctgatggtcttgtttcctcagctaggtctttacctcaaatggatcccacaagaagtcagatgggtaaggtgtcggaagtggaaaaccccacacaccatagcaatggttcgctacctggcacacgggactctgttgtcttgagggctgcagctgagatgttcgcatttttccaagcgggtgcaataaaaaagaagcgatctgcccgactccgcagaaattcccccttttatactatggatcttaagaataatactctacaagcatcaacaagactgccacagccatgcatggatgcgctgcatagaagttcttgcattaagtttttgaccaaaaaacgttcagaaaaggcaagaccgcactgttccagtgtaattcaaccaaatgatgagctgaaggacaggctttcagctggaagcactttttatggcgcaactaatggatgcaaaatatcagaagagagttctccaaacttttcatctcagaccctggacaataaaagaatcaacgttgatactcattgtgaagtagcagaagggagatcaaccaacacatcaacaggaccctatatggattacgttcaaggagttgcatcaaagttgaagcatcttgatttgaatactgaacaggtgcagagaactgagatgcatttatctctgaccacaccagctgttatttcttttgagggaacaagtggtccttcaaatgctcttgtcccatatggtggtgtggtgatggttcccaatgagaggcccttgcagttagtcaaaaagcagcggcctcgtgctaaggttgacttggattttgagacgacgagggtttggaaccttttgatggggaaatcagccgagtcttatgggactgatgttgaaaaggagagatggtggcagcaagaaagagaagtgtttcaaagccgtgctaattcgtttatagcacgcatgcgacttgttcaaggggacaggcgcttttctccttggaaaggatctgtagtcgattctgtagtaggagtgttcctcactcagaatgtagctgatcatctttcaagctctgcctatatggcccttgccgcaagttttccttcacggccagtcaacaataattgtaaggatgatggtaccacagaagacaataaacaaaccaccaggatgagtgagctagtaggagagaaaagtgtgtttgaccttttctacaatggtgttagacctgatctagaagtgggatgtgaggaggtatcaatgacttgcaagaagacacacatggaaccaacagacaatactagggatagtgaatttattgaaggtgaaacctattcctttgattacaaatcaacagatgaaagcgtttgcaatcacaaagggataggtatagaacataaagaacaacaattaccagatttctcctcagcagaattaactgtgtctacagaactcgtgcagcagatacaaatccagaagatctcatcctctcaaattttaacttcagaaaccatacaatcaagattatctttgagttctgagatacctagaaattttgtttgtggtggttctgctgcagcttatcagcagctgggaagcaatttcgaccagggaagctcattaacagaaaatgatgccacagccagtgaaattgaatgtcacagactccaaatggctgcaataaatgattatggatttgattggagcagcgataagataacttacaccactctgaacactccaaaaataagcacagaacttccagtcaagttacaccatgacaaaagtagtagctttgaagcaccaaacctgaaggagcatgaatcagtctttgcaacacatgaaatgacggtagaagcaacaagaaaagaagacgaacacacatcaaaatctagttttacttcctacaatggagtaccagatacagctgcacaagcatcaaagccaaagaaaacaagaaccacaactgcaaagaacacagagaattttgactgggaaaaattacgaaggcaggcttgtagtgaagggcagatgaaacaaagaagttttgaaagaagagactctatagattgggaagcagtacggtgtgcagatgtacgaagaatatctcatgccattcgggagagggggatgaataatgttttagcagagcgaatccagaattttctgaatcgtttggttagagatcatgggagcattgaccttgagtggctaagatatattcccccagactcagcgaaggattacctactaagtatacggggactggggcttaaaagtgttgaatgtgttcgtcttctcacactgcatcatcttgctttccctgttgacaccaatgttggtcgtatatgtgtaagactgggatgggtgcccattcaacctcttcctgaatctctacagctacatctcttggagctatatcctatcttggaaactatacaaaagtatctttggcctcgcctttgtaaactcgatcagcagacactgtatgagctgcattatcagatgattacatttggaaaggtcttttgtaccaaaagacagccaaattgcaatgcatgcccaatgaggagtgagtgcaagcattttgcaagtgcatttgcaagtgcaaggcttgcacttcctgctccccaggaggaaagcttagtgaagttgagcaatccatttgctttccagaatagcagcatgcatgctatgaattcgactcacctacctcgccttgaggggagtatccattcaagggagtttcttcctaagaattcagagccaataatcgaggagcctgcaagtccaagagaggaaagacctccagaaaccatggaaaatgatattgaagatttttatgaagatggtgaaatcccaacaataaagcttaacatggaagcttttgcacaaaacttggagaattgcattaaagaaagcaataacgaactccagtctgatgatattgcaaaagcattggttgctattagcactgaagcagcttcgattcctgtaccgaaactaaagaatgtgcttaggcttcgaacagaacactatgtgtatgagcttccagatgcacatccacttttacaacagctaggacttgaccaacgggaacatgatgatcctaccccatacttattggccatatggacaccagatggaataaaggaaataactaagacaccaaaaccatgctgtgaccctcaaatgggaggcgatttatgcaataatgaaatgtgccacaattgtactgcagagaaagaaaaccaatctagatatgtcagaggcacaattctggttccttgtcgaacagctatgaggggtagtttcccacttaatggcacttactttcaagtcaatgaggtatttgctgaccacagatctagccacaacccaatccatgtggaaagggagatgctatggaacttgcaaaggcgcatggtctttttcgggacttcagtacccaccatattcaaaggtctaagaacagaagaaatacaacaatgcttctggaggggatttgtctgtgtgcgaggattcgacatggagactagagcaccaaggcctctgtgcccccatttgcacattatagcaaggccgaaggcccgcaagacagcagcaactgagcaagtactctaatcagcaaagatatcagttttatgaacatcatgtttattgtgatatgacatcaatagctctcgacctatgcatggaatcatattacttcctgcctggcgatggccattgtttaggaaatttaagccatggatggggtccgagactgttagttctgagacgagaggactaatgaagcatcaggaagcaccaataattttcacttttttgtttcagatctactgtatgtaaattagcatctagctgttagtccatgtaagatgccattgctatcctttctgagacaaactaccttatcaacatttcatttggttaacatttgttctgagtattgggaagcctgccagaattttgttttcgtacctgtatattcctgttatctgtacaacggtttag

SEQ ID NO: 22773 - DNA, 2706 bp, Zea Mays
acatacacacgcgcacagccgcactcggttccagctacagagaattcgtccaggaaagtaaaaaaactcccccattcgcgagggacaggagggaggagtcaccgcgtgagctcaggaggaagagggagaaggagaggccgccggcggcggcgcggcagaccgggaaccgccgtgtagcactggggtggtggacccgcgcgcccatgcgtcggtgaggtggtggggcccgcttggcgctcgagttggaatggcggcggcagggaggtggtgggcggtggtccttgcggtcgcggtgctgctctggccgggccgggtcgtcgccaacaccgagggcgatgctctatacagcctgcggcagagcttgatagatacgaacaatgtcttgcagagttgggattccactcttgttaatccatgtacatggtttcacgttacgtgtaacagcgataacagtgttatcagagttgaccttggaaatgcacaattatctggcgtcctagtgccacagcttggtcagctgaaaaatctccaatatttggagctttacagcaacaaaataagtggggcaataccccctgaactggggaacctgactaaccttgtcagtttggatctgtatatgaacaacttctctggcaatatccctgaccgcctagggaatctattgaagctgcgtttcctcttggttggtcccattcctgtagccttgaccaatatctccactctccaagtactggatctctcgagtaacaacctctcaggaccagtctcatccaatggctccttttcactcttcacccctataagttttaacaataatccaaatctttgtggccctgttactacgaagccctgccctggggatcctcccttttccccaccgcctccattcaatcctccgtctcctccaacccaatcaactggtgcttctggccctggagcaatcgctggaggtgttgctgctggtgctgcattggtttttgctgttccagcaattgcatttgcaatgtggcgccgtcgtaaacctgaagagcatttcttcgatgttcctgccgaggaggatccagaagttcatcttggtcagctcaaaaagttttcgttgcgggagcttcaagttgctactgatacttttagtaacaagcacattttaggaagaggtggttttggaaaagtgtacaagggaaggcttgctgatggctcattggtagcagtgaaaagactaaaagaggagcgcacacctggtggtgagcttcagtttcaaacagaggttgagatgattagcatggcagtgcacaggaaccttctccgacttcgtggtttctgcatgacacctactgaacggttgctggtctacccatacatggctaatggcagtgtggcatcacgtttacgagagcgccaggcatctgaaccacctcttaaatgggaaacaagaagacggattgcactgggatctgcaagaggtctttcttacttgcatgatcactgcgatcctaagatcatccatcgggatgtcaaagctgcaaatattcttttggatgaggagtttgaggcagtcgtaggtgatttcgggcttgccaagcttatggactacaaggatacccatgtcacaactgctgttcgtggaacaattggacacattgctcccgagtacctatccactggcaagtcctctgaaaagaccgatgtttttggatatgggatcatgcttctggagcttattactggacagagggcatttgatctagctcgtcttgcaaatgatgatgatgttatgcttcttgactgggtgaaaggactgctgaaggagaagaaggtggagatgttggtggacccagacctacagaatgcctacgaggagatcgaggtggagaaccttatccaggtggcactcctctgcacgcagggctccccgttggagcgtccaaagatgtcggaggtggtgaggatgctggaaggtgacggcctggcagagcgttgggacgaatggcagaaagtagaggtggtgaggcaggaggctgagtcggcaccgctccgcaatgactggatcgtcgattccacgtacaaccttcgtgctgtggagctgtccggtccaaggtagtagccactccatgactccgatgaaagaattcaacactgaattgcctagattcagtctaattgctgcttgtgtatatgaaaggtagcttttggaattgttagcggcagtcaatatgaagggatggtttttttttttataattcctcgctagcctcagaagtcggggggtaggctgcagttgtgttaaggtgaaaattcgtatacccgagggtgaatttttaaagcattgttgtagtggttcggggaatgtagcagcgatcgtccaattgtactacgtgctatgaagaacagtgctaccttttggccatagttttgcgttttgaaaaatctatttaggttttctttgtgtaaaaatacaattgtcattgaattgacgatacacaactaattatgagactaaagaatttgtggaagttttactttagcttagggttccatctatcctggcggtgccatcggagtccaccaaaaagccatggagggaacaaatcgtttctggattaatttctgaatataaatcatcactagaagcacagtagctagcatgcaaacatctatcataaaaaaattagtatgcctagtacgattgtctcattaaataaaaat

SEQ ID NO: 22774 - DNA, 2836 bp, Zea Mays
gagctgtccctgcctgtgttcttgcctcttgcctcttgcgccttgctagcttgcttgcctccctgctccctcctcctccctcttcctcgtcgcttctctgattcttcctggcctttgccggagcaaggctaggcgcgaggagagggtgctgtgctcagccagaggtcatcggcgctacgcgagcgcactgcctgtcatgaacacgaggagatttcggcgagctgctgaaaacgcggaactgttctggttttttttcctgtgtgaaattcgagtgccgaaggacgatcctgtagttccaagactctaagctcgacagagatgttcggtgaaggctgttggcctggtctctgttctccgcacttctttctccactcgtgattctgcgctgtgattttccgacgacgaggagtgaagggagatttgtgatggtctaaaaacgaaaagtagaggaaagggggaaaaggggacggatgctgtctggtagagttgttacttgctgccactgccagaggatccaagagtattagcggacctgttttgctttggcgaattcacttataacatgctcccggcatgcgagaagtgacagctgatttcgagtttcgagtagagtaaatttgttgactaatactattgtttagtcaaagacgcatatctttttcttgttttgttaataatgattacatttacattacttcctttgtctacggactaatcgtcacaatactaagtttttgttttttcatgtcgaattgattagcgctttccctttacagatttattagtggttaaagtatgttctttcgactgcattaggttgtagatagttccttgtttcaccttttctccactaatgtctttagtgatatcaaatgtttcaacagttggccttttcctactggaactgcagtactttgaacatgctttttgcaaatacttgcactaaggatgaataaaatgttaagcaacgactgtttagggacacaggagcctcatacattttgcaagaccactgaaacactggaacattcacaccctcaagaggttacacttgataaaacggtggcggggtcaacgctaataagtcatcaaaatgtgtgctgcactgccggagtatcaggggaaaacgctgaaatcatggaaatcaccttattgcatgatgaatctgatgcaggaagcaccagtttgctaccgccattgttgtcatatggtccaagatcaatggttccaatacaagtaccatcgtcatcagaccttgagagtatcctgtcaccagatccagtctgcagtgatcttcagttgaaagagataaactacaatgctgcagcaatggatgaaagcactgagctccttcacttgattcttggtggcaatgatgaaggatacaataccacaactgaattacaagtttgggatgttctggacttctatgtctcagaaaacttctcggctctccaatttgatagtttgatgggttttacaaatgaagttagtacttcctacaatgattgtatgaatttagttgacatggtagagtggcccgtggctcgtctgtctctagatgatacaccaaaactcagtaacagtgatgatgcggttctggcagacaatgtcacaacggaccctgatgaaacatccttataccttcgtacaaaaccaacagattcagaaactgaaagtagctctgacgcaggagatgttgaaactgaatatctagatcaaaagctactttctagatgtctgcctgatttaatggatgttgactcgcccaaccacttactgaaaacaccagtgagaacaaaacatgtgactcttgtgcttgatttggacgagactcttgtacattcaacattggatcagtgcgacagtgctgattttaccctagaagttttcttcaatatgaaaaatcacacagtgtatgtgaagaaaaggccttacctgaaagtgtttcttgagaaggttgctcagatgtttgagcttgtcattttcacagctagtcagagaatctatgctgagcaacttatagataaacttgatcctgatggaaaatatatctcacggcgtatttatcgtgaatcttgtatattctctgacggttgctatacaaaggatctgacaatcttggggatcgacttggcgaaagttgcaatagttgacaatactccacaggttttccagttgcaagtggataacggcataccaattaagagctggtttgatgaccccgcagaccaggaattaatcgagttactcccgttcctggagagcctcgtggactcagatgacgtgaggccaataatttcgaaggccttccatgacaaacctgagtagaaatagtcctggagagctggagaggttcactggaattaatccagtgaacctctcgctgaagttagcttcgctccacacggtgcaggccattcttgggaagttaggtataggatcaagattcaccatttatgttatgttagctgttacaaatagcaagcataaactgcggtcgtcgatgaaaatggcttgtgtgtgtatgtcccttcggtgttccgtgtcacagatcattgtacagagacgaacaatagtgctgaataaagtgatctgagtgcaattttgctcatgaggacggctcgagcaggaagccgtgcttctgttcataataacgtgaattatgttaggacgtatgcactaaccagtttaatttaatagaaaaagttagccaatccatttatacactccaacattagtcaatccatttgtacacttcaacattagtcaattcatttatacactccaacattagtcaatccatttatagaaagacgtaaacatggaaataaaa

SEQ ID NO: 22775 - DNA, 1011 bp, Zea Mays
atggtgcgcaaggcaaaggttgagttcgatgagcagccaccggataacttcgacccgaagaacccatatgcggacccggtggctatgctggagtaccgggaacacctggtgcgggagaagtggatccagatcgagaccgccaagatcatccgggagcgcctccgctggtgctaccgcatcgaggggatcaaccaccaccagaagtgccgccacctcgtggaccagtacctagaggctacacgcggcgtgggttggggcaaagatgcccgaccgcccgagttacacgagcccaagaagatcatcgaggcggagtagctgctgcctcggcttctcgtgctgctgttcctggattggagggggaggtatcagctaccatgtcttggacccgagaccgagactcatccagttcaaggagctcccgcgctcaccagtgtaggatcccctggcctggcagcccctggctttccctctctgaatgatgccacgtagcagatcaggaaaggagcaagaagacggaccagaggaggcggagggatggagagggatcggggccttcgacggcacatatgggaacgagtacgagatgggaacgggactgtcgagtggtggcggatcgggagcagatgttggcggcggagaagaagcctgaaatattcgtggaggttgagaagagcgcaaacggtatagggccacgcttctctgtgtctcaaatatcctacccttcaagttgggccccaaaacgtttagacaaattttattgaaatggggctcctgttggagctctccttttttgtttaggccctatattttaatttgtttctatgtttaaggctcctattggagttgctttacaaagccatttgtgatgctggtaattcattgcaatcactttggggccagtagtcacttgggaggggttaaccggaagtagagaatagaatataatagattgaatgctaaactggcaacgatttccatttaagtatttggaaggattttctcttgttgggc

SEQ ID NO: 22776 - DNA, 1373 bp, Zea Mays
accaaactagaaaaacaattgcgtggagaaaaggaagggccatgaaaagcacggctcaggaaaaacaacggcggacagcccgcctccaccgccgtggcgccgttcaccccgccccgcgttctctctccctcggcgacggctcgacgaccgccgcgccgccctacgctccagcctccatgtgcttcgcggggcccttcgccgtcgactaacacaccaccaccaccattcggccggcacctggcccaagggttgagcatggagatcacgaacgagatgcttaagagactgccgagactacaatggcagaatttgttctatggactttcacagcaaggctaccaactatctcgtgacagctagcgatgatgaatcaatccgtttatacgatacccaagatgcagtgtgtttgaatactattaatagcaaaaaatatggggttggacttgtgtgcttcactgataacccatctattgtcttatattcatcgaacaatggctgggatgaatctctgcgtctgctctcaatgaatgataaccggtttattagatattataaaggtcaccttgatagggttgtctgcatcgcactttgctctggaaaagaaaactttctctcatgttcgcttgatcgtaccattctcttatgggaccatcgggctgaaaaaccgcagggcttactgcgcgcgcaaaggaggcctacagtttcgtacgacgcccagggcatggtatttgctgtcgcctatggtggccgcataaagatgtttgatattcggaaattcggaatggggccttttgcgaccttctctgtcggcactgatgattcggaagcccatgtcgtacagttcagcggtgatggcaggcggattctgttaaccactaaagctgggcgtgttcatgtgctagattcttttgaaggcaacagcattgcatcgtttcgcgcgaagccaatattaaccaattcgacactggaggcatcgttctgtcccgagggaaaccatatcgtatctggctccggtgatggtagtgtctatgcttggaacgttgagagcggaaaggttgcatgctgggaaagcacagatgtgaaaccgccgcgggtaaggtggtctccaggatccttgatgttcgtgacaggaacgtcggagctgtcctgctgggtgccggatttgtccaagctggagtccttcaccatcagccacaccaacaccaggtccagctcgtccctgtaggcttggaccgatttgcatgccgtgtggccggttgacgcgaaggaggaacaagaaagcatagcggagcatcttgtaccaattgagtttgtgatctgttcctgatggcccggtaagctactattgcaacgattgtggtctgcggcaacgg

SEQ ID NO: 22777 - DNA, 1201 bp, Zea Mays
gaaattattatactaggagcccctaggtttgggaatccctatgataataaattggatttattcctcttttatctattgcaccgctagcgtgcaccggtgattgggtgagcaagcctttccaatctctcgctcttgtgaccctacgccaagagtgggtgaataggttttttttggaaagcacatttctattaggccctcaacactgggtccactcaagagtccgcttcccttcattcctggcctcctcagtcatctagtttcaccagtgttttggttggagggaataaagatgccatgttgtcagttgatgctcgatgcaattatgtctatgaatcatactgccaccagcacaccatcatggttgcgtcgtttgcatgcgaaaaaaggaatatctgtgccatccaacctacaaattgatgacttcatcaatggagatggatcccaaccttcactatgcttgcctgtaccaacttcttcctaccaccaccataaaaatcttcttgacatttccaaaaaccaacatcaaaaggctactgagaccgaacaatgtaaaccacctaacagtcagacacaacaaagcccaaggtttgaaaaacctcacatgccacaaccacagcccaaagccatgatttctaatgttttggggaccccttccattgatcccatggataccttgcccctcaaggcttttcgcaagaaaaagaaatccaccagcagcacattgtgcaacaaatccatcaataaagagatgcagaccaccttcatgatgtcaaacgttctagatgtcccctcatgtaattcgatagaaaccacaccttataatcccatatgcaagcagccaaaacccaataccaatgtcaccaatgctttagcaatcccctcctccactccaatgaataccatacagcctcgcaaaggtatgaaaatgaacacaaaaggaaaaaatcggtatgaaggcaagtggaatggtaatatttattacaccatcgtcgacaccagtattgataaatgcaagggcaccaaaaaatcaatttgtagcaatgacttcatggtctctagcaaaaatcctaagcagacctttgaacaacatgattccatcataaagggaaagcgaaggtttaatctcctctccaatctacaagaaaagtatgagaaggataaagaggtcaccttacaggaaaaagtagaattgagttgctag

SEQ ID NO: 22778 - DNA, 961 bp, Zea Mays
catggttttgctttaataagggacgtgcaaaccgaaagagagcaaatacttactcaaagtctaagggatcggctgcaaccatatgttgatgggaagcaagatgagtttggtgattgggcaagtgcagaagctcagcgtttgtctcaagctgcttttggtgaggctatgcttcacacgattggctacatctatgttcggcaagcagcacgagaacttggaaaaagcaaactgtatatgggtgtaccttttattgctgagtgggtaagggacaagggccaccacgtaaaatcacaggttaatgctgccgcaggtgcaatttctctgatacagctacaagaagggataaaaaagattgaagagggtgacaaggaagagcagcttattaagagtatcgaagagaaaaaagatgcaatgctgaattctttatggaaaattaatgtggtcgatattgagtcaacgctttcacgggtctgccaagcagttttaagagaaaatgatattcccagagacgtactcaagttgcgagcaagaggactgaaaaagctagggacgatatttcaaggcgcaaaatcaaactaccgtcgtgaaaacagcctgcgtgttgaagatgacgcggcagaagccacaccgtcgcactgaggatggtggacaaatctggatatgatgtcatatactgcgtcaccggctcaccgagactgagcccgaaagccgaccactgtggaaggagacaaacgatgctgtttttccaaagatttttgtacggtataagcgcaaggtattgctaccatgccatactttatcgctgtccgcactgcatatagttctgttggacgaaaaatgtaatatttgaagtcaaaatgtgatgcgtaatgatttaagcgcatgatcataggctttgaatgtcatttgcgatcggactcagatccttggtggatctttaaaaaaaacgagaataagttct

SEQ ID NO: 22779 - DNA, 3120 bp, Zea Mays
ctctcacagtcacagcatccttccttgcttctcgtctcgtcgcctctcggagatcagaaagagaacaccggacacctagcctgcgcccttgccttccctccgcgcgcgcgtgctatctatggcgatggaagacgtcgcgggtgcctcctcctcctcggtggcggccgccgcctccgaccccacgcacggctggcagacggtgtcgtaccccaagcgccaccgcaagcaggcgcatcagccaccccgcgccatggctcccgatctggcgctgcaggccaacggcaaaggctccggtgtcttcgacgccgtcgagaagcgctcccaggagcgccaccgcgcgctgcagcagcagctcgcatccagggcggccgacctcgacgacgcgcggatcgccccggtcacaggcggcgcttactccgacgactccgactccgacgaggccaccgccccgcgccaggtgggggaggtgaagaagcctaagaagcctaaaaagcctaaggtgacggtcgccgaggctgccgccctgatcgacgccgagaacctcgcagcgcacctcgtcgagatctcggtaacaccgcatcaaaacctctcctctccgtcgagttcctgcttgaaaatcagatcttgggtcgacggtccggatcgaaggttttgtccgtttcttagggatcggatctggatagggtttagcaatggatcttgctggacttcatgaaattccgacgaaatgctaggtcctacgggattttggatcaagttgaatcaaaattctatctgttttacctgaaagtcgaattttaggatgtaaagatgggatgtcggggagctttgggttttggtgctaggagtagatcctaccaaaggttggtacaccttctgctgtatgcatattctgattatttgttgtgtgcagtcatcatacgagaatcaacaggacattcaactcatgaggtttgctgattactttggccgggcatttgtagctgtaagcgcatcccaatttgcatgggcaaagatgttcaaggaatcaacagtgtctaagatggttgacatcccactgtgccatattcctgaggctgtcatcaagactgcgagtgattggatcagtcaaagatcttatgatgccctgggagactttgttttgtggtgtatagatagcatcatgtctgaattgtcaggcccatcagcaggacctaagggttcaaagaaggttgcccaacagtctccaagggcccaggttgcaatctttgttgttcttgccatgactttaagaagaaagcctgatgtacttgtaaatgttatgccaaagataatgggaaacaataaatatcttggacaggaaaagcttcccatcattgtctggtttattgctcaggcatctcaaggtgacctagtgactggcatgttttgctgggctcattttctatttcccacgttatgtgcgaagccaagtgggaatccccttgcaagagatttggttttgcagttgcttgaaagaattttatctgtcaccaaagctcgttctatcttattgaatggtgctgttagaaagggggaacgcctagttccccctgtttcatttgacttgttcatgagagccacatttccggtttctggtgctcgggtgaaggctacagaaaggtttgaagtagcttatcgaacaatcaaggagttggctcttgccggttctcctggctctaaaactgtgaaacaagcatcacagcaacttttacctttgtgtgcaaaagcaatgcaagaaaacaatgcagagctcaccagggaggctgttgatgtgttcatttggtgcttgacacaaaatgcagagtcctacaagcagtgggaaagaatttatcctgaaaatactgaagccagtgttgctgtcctgagcaaaattgtgattgattggaaggatgtgtctcctaagctcagttctgaagctctcaaggcaacagtgaagaacttgaaggctaagaatgaggcagcgctggagtcagcaacagatgctggaaagcaggcatctatcaagaagcagacaagcactgcaagacttgagcaggggtcagagcagctgctcggaggccggcctggccctgccctgggtgtgctcgccactgtcgcagagtgctcagtggaacccgcggcacaaactacaaagggacctgactcgaatggcagctcgtcacctctcccacctgtcctccccagcgtctgcttccctcctcggccccgagccatggcgccctgcgcgtccccgtccgccctcgcgctctccgccagcacgcgggtcagcagcttcccactgacgctgcgcccgcggccgcggccggaggcgcgtgtgccgcgcgcgcccggcggcgcccagctccgcccggcgaccgcgtgctcttggccgcgccccttgctgcccgagctcgcgccggcgttccctcgtgccggcgcccgcagcgccggcagaccgcagccgctgttccggccccgcgcaatgatgacgacgtctcagatcgccagctgcgccttcaccgtgggcacggtcgccgtcctccccttctacacgctcatggtcgtcgcccccaacgccgacatcaccaaacgcacggtggagagcagcgccccctacgtcgccctaggcctcctctacgcctacctgctctacctgtcttggacccccgacacccttcgcgccatgttcgcgagcaagtactggctccccgaggaatgggatgcactttgcagctgccgggcatcgtcaggatgttcgcgagcgagatgaccgtcgcctccgcatggatccacctcctagcagtcgatctcttcgcggcgaggcaggtctaccacgacggtctcaagaacaacatcgagaccaggcattcggtctcgctgtgcctgctcttctgcccggtcgggatcctggctcatgtggtaaccaaggtattggcaggggcagctggccgctcacattgatgattggaattgggtggttgtatctaggattcccgttttgtttagctggtggagtttatgagatctggatatgaataaagcttgttcaaggcactgattctttcaatgtggggtcaccttaaaggaaagaaattagttagacaaaaaaatagtttaaat

SEQ ID NO: 22780 - DNA, 1314 bp, Zea Mays
aacgcagatatgcattgcctgttatatatgcaggctagccatcatcaagtcaaggaacacttaacctgaagaaaaccactattgcagcagcagtatagtcaacggtgtagcagtagctgcattgcgttattggggtagtagtgtggcagtgttggactgctggtcatcagggttgcgatgggtcggtgctgctgaatgacacggccaccttcaccggcgagcagaccgctaatccgaacgtcggctccatcagaggcttcggcgtcgtcgacaacatcaaggcgcaggtggaggcggtgtgcccgggcgtcgtctcctgcgccgacatcctcgccgtcgccgcccgcgactccgtcgtcgcgctgggagggccttcgtggagggtgcttctcgggcggagggactcgacgacggcgagcctaactctagccaacagcgacctgccagcgccgtccctggacctcgccaacctcaccgctgcgttcgccaagaagcggctcagcaggaccgacctggtcgctctctcaggcgcgcacacgatcgggctggcacagtgcaagaacttccgggcgcacatatacaacgacaccaacgtgaacgcggcgttcgcgacgctgcgcagggccaactgccccgcggcggccggcaacggcgacggcaacctggcgccgctggacaccgccacgcccaccgcgttcgacaacgcctactacaccaacctgctggcgcagagagggctgctacactccgaccagcagctcttcaacggcggcgccacggacggcctggtccgcacgtacgcgtccacgccgaggaggttcagcggggacttcgcggcggccatgatcaggatgggcaacatcagcccgctcaccgggacgcagggccagatcaggcgcgcctgttccagggtcaactagctagctacgtactcgcggctatagctacctgtgcgtacgtcccaagtgatccgacgatccaacggttcccatcagtgattatcactgtaataaggccggttgtgccattgtcagttgcgcctctgttttgcttgtactggttcaagaactcctctttctcgagtcagcaaaggtgggtgtgatatgactcggaaggaaagtggcgactagcctacccatcaccacaccatatttatgccttgttcgtttacgtcggattgcacccggaatcgttccagttgatcaaagtttatataaattagtgaagcaatccggctaggaatcgttccgacccaccaatccgacacaaacgaacaagtccttaataatattctatggttgtttacaaactttt

SEQ ID NO: 22781 - DNA, 65 bp, Zea Mays
caccaccaccaccttcggaacatcaggcaggaaattgtttctactttgatatctgcggatccgag

SEQ ID NO: 22782 - DNA, 342 bp, Zea Mays
cagccacgacctcccctcctctagcccctcgtgcacgttgtcgccattgtcccggtcgcccatcgttccatgagagagagaaacatgcgggcgctgccgggtgatttccgtccgtgcatgcattctggtctgcgcgtgtggccgggggcgtgcgctagaaaccagtgtagctgcggaagccctcaattcgagatgagaacccctggggtctccggaatttctcgccggagctcgggaagccgcacaccgccgtggccaaggacgaccgctgcgattctcggtaaggtttctcccaacgaactcgcattaatcccttctacgttttaaagtcttttcgataag

SEQ ID NO: 22783 - DNA, 617 bp, Zea Mays
  misc_feature (616)..(617): n is a, c, g, or t
gcaggcagcaagccgaccgcgcctgcaacgaccgcgactcagctcggcgcccaggcggaccgacgccggccacccggccaggcccgcggagccgcagccacgcgcgcccagcaagtcgagcttatctgaatttgatgatcttgtgggccaccctggattcgacaagcaagggacacgcttcaagcggctcatcaaagaccagaataatcataaggacctcgaggagggaattaaccgtctagttctttgctctggaaagtttcaggtgtactacgaactggatgaagaaagaaggaagacggagcgcactgatgttgctatatgtagaggacactgaaaggcggacgtgcggattggcttatagagaaatgtattgaacttggagcttctagtgttacccctgtcctgacagaacaatgtcacacaatagcggaaaatcgggtggacaggctgtaatgccttgtgctggatgcagttaagcaatgtatggagtttgggtatcacctccgttcttggcctgttaaacaatgtacggagtttggggttaaatgattttgtaaagtgtttgcaaatttgttcaaaacatgataatgtgtaggttttgtgaatgattttnn

SEQ ID NO: 22784 - DNA, 2824 bp, Zea Mays
cggccgtccagccgagctttttcttcatgctgggagacttttctcataattcttgtgatatactctgcatgggtttccccatttgagtttggcttcattcggaaaccggcgggcgccctagctgcagtggacaatgtcgtgaatgcgttcttcgcagtggacatcatcctgaccttctttgtagcttacttggatagaatgacatacttgcttgaagatgatccaaaaaggatagcttggcggtatactaccagttggtttattcttgacgtggcctctaccatcccaagtgaatttgctcggaagatactgccaccaaacctcagatcatatggatttttcaacatgcttcgtctatggcgtctccgtagagtcagctctctctttgctagattggagaaagatagacatttcaattacttctgggttcgatgtgcaaagctcatatgtgtcacactttttgccgtccactgttcggcatgcttctactatcttctcgctgacaggtatcctgacccaacggatacgtggattggcaattcgatgccagattttcatcagcggggtttgtggattcgatatgtagtatcagtgtattggtcaatcactactcttacaactgtgggttatggtgatttgcacgcggagaacacaagggagatgatattcaacattttctacatgctattcaaccttggattgactgcctatttgattggtaacatgaccaatctggttgtccatggcaccagccgtactcgaaaatatagggatacaattcaagcagcaaccagctttgcactaaggaatcagttaccaagtcggctccaagatcagatgatctcacatcttagcttgaagttcagaacagattcagaaggtcttcaacaacaagagacccttgatgcgcttcccaaggctataagatcaggcatttctcagtatctgtttttcaatcttgtccaaaaagtttacttgtttgaaggggtgtccaatgacctaatttttcaactggtttctgagatgaaagctgaatattttccacctagggaagatgtgatactgcagaatgaagcacccacagacttctatattttagttactggtagcgcggagttgatagagttgcgaaatggcggggaacagatggctggagtggctaaggcaggagatgttgtcggagaaattggggttctttgctataggccccaactattcacagttcgaacaaaatcattatgccagcttctgcgtatgaatcgcactgcctttctcagccttgttcaatccaatgttgcagatggaacaataataatgaacaaccttatgcagttactaaaacagcagaaagacaacagtgtaatggtgggtgttcttaaggagattgagaacatgctagcgcggggtcgtctggacttgccaattaccctctgttttgcggtaaataaaggagacgatttaatgttacatcaacttctgaagcgtggtttggatccaaatgaatcagataacaatgggcatacagcactgcatatagctgcttccaaaggagacgaacaatgtgtcaagcttcttctagactacggagctgatccaaatgctagagactctgaaggaaaagtgcctctatgggaggctttatgtgaaaagcacaatgcagtgatagagctgttagtagagagtggtgcagagctatcatctggagacacggccttgtatgcttgcatcgctgttgaggaaaatgatgctgagctgcttgagaacgttatccgttatggtggcaacataaacaacccaacgaaagacggaaccacaccgctgcatcgtgcggtctgtgatggaaatgttcagatggttgagttgttgctggaacacggagctgacgtcgacaagcaggacagtaatggctggtcgccaagagatctagctgatcagcaaggccatgatgacattcaggctctcttcaaatcacgaaaagcacacaggaagcatgcctcaaatggcagagtggcacctatgctgatagggagattcaacagtgagccctcgatgccagatatgagccatgaaaacgccagagtacgcagcgaagttgttccgcagaagctcctccgaaagagggtgagtttccagaattctcttttcggcgtcatctcttcgtcccacgcccaccaggacaccggccgtctgctctcgaaaggcctcgctggaacagagggtccaaattgccgtcacgactccctcatcagggtgacaatcagctgccccgagaagggggggaacgccgcagggaagctcgtgcgcctaccgcggtcgatggccgagcttctcgaactaggtgcaaagaagttcggcatcaagcctggcaaggtcctgacagttgggggtgctgagattgatgaggtggagcttatcagagacggtgatcatattcttctcgtcagtgatgaatgggtgccagatgttgagcaaattaggccttaacaataagtgagccagctgtggtgctcttattgcaatttgacatgatatggggaaacatgcccctgtgaccctgtgtgcatcagtgcatgtcccccatttaaactgaagtgtagcttatgatggttttgaagctgtaggatgtatccagcttggaaatgaatttgtagtcagctggtctgtatgtagtttcgtcatctctttccatgggaagggattcacaaaatgtaattacatgatttcttttttttcctgtctttagatcaagctttctctggaagtgagaaatattcgtgagtcatgaattttgagatattgatcctatcagttcattttagttgct

SEQ ID NO: 22785 - DNA, 1180 bp, Zea Mays
tcgtcccgatgccatatggatttctctatcgacacagttcgcaataatcaactcgtttctctccgattgctcctccgagtccgagactccgttctctcccgcatccaccgccgtctcatccccaatccgagcaacgcctcccctcgcctccaaaaccctacccctcctgtcaccggcgggggcatgaaccggtgatcgcttacctggtctcgtctgtctgcgcacgcgcgagatgacggtggcatatttgaaggagaagccagcaggccagggttccacgccttcaacaccaagtgctggtagtgggatgcggtctgcagctgcgagactgcttggcactgggaatggtagccggacacttagcttcgggagcaatggtaccagcagggctgtctcaggaagcagccgcatgggtggaggtattggtgtgtcaactagtgcaagtggatcgcaaggcatggcgaactacgatggaaagggctcatacatcatattcaatactgcggatacgctcttcatcagtgatctcaactcacatgacaaagatccaataaagtccatccacttcagcagctcaaacccgctttgccatgcatttgacccagaggccaaggatggacatgatctgctcattggggtgttctcaggagatgtctattcaatgtcactgaggcatcagttgcaagatcctggaaagaagcctgtttcataccagcattttgttaataaagacaaagacaaagataaagatccaagtcaaggtggcgctgccagcagtcagtgcacctgtgttgcatgggttccggagcgtgaaggaatttttgttgttagtcatgctgatgggaatctgtatgtgtatgacaaattcaaggatggaaatactgattggacatttccaactgttaaggatcaaagccaggtgctaatttcacatgcaaagtcgagtaagggcaatccaattgcaaggtggcacatctgtcaaggtgcaatcaatggcatttccttttcaccggatggtgcttacttggcaactgttgggcgagatggttatttaagagtatttgacttcacgaaagaacaactaatatttggtgggaaaagttactatggtgcactgttgtgttgctcttggaggttgtatacatttttaacttgtgtagtcctgatgactgatgagtaa

SEQ ID NO: 22786 - DNA, 160 bp, Zea Mays
ccagtctgcagatctgcatgtagtcagaatctaaaaaactactccccattctcctcgcctagaaccccgcatgcctcttggagatcgagccacgccgagcacctcgccagaactgacgcagcgcctcgccattgtgcccaagaatcatcgccgatcctca

SEQ ID NO: 22787 - DNA, 2362 bp, Zea Mays
atcctcgcacacggcaggcacgtgaccgacacccccagcgcacgaactccaaaatagcgagccgaagggggccacgaccacgagtcctccacctccctctccgccgcgtcgcacgcgcttgacgcgcgccgagagccgaatcggagccacgaggcagccgccccgggcggatcgatcctagggccagggcatgggcggaggggacgccgacgccggcggcgagcccgcggacgcgcaggccacgctccacatccggtgcaccaacggctccaagttcaccgtgcggaccgacctgggcgccaccgtcggggcgtttaaggcgatcgtcgcccacagctgcgacgtgccggcgccgcagcagcggctgatctacaagggccggatcttgaaggacgagcaaaccctagccagctacgaccatacaatccacatggtacgtggtgctgtgctatcaccaacatctactgcacctgcagccaaccaagaacctaccactgctgctcctgccagttccccggcaacaggattgggtggcttgttgcaaagtctgggtactacaggcgctgctgctaacagtgaggggttgtttggatctgccccccctggattagaccaaatgcagcaacagctagctgaaaatccgaacttgatgagggaaatgatgaatatgccactcatgcagaatttgatgaacaatcctgaactcatacgcagtataataatgaacaatcctcaaatgcgcgagctcattgaccgcaatccggatcttgctcatgtcctcaatgatccaagcattatgcgccagacttttgaagcagttcggaatcctgaactcatgagggagatgatgcggaacacagacagagccatgagcaacatcgagtcttctccagaaggattcaacatgctccgtcgcatgtatgaaactgtccaagagccttttctgaatgcaacaacaatgggtagcgagggtgatcgaaattcgaatccattctctgctcttctaggaaatcaggggtctaaccaagcaagagactcagctgcaaatggaacaactagagcttcagaccccacatcagggtctccagctccaaatactaatccacttccgaatccttggggctcaaatgctggctctgcccaaggagcagcaaggtcctctcctgctagcaatgttaggagtactacagcaagtggcctaggagggttgggttcagcagatttgggaagtacgcatggtgccagtggtggtggctctgatgctaccttgttgactcaagttttgcaaaacccaactatgatgcagatgatgcagaacattatgtctaatcctcagtccatgaatcagctgcttaatatgaatccaaatgtacgtaacatgatggaatccaatactcaaatgagagaaatgattgagaatccagaatttcttcgccagttaacatctcctgaaacattgcagcaattaatttcgttccagcagtctttgatgtcacaacttggccaacaacaagctggacaggagcggacacaatcaggctctggtgcaggcaatgtcaacctcaacaccttgatgaacatgttcagcgggcttggtgctggtggtggcctaggtgttccaaatgctcctaatgcaccgccagaagaactgtacgccacacaattagctcagctccaagaaatgggtttctttgacacacaagagaacatccgagccttggccgctaccgctggaaatgttcatgctgcagtggagcgacttcttggaaatatgggctaatagaatatgatgatcataactgtactcagatattgtgatttttagttggcattgtgagatcatgtctggctcattggttttacacccgagggtgagaggcggcgtctagattttgtgttcaaggatgaataaagagtgtaccgggggaacctttcatatacatatggtctggtgtcatggttaaggccccgtttcaatctcatgagataaactttagcttcctgctaaactttagctatatgaattaaagtgctaaagtttagtttcaattatcaccattagctctcctgtttagattataaatggctaaaagtagctaaaaattagctgctaaagtttatctcgcgagattggaacagggccttaattgttgttgttggtacatttggttgctgtacatacatattgatcttttgctatcttatttgcagtgtacatggacaatgtcgtattctgtacaagagggagagggaatatgtagtgcagaccatgagaactaaaaaaactgtatttcgattgctcaagaaaatatatgagatgcatccataactcagagatgtattttgttgcaatagttgggat

SEQ ID NO: 22788 - DNA, 681 bp, Zea Mays
ttgacatgctaggtgtggacgacaatccccaaacaaacttgtgctgatatttttcaccggcaatgcttaatcgagtgggttatacgccagagatcaatcatggtgtgttgatggaaatggctgagcataagaaggatctcgagaggaagactaaacccatagctgacacattaaggagctaccaggatttacctccagataaagctttagctgcactagctatagaggacaaaaagaggcagtatgcagccgcagagaagtacctagaagatgtgttgcaatctgctctaaccacaagtggcctataatgtgcatagttttgtttgctgtgtcttatatgttgccatcgattgaaggtgaaatggaagcagatcgatggtatcctacaaatgtgaagacgaaatcctacgagtgcgagctctactatatgtataaattgtgatgcacatcttgtttaaatgttctgataacgctattctaccccttggtgctaacagatgttccttgtcttgccttaccctgtttcctgtaaactgtaaatataatagtgaagaaaatgtctacttgactgtaaaatatattttcatttgcagtcttgtttcctgtaaaaacggttcacattctcttaagggtaccgtagaaaattccttatataattaaaagaatgttgccgaatcactc

SEQ ID NO: 22789 - DNA, 1183 bp, Zea Mays
caccctataactccaccgcctcgcccatccggccgtcccaggcttccccagctcaggagtcaggtcctcacgccgcgcacgggccagagacgacgagagcgcgcccatccggacccggacagagctcgcctgcgcctgcgcctccaccgatcggcaagcgggaggggagatgaggggttcgtcgcggaggccggtcgccgtggtgatggcctgggtgcggcgccagccgcccaaggtcaaggccttcctcgccgtcgtcgcggggatggctgcgctcgtcttcatccgcttcatcgtccacgaccacgacaacctcttcgtcgccgccgaggccgcgcacgcgctcgggatcgccgtgctcatctacaagctcaccaaggagaagacctgcgccgatattgccttgtgctctgctagcgctacttgttcatccttcaacatcgcacaacatagtgaacagaatctgctgggccttctgtgtttatttggaagcagtttcagtgctgccccagttgcgcctgatgcaaaataccaagattgttgagccgttcacagctcattatgtgtttgcactgggtgttgcaaggtttcttagctgtgcacattgggtccttcaggttttggatacccgaggccgtttgttgactgctctgggctatggtttgtggccttcaatggtgcttctctccgaaattgttcagacattcatccttgcagatttctgctactactatgtgaagagtgtttttggtggccaactggtgctgcggcttccgtccggggtggtgtgaacactgcagcgcgatagaagaagcataccgtccatttcttctgtgttaaatcacacaaagcaacagtcatgctcctagtgcccaaactttttcactctctcaaagtggattagcagagccccgttaatcttttttacttgtaaactgtttacgtgaatactgtaccaacaccgtggaacgtaggccgtccatctgactttttcatccaggctagagttgaagcttgtcgcatttccagaatagagaccagattctcccatttcattgactggtagtctattgtagaaacagacggaacgctatgatagattgttactccatttcaaattaattataaatcattttaattttcttgaagagttaaaagcatcttaatttagattaaacttata

SEQ ID NO: 22790 - DNA, 1774 bp, Zea Mays
cagcagctgaaaccggaccagcaccgcaggccacgctggtaaagagagagacagaaaaaacatgacatatcccaggctgcgacccagaccgttccagacgggcgcttcatgatgcggctgaagctgcccaacggcgtgacgacgagcgagcagacgcggtacctggcgagcgtgatcgaggcgtacggcgccgacgggtgcgcggacgtgacgacccggcagaactggcagatccgcggggtgacgctcccggacgtcccggccatcctggacggcctccgcgccgtcggcctcaccagcctgcagagcggcatggacaacgtgcgcaaccccgtcggcaacccgctcgccggcgtcgacccccacgagatcgtcgacacgcgcccctacaccaacctgctctcctcctacatcacaagcaactcccaggggaaccccgccatcaccaacctgccgaggaaatggaacgtgtgcgtgatcggctcgcacgacctgtacgagcacccgcacatcaacgacctcgcctacatgccggccgtcaaggacggcaagttcggcttcaaccttctggtgggcgggttcatcagccccaagcggtgggccgaggccctgccgctcgacgcctgggtcgccggagacgacgtcgtccccgcgtgcaaggccatcctcgaggcgtacagggacctcgggttcaggggcaaccggcagaagacgcgcatgatgtggctcatcgacgaactcgggatggaggtgttccggtcggaggtggagaagcggatgcccaacggggtgctggagcgcgccgcggcggaggacctcgtcgacaagaagtgggagcggcgggactacctcggcgtgcacccgcagaagcaggaaggcctgtcgtacgtgggcctgcacgtgcccgtgggccggctgcaggccgcggacatgttcgagctggcgcgcctcgccgacgagtacggcacgggcgagctccggctcacggtggagcagaacgtcgtgctccccaacgtgagcaaccggaggctggacgcgctgctcgcggagccgctgctgcagcggcagcgcctctcgccgcagccgtcgctgctgctccggggcctggtggcgtgcacgggcaaccagttctgcgggcaggccatcatcgagaccaaggcgcgggcgctgcaggtggcgcgggaggtggagaagcgcgtggccgtgccgcggccggtgcgcatgcactggaccggatgccccaacagctgcgcccaggtgcaggtggcggacatcggcttcatgggctgcctcaccaaggaccgcgacggcaaggtcgtcgaggccgcggacatcttcgtgggcggccgcgtcggcagcgactcgcacctggcggacgtctacaggaagtccgtgccgtgcaaggacctggtgcccatcgtggccgaccttctggtggagcggttcggggccgtgcccagggagagggaagaggaggatgaggagtaggagcagtggagcacagacttcccggtgaccatccacggtttgttgtaaagtagacgcgctgccttcttccatggcacgatttgttttggtattgtcgtagcaacaaaatgtccccttattcacgtcacagagaataagtaacacgcttcactgtcaatcatccctgcttactaccaattggtgataggtaatgccactctggctattgtccaactccaatctccattcttctcacggtaaaaagtgtaatctacagcgcaacagtgctttgcacgatgatatgcat

SEQ ID NO: 22791 - DNA, 2408 bp, Zea Mays
actaggaccagacctgggtcctgggcagttctttggaagcgccaagcccccgcaaccggcacgaaccgccacttccccacacgccccctcgccctcgtgtcaccaccacaccacccgcgcgccacggcctcggcctcgctgccctgccctgccccgccctccacaccgcgacgcgctccccgcggcaatcgggcgtccccaggagcacgcacgtccttccgcggcccgcgcggccgcgcccaatgcccagggcgcgcggtttatgggcggccgcgcccggtccttcctccgctggctccgtcaccgctcccgccgcgtctcctcctcttcctcctgctccttccacctgacctccaccaccgctaacaataacgacagcaccgacacaagcgaagacctccgtgcccgctcgctcccgcaccagcaccgcgccggggaggagagggaggttgaagcagaggaggagcgggaggtcggagaagagatcgccgccgagggccccgagcccgcgtccgaggtgtgcattgtcttgggggatccggagccgggtgcaggaccgcgcgcaccgctgcgcaccgagccgccacgcatggatccgagcaaaaaggaatctgaattcttcaccgagtatggtgaggcaagccggtatcaggtcagtgaagtcattggcaaagggagctatggtgttgtggctgctgccgtcgacacccagactggtgagcgtgtggctatcaagaagatcgttgatgtctttgatcacgtctccgatgcaactcgcatccttagggagatcaagttgctccggttgctgcgtcacccagacttagttgagatcaaacacattatgcttcctccttcgaggagggaatttagggatatctatgtgatctttgagttgatggagtcggatctccatcaagtaataaaagcaaacgatgatctcacagcagagcatcaccagttcttcttgtaccagctgctccgtgggatgaagtacatccatgcagcaagcgtcttccatcgggatcttaagcccaagaatattctagccaatgctgactgcaagctgaagatttgtgattttggccttgcccgcgtttcattcaatgacactccatcagccatattctggacggattacgtggccactagatggtatcgagctccagaattatgtggctcctttttttcaaagggaagaatgttgtgcatcagttggatcttatgactgatctacttggtacaccttcagcagagtctatctccaagataaggaatgagaaagctcgacgatacatgaacaatatgaggaaaaagcctcgggttccctttactaaaaagtttccagggatagatcctatggctctccatttgcttgaacgtcttcttgcttttgatcctaaggaacgaccaagtgctgctgaggccctggcagatccatactttaatggattagcaaataatgaacgtgaacccatagcacaacctatctcaaaacttgaatttgagtttgagaagcggaaactggccaaagatgatgtccgagaattgatttaccgagagattttggagtaccatcctcaaatgctacaagaatacctacaaggagcagaccacaatcagatgaccttcatgtatccaagtggggtggatcgcttcaggcgccaatttgctcatttggaagaaggtactgcaaagggtgaaaaacacagtccacagctgcgacagaatgtttctttgccaagggaaagagtaattggcaataaacatggagatggcaatacaggtgataagctagcgcatgcctcagtgacggatggcatcagccaaccgagcttgagtgagagaagctttctgaagagtgaaagcatcagtgcttccaagtgtataggtgaaaaaccgaagcatgtcaaagatggagaatctgttttagagagcgtggatgaaacagtcgatgatttgtcgaagaaaattcctcaactgaaaacctgatttttctcaagttcactggagcaatgaatagctcgtagtatggcacgttaggttctcaagacgatggacctacggcaaaggtctatagccaatgagaccacaagttctaatgccagtaattctgttgtgatgtaaatttcctcccatttgtgtttgtacttcgcgactgcaaacaacctgtttctgactaaatggctcgtgttttcctccgtggagccatcaccatattctgtaaattttcagttggaagtgaatcttcagctgcagaggcatatttgattttcccccagcaagtaggcctaggcattcagttaattctgtaaagttggttatggaaattttcagttttgacaaaatgttaactgaatttgctaccaaatactccattctaaattacaagacattttgattttgat

SEQ ID NO: 22792 - DNA, 1132 bp, Zea Mays
ctggagcattttcctcctaaatactgacaaaagggtcccaactctcaactcgcgctcaatgcatccgctatcgtctctcctcctgttccgttccgccgcgccgcccagcgcgctccccttgcggcggcggcggcggagtcacacgccagtgcgagcatcatggcaggagctggcgggcgtgctggtgttttccgccatccccttcactgcagtcaaggccctcgccaacagtcccctgggtgcccgcctccgccgccgcctcgaggacaggaaggccgccgcagctgccgaggctgacgctctccgcgctgcctcgcgcggcgcccgtaacaacagcttcgaaatcttacattgtcggtgggccatgcttgctgccctcggtgttgttgttcctgagctattagatctatttgggttagtgcattttgtggagcctgtctggtggaaagttggttatgcaaaacttcagggtgataaccttgattaccttgggattcctggattccgaattgctggtggtcaaggcgtcgttgtaattgcaatctgccaagccctcttgatggttggaccagaatatgcaaggtattgtgggatcgaggcactagaaccattgggaatatatcttcctggtgacataaactacccaggaggacccctttttgatcccttgggcctgtccaaggatcccgtggcatttgaagatctcaaggtgaaagaaatcaagaacggtcgccttgcgatggtagcatggtttggattttacatccaggcggctgtcacaggcaagggccctgtacagaacctggttgaacacttgtccgacccactaaataacaatatattgtcctccttccactaaatgaaaatatgcaagagtggcacgaaccatagcaacgggtgtatattgtattagcgtttacagttttacactaatgggttctgaaaattggctattatatttatttagatagacatttaacggtgattagtgatctatttgcagtttggtagtgcgtcttcagaatgccttgcccttacatgctgcaatggattttcttgatccaatccaatgattaaacgacaatagtccttcagttcctaattttaagtgtaagaaactgaaatttttttg

SEQ ID NO: 22793 - DNA, 1846 bp, Zea Mays
ttcttcttcaattaatacggggtgatagacacggagctgttcggcctgctgagagagaaacacggcaagggcttccagcagttcgtagaggccaaggtcgtcgctttggccggagacatcgtatacgacggcctggggctggaggcagccgtgctggacgcgctggccaaggacgtcgacgtcatcgtcaacatcgcagcaaccaccaacttctacgaaaggtaatcttaattaagcaggacgtcgaaaagaatgttgtatgttttgaacgacttcgacgatgcatgcatggctatggctattacttgcagatacgatgtttcgctggacgtgaacgtgctgggagtgaagcacctgtgcatgttcgccaagcagtgcgcgaggctcaggatgctcatgcacgtctccactgccttcgtctcgggcttcagggagggcctcatcctggagaagcccatcaagcccggcgagtcgctgcgggagggcacgtacctggacgtggacgcggagctgcgcctcgtcaaggaggtgaagaagtcgctggcggcgaacggcgatggcgacggcgacagcacggagcggaaggccatgaaggagctgggcctccggcgggcgcggcacttcgggtggtccaacacgtacgtgttcaccaaggccatgggggaggccgtgctgggccagcagctccggggcggcgacgtccccgtggcggtgatgcggcccagcatcatcaccagcgtccggcgcgacccgctgcccgggtggatgcagggcacccgcaccatcgacagcatcatcatcggctacgccaagcagaacctgtcctgcttcctcgccgacctccgcctcgtcatggacgtcatccccggggacatggtggtcaacgccatgatggcggccgtggtggcgcactcggaggcgttcgcgccgccgctgccgcaggtggtggtgtaccacgccacctcgtcgctgcgcaacccggccacctacgacgtgctctaccagtccggacgccgccatttctacgagaacccgcgcgtcggcaaggacggcagggtcatccccaccagggagatgtacttcttcaccagcatcgccagattctgcaccttgtgaatctgctgctctgtggccttctctcgcggctctacaacgacctcaaccgcaagtacaagtttgtgatgcatctggttgacgtctacggcccattcgccttcttcaaaggatgcttcgatgacataaacctggagcggctaaggctggcaatggcgatgaagacccctgaggatcaaatgttcaatttcgaccctaagaccatcgactgggacgattacttcaccagaatccacatccctggtattctcaagtatgtgtgcaagtgaagccttctttcttcagtctatttgcagcatgcacatgcttcttcttcgccttcttactatcgaaagttaatggctcatattctttatgaaagaaatttataccactctgtttggttgtacctgttctatggatcgaccgggtgttaccaagaaacaaaaataattcgatctctgctagattgatatagttctgtatgggagagactgaggcccctcatatcgtaaatcaatagtgatcgtcaaacgagtgtatgctgtgttaggtggcagccaatatgtatcttgattaattgagaacttgtaatctgtgtcatatgtacgcgtgtcactgtcagtgacaatgaaaagcaaatgtaatatctatttataatggcagtgaaattcaggaaagagaactagttaatcagaaagtagggttttctgatatggatggagatgtatatatatatacacacactctattt

SEQ ID NO: 22794 - DNA, 196 bp, Zea Mays
aacagcgacggcttgagcggcatctggatgacgacggcggccggaaaaaatctcggcggcaggattttcttcttcccacgtgtggatgaagaagctgcgcgagagggataaggaggaggaggaaatcagcggtgggatttttcctgtcccccgcgttgagccacacaagaagcacggcttgcgatttggcttaaaa

SEQ ID NO: 22795 - DNA, 603 bp, Zea Mays
agaacatggaagttctagtcaactgaatcgattatgaagatgaaaaggggaagttcgatgagcttgtcgaggagaaaggagttaaagtactgatcgaccccaaggctttgatgcatgttataggcaccaagatggactatgttgatgatccattaaagtccgagtttgtgttcataaacccaaattccaaagggcagtgtggctgcggtgagtctttcatgactacaggcagcaaagggtcgacgtcatgaggcgtttttcagtgtaaatgcttagccaagtgtctgcaggctccagctacagattttcttgtgtctgttgcgtcgcagttcattcatatatataataacacagcagtgggtttgtactggatatgcaactaactcgcatttacttgtaagttcacctcaaatgttgttattacatggtctgactctgattatccatgttgtgtatatttgatcgctcgcgatttaagacctcgaaatttgcacgctgcagttggttatttgtaatcgtattcagccgctctgcctctgcataactgcaggagaagagattgtatatatctgactgttatttactgcttagcaaaaaaaaaaa

SEQ ID NO: 22796 - DNA, 3085 bp, Zea Mays
gtcgtctccgttacaacgcagacactgccgccgctccgcgacagtaactctgctctctctctctctcgcatggcgtactcctcgagccgcgggacgaaaccctaatggagaaccggcgccgccgccacgcccctgcgccgtagactcccctcgccgcagtgagccccgttgcaagatttagctccgcgtcgcacagcttcttgcaggatagcgccagcgcttgccgatccggtgggaaaaaaaagtgggagcacggagcggcctcgcctcggcgggggaggcgcccgccatggggagcgacctcaaggagatgaagtacaggcggaggatcggggtggaggagcggccgcaatgcagcgacccgaggggcggcgcggactgggccgcgctgcagcaggaccccgtcgagctgctgcgcaagctggacgagctgagggaccagatcacgcgctcctgcaacgtcgtcgtcggccagccgcgggagcaccgcagggtcagccgccgtgcggtctccatgctccccgagcatctcgagccaccgcctctgccagggtaccaccgctcccgctacggtgggcggtatgggcacggcttgccgccaccaagcccatacgcaccgccacgccctgaacatggggaaaggtatgcgaggcagtctagtgggcactaccgccagtaccctcccaggcactgcgagaacggtgggatggggcctgggacctaccatcaccatgggtgtgcctgtccgcactgtctgcatgggcagaggactttcccgcaggaggagaacatcccaatggcgagatacttcgccgggcagcacgaatcataccggttggagaggtcgccttctgtttcatccgattatgatcgtgggtctgtggcgtcatcactttactctcatcggtctgtatcgaagatgagggcagagtacttcaggaagaaggcagaacatatctgccgtccagtggatggtgccgcacctttctctgtatgcagttcatgttataaactactgctgatgcctatggaaaaatgcgtagggaggaagcagaatcggtttcaatgtgggtcttgttgtcagataattagtttgaagcatcaggaagaaaatggtatcccctttgcacttgcaccatcatcatccttacatgcgcctgaaatggagcaaagcacaagtgaccagatgaggcaagattctgtccatcagcgccatgaggatttcaattttatgttcaacaattcaaatgatcattgcgatatgcaaaacaacatggatttcaccgatgataattcacttccttcgaccgcgagtaatgacaggattgagattgacaaagagtgtgggtcaactagaagcattcagtcaaaagctgagggtctctctttctctccaagtaggtctgtagacattggtagcccaaaggatatattgtgcgagagggataaagacagcaatgtggagccttcctcagatggtccacttagtccacgatctccaactttagaggacaaacttgttgacccgttgtgtgcccaggaaaaaggtaacgatgaggacgatcaaggcacggcttacagatcgaacctaacatgcaaaggagaatatgatgctaacgacgagtatgatggggacgttagtacaagaagcaaaccggagagcaatgtaaatgacaaagataccactgaaggcgaaacctcatgcagaaattacaaggaagacaactgttgcaacattgaagatagtagcaaaacatacgagcagaatagtggagaagatgacaccagtagtctagtagatggaaatgagaagtatgagtctatgaatactaaagacgatgatagcagccctggaggtgaggacacatgcaataggtatgagccaaaggttgaagacgatgaaaattgtgttcttggagctgagagcattagcaacaattgtgatgaaaataataaagatgccataaaaactggaagcataagtgagagacatgaagagctgataattgaagaagaaaatgagaaattgcagcaggcatttattgaagatgccaattcccaagcagggagtggttcatcaattaatgagcggacgaattctgggttttctcgcggttcatcagaggctgggttagatgaagatcagtcctcaaccgagcccttaagaaggcagagaagaaagctggtcctgttgacccaggttcatattggtacgactaccgtgctggtttttggggtgtcatgggacgagaatgtatcggcattgtccctccatttattagagaatttaattatccgatggccagaaattgtgccggtggggattctggtgtttttgtcaatggcagagaactgcatcaaagagatttagatctacttgtaggaagaggactaccacggacatctggaaaatcatactctcttgagatgtcaggaaatgtaattgatgaagacactggaaaaaaactacgcagtcttggaaaacttgctcctacgattgagaagttgaagcgtggttttggcatgcacgtccctgaagagtttagatagctggttctagtacaggatcttggttttgctaataatacactcttcaaagctgacaatggggtggcaaacgtgtggcttctgcgggacggtggtatcaaatctcagatttcttggactggagctctggaagcagcagtacttaagatccttggtgtgcggcgaaggttgtctggcactcaagaaaccaagataatctggtctaatgacttgactaccaatagtacccctcctgctaatttcaattgcttcaatggaagcgacgtgtgctgctagtgactctagattatcaggcagttcttaacttcactgctctgcctgtacgtgctattccttgaatgtgttatcattatcggtacattgccccatcacaggcatagaagtgttgtcagatgtaccatgagcaattgtcggcttgtaatatattggtagagatatgcttcccctaatatttatatgtatatatatgtgatcttgattcttgaatctcttgccaatacgattgattcctgaaccctgttaataagagtcttatttt

SEQ ID NO: 22797 - DNA, 4205 bp, Zea Mays
accacggcatccaccattccagctccaggccaggagaaaacgttccgggactgggactgcgttcaccttgctttttcttcccacgctcaccccgcaccgcgtgccctctctggctctctccctctcgtggggacgactgggcgaccgccgccgccgccgccttacgccaggtgcccaggtcttagtcggccccttcgccggcgacgaggacctaccagctgtgaataaggttgtctggaacggccgtgggctctgcggatggcaggttctgtggtaacggatgattcagctgctagcacaactggaatgagggatgatgaaaacagtctctctggcgagtccttctctgagtggaggtcctgtgatagggcagacagcgataccccttcaacatccccacccttctgggatagcgatggtgatgatgatgatcctggcccaaagccttcagaattgtttggacatcacacttggaggattgaaaacttctcaaaggagaagaaaagagaaatgaaaagtgagccatttgaagctggtggttacaaatggtatattcttgtataccctcaaggatgtgatgtctctaatcatctttcattattcctttgcgttgctaatcatgacaaacttctcccaggatggagtcattttgcacagttcactatagctgtagccaatatagatcctaaaaagatgaagtactcaggttttggaagaaggaacatgattggggatggaaaaagtttatggagctgtcaaagattcaggatggttttcttgttgacgatgttcttgaaatcatagctcaagttcaggtcatcagggagaaagtggatagaccttttcgttgccttgatcgtccttatcggagagaattaatccgcatctatatgacaaatgtggaacaaatctaccgacgtttcgttgaggagcgaagaagtaaattaagcaagctcattgaggacaaaatgaaatggtccagtttccgtgctttctggtcagcaattgacccaaacaccaggcatcacatgtccagggaaaagactgagactatattgaaaattttagtgaagcaattctttgtagagaaagaagttacttccacattagtgatggactctttgtatacaagtctgaaggcacttgaataccggatgaagagcaagaaatgcaaaacaaaattagcagatttggaagaactacctgcgcctatggtccatgttgacatggacatgtttgttttggctgatgatgttatagctttgcttgagagggcagccttagaacccttgccttgtcaacctgtagcccccaaggatgacaaaacttcccaaagccgcatgaaggatggaagttctggcgaggtttacaaagtttctatggagcgtgaggaaagacgcctaactgagcttgctcagaagatactagagacatttgtgctatctcatatatttagcggaattgaagttgcataccaagaagctgttgctttgaaaaggcaagaagagcttattcgtgaagaggaggaggaggctggacttcttgaacatcagatgaaggggaagcgtggtggtggtgcaaatgaaaaggacaagcgtgccaagaaaaagcagaccaagcaaaagaagaacaaccgtaaggctaaagacaaggaaagagatgtgaaatgtgaggttaaaattctggaaaggcttcatgatgaaactgttattgataacagtgatggcttaccagctaaggtggaagtgatagccaaggttgatgccttggaagaaggttcttcagatgggtcagacatgccaaatagtgttacaggtggttcaggccgcaatagttctggctgctgcacagctccaaaactggatcaggatactgttctgcttaccttgagagataaacttcgtaagctagggcagcgtctgcaagagaaaaacattgaggggcagaaacttctcaaagctcattttgaagctagggacacaaaagtgaaggtagaagaatcttctgactcatctaattctttggataggccacctgatgttccagagagctcgatgcattcttcagaagatacagttgatcttaaagttaatggaacaccaaataaggatgcctctgtggtcaaccctgtcctggaggaatctgtttcaggcataccagtcactgcaaagaatgaatccttgccttctgccagaacaaaagaaggcccagtttcaaacaaagataacgcatcaagtttgaaaatgaaaaccatggcatcttgcttgaaattgcatccagctgatgtggataaagatgccccttttccttctaaatcaccacgaatcaatagggctgctccagttccctcgaagttaccttcggctgataaagctactccagttcttccaaaatcatctctgtcagtaaacaaagcagctctggtccgtcccaaatctccagcagttgacaaagcaactccagtttgtcctgaatctccagcagttgacaaagtaactccagttcgtcccagatctccagcagttgacaaagcaactccagttcgttctcaatctccagcagttgacaaagctactcatgtttgccctcaatctccatcagttgacaaggcaactccatccattgacaaagcaactccagttcgcccaaaatctccagccatagataaagtaactccaattcctcccaaatctccaccagttgacaaagcctctccagcaccaccaaaatcactatcaggtgctaaagatgtgcctgttccttcaaggtcgctgcaaattgataggttcattccagcccccccaagattatcgcaagttgataaagctgctctgccttcttcagaacagccacatatatctccagctactaattctgaagcccaaggggcaactacttctaggaaggtcacagccagctcagttttggaggttgctgcagcatcgaggccttcaagtgctcctgtgttacccacaccaagatcaactgcaccagttgcttcacatattcaaacttccacgttgctttcccgctcgatgagtgaggcagctgggagaaggtcagtaaatgatccttccttttctgccccatcttatactccccagacctaccgaaatgcaataattggtaagactggtctggctactacctctgcaaaccttgcatatcagtcctattctctgggtcaagatactgctccttcacagcctctatcagcatatgcatcaagcacagcagtcatgatgcctcctgctggaagatctgatcaatcatcagctaggcatggattcaagtctgggtctggtaagctagaagcacatgacagctggcagcagtggaaaggtgataataatgttgatatgcatctctggagggatcacactacctatcaacaaatgaccaggggtcaagcgtatgaccaatctcggagggacgatacttatcagcaaacatgcagcagaggaacagaaaagttcagcaggcacgcaggactgcaagctaggcagttccaaaccgagacacccgccagccatgtctggcaccaacaacaggggcaagtggcagaagagtttccacaccttgacatcataaacgatttgcttgaggaggaccagatcaacggcagtataccagagtcatttcatcaagattacaatgtgtttggcctgccattttcaccaagaggaaacgtgtcagatatgggaatggcttctgttagaagtcctgctcggttcaattcaaccaagtatgagtatgacggtggattctcgggggcttatgacataaatgcggtcaatgggttgagggaacggcagtttccctcgttggatagttactctaatggcctgtctgacgtgagtgcatcaaagccttggctgaatggctctcccagtccatcggtgatgagccttggggttaacacaaatggataccacccccaggttgcggactaccccagtctgggaaatggggtgaacggagtctccttgtggcgccgccatgctaacgggcgctggtaatgcgaggtgcctgtatacaatcatacagatggaataatgtttgttgtaacaaatggtttcgggcctgagctgatgtgccatgtaattaaaagttttaagttttaaaagggaaagaaagcgatacatgctgcaaaatctgccccgtgatttggttaatttgattgcttttctggttaaactctgttc

SEQ ID NO: 22798 - DNA, 6404 bp, Zea Mays
tgagagccggagagggagaaagaggatagagagagaaggaaaaaacttatctgccgcctctctatcgcgcgcgccgccgccgcgctgccgcgccgggagcctgtctccggcgatcgccgccttccagccccgttactgaccctcctccgatccgaatcctaggcgaaaaatcgcggaaaataccgcaaaaaatcgcggaaaatcgcccggtcctttttgaataaatcgcacgggcgttgcaccccgctcccttgctcccctcccaccgccggcgacggcgatcgcgcagactaataggtgccccgcggcgagccagaaaacctgcctcgtgccggtccgagcattcgtctctgtcggggggactgagcgcccgtcgcccacccgcctcctgctcctctcgtcggccgcggcaggaggagtgacactgagactgtgagaggtattccatgtaatgccataatttgtgatggcatttttcagcaactccgggagcaaggccgattcagaagggtacaacttgaatgaaaaggccgatgatgatggcatacacgagtcaatccgggatgggaatgatggcctgaactctaggcagtggaacttaaatgagaaagcagaggatgcttaccacagcgaagcagagcaatatgagtctggccagtcaggtttgtacgcatcaaggcagcatgttcagagaggaggcagatcgtctggtggtccatggggcacaaattttctgaaggattccaggtccaaacagacggccaaggaagttgcatcaaatagcggtagaggaatggatgctgctaactcgcatgatgacatggatggtagcagagaggatgatgaactgaatagagcaaatggtgaggtgcctgctgaggaaatgctctcagatgactattacgagcaggacggagaggatcagattgaatcgttgcatcgtggcgggatgaagcagtcaagctgttccacttctggtggagcagcaaagtctggctcacgacaaatgaagaagatgtcaaagtacaatgcttatgataacgatgagtataatgatgagaatgatgatgacagcgatgcagatgaagatgatcctgctgacatggattttgagccagacggcgaaacagacaaggctactgataaggataagtttatggatagtgagaattctgacggcgacgacgatgatgaccttgaactctcagatgatgaagatgattttgttgagaatcggaggcaacctaaacgacttaagattgtagcaactaaaacttccaagggaggacagttgcccatgccagttcaaccaaaacgaggggtgtctcacagtgatgaagaatatttttcaggaaaagactcagatgttcccagcgattcggatttcaaacacataccgaaaaaacctgacaggttgcatcagaaacctgtgggccgcagtgatgttgccccaatcagttctcataatgagcttagaacttctggaaggaggaggacggtgaaaaagatctcatatgctgaaagcgaagaaagtgatgatagtgaggagaagtcaaataagcgacaaaagctcatcaaggaggaaccggaagaggaggatggagaaacaattgaaaaagttctgtggcatcaacccaagggtgtagcagaagaggcaataaggaatcaccggtcagctcaacctactgttgccagcctaacatcggactttgaccaacaatgggatgaattagagttctatataaaatggaaaggccagtcttacctgcattgtcaatggaagatactatcagagctccaaagtgttagtggattcaagaaggtaataaactacacgaaaagagtttctgaggaacagaggtacaagagggcactatcacgtgaagaggttgaggtacatgacgtgggcaaggagatggagctggatcttattaaacaatatagtcaggttgaacggatatttgctgatagggtcagcaaagctgatggagatgatctggttcccgaatatttagtaaaatggcaaggacttccttatgcagaatctacctgggaaaaagatacagatattgattttgctcaagatgcgattgatgaatataaggctcgtgaagctgcctcagctatacttgggaaaacagtagatttccaacgaaagaaaagcaaagctagtttgaggaggcttgatggtcagccagaatggctaaaagctggcaagcttcgtgattatcagctggaaggactaaactttctcgtcaatgggtggagaaacgatactaatgttatacttgctgatgaaatgggtctgggaaaaactatccaatctgtatccatgcttggcttccttcataatgctcaagaaatcaatggcccatttcttgtagtcgtgccactgtcaacattgtcgaactgggcaaaggaatttcggaagtggctgcccaacatgaatgttgttgtttatgttggcaaccgtgccagcagagagatgtgccagcagcatgaatttttttcagacaaaaaaggtgggcgtcatgtaaaattccacacgttgataactacgtacgaggtgattctcaaagacaaagcggttctttccaagataaaatggaactatcttatggttgatgaagcccaccggttgaaaaattgtgaagcgtcactgtatacaacccttttggaattcagcactaagaacaagctgcttatcacgggaacacctttgcagaacagtgtggaagagctttgggcattacttcatttccttgatccagtcaaattcaacagcaaggatagttttgttgagagatacaaaaatttgagttccttcaacgaaactgagctcgcgaatctgcataaggaattgaggcctcatattctacggcgggttataaaagatgttgagaagtctttacctcctaaaatcgagaggattctacgtgttgagatgtcacccctccagaaacagtactacaagtggattttagagcggaattttcagaatctgaataaaggtgttcgtgggaatcaggtatcacttcttaacattgttgttgaattgaagaaatgctgcaaccatccattcttgtttgaaagtgccgatcatggttatggtggagatagcatcggtgatcggaataaagttgaacgtattgttatgagtagtgggaaacttgtcttgttggacaaactattggtgagactgcgggagactaaccatcgtgtgcttatattctcacagatggttaagatgttggacatccttgcagaatacctctctcttcggggatttcagtttcagaggcttgatggtagtacaagagcagatcttcgtcatcaagccatggaacactttaatgctcctggaagtgatgatttctgttttcttttatccacacgtgccggaggacttggtattaatctagcaactgcagatacagtgataatttttgattcagattggaatccacaaaatgatttgcaggccatgagtagggcacataggattggccaacaggagacagttaatatctaccgcttcgtcacatgcaaaagtgttgaggaggatattttggaacgcgcaaagaaaaagatggttcttgatcacttggtcattcagaagctaaacgctgagggcaggcttgagaagaaagaatccaaaaaaggtggccccatatttgacaagaacgaactttcagctatcttgaggttcggtgcagaggaattgttcaaggaagacaagactgatgaagagaccaagaggaaccttgaaagtttggacattgatgaaattcttgagagagctgagaaagtcgagacaaagggtggtgaaggggaggaaggaaatgagcttcttagcgctttcaaggtcgcaaacttttccagtgtcgaagatgatgcaacgttctggagtaggttaatacagccagatcctgcagatatagttcaggaaactttggcacctcgtgctgcacgaaataaaaagagctatattgaagatcctcagcttgacaaaaataataacaggaaaagacgggcagttgaaacacaagaaaagccaaggaggctttctggcagaactgtggaaacagttaattcattaccattggttgatggagcagtagctcaagtacgagagtggtcttttggtaatgttccaaagaaggacgcttctcgttttgtacgagcggtcaaaaaatttgggaatgcaacccagattggattaattgtggatgatgttggtggtgtacttgcgaaggtaccgcatgaagcgcagatagaactatttgatttgctggttgatggttgtcaggaagcagttaaggagaatacagacattaagggcacagttttggattttttcggtgtagctgtaaaggcctatgaattgctagctcgtgttgaagagcttcagttcttggcaaagcgaattgcacgttacaaagatccaatcaagcagtaccgcatccagctaccttataaaaagcctcagtggtcagcaagctgtggatggactgaaactgatgacgctagattgatggttggaattcattggtatggctacgggaattgggagaaaataaggttggatccaaagcttggcctgacaacaaaaattgcgccagcaacacttggagaaagggagacatttttaccacgtgctcccaacttggataaccgcgctagtgctctcctgcaaaaggagtatgctaagtttagcggtaagagcttaaaagtcaaaggaaacacccgccagacagtcaataacgacagtaatagtggagttcgatcaatgaggggccggcaaaaggatgtaccagaaaaagatgataataagccgaacaaagatgacattcagaagcgtagggtaatagtggaagctgaagcaagagaagaaggtgaaatttctgaatcggaggcagagaccaggtatcgtcaggacaaagaggagaagtggcttgaatggtgctctgaagttttagatgaggagcaggaaactttgaagcgcctggataggctgcagaatacaagtgtaaacctcccaaaggaaaaggttctttcaaggattcgcaagtatctcctgataattggggacaaaattggagaagttgtccggcaacacagtgaatcttataggcaatcccgcatggtcatgaggttatggaattatgttgccaccttttcaaacatgtctggggagcaactgcatgatctctatatgaaacttagtcaagaccaactggaaggtggagttggcccatctcatggtggcaatttcacatccattcctcccaataagggaggtaactcaaatcaacttcatccttcgagaaaccaaaggccaactaggtctctccagtacaattctgagtctttccataatgagagctctggaagttctgaagcctggaagcgtcgacggagagctgacacagataatcaatttgacacccagcctttgtgtcaacctccaattatgacaaatggaaataggttgcaggaatctagtagttctgcaggtattcttggttggggtccagttgaaattagacggtatggtaatgagaggccaaaacgtgctgttcatcctagtcatttccctactgggcatggacctttgctgtagctgaaggaagtagatgatgcgaacaaccttgttcattttggcataaccgttcccagtgaatttcagcttccatatagttataaatggtggatctccgtaggaattgaaattctttttccaaaacaaaaaggaataaagagcaacctcacctggatcacagttttgaattatatgccttaaaaggtaatgccaggactctagaggcgacttatggaattgttaacagctacactgaatatccttctgacaccatcacagcaacacaaatacatggtggcttgtgaactgccaagaggatcaatcgaggaagttttgcctgttcagttttgtgatctctcaacaatgatctatagttaaatctcaatacataaattatgctttacattgtaatatattgaaatatggttccgttatgctccctccctctcgatgtgttttgtgccgtttttctaccgtgttgatgtaaaagatgaaagaaatgcatgttctcattttgaggcaacaaaaagttgcagccgggagcataatagtgaaatgcgatggaattatcggatacttatcgattccatagtgttttccctgagacaatgtactgaatgaggtacggttataagaaatggtgataattagcttagtaggtgctcagccattctacaagtcatctggtagtccgaagttgcatgaggcctactttcccctggttgccccacttatgctcagtaagtatgcttctagggttgtatgatgatggcccaattgaatttttaatcctgtgtatgaa

SEQ ID NO: 22799 - DNA, 221 bp, Zea Mays
ctcctccagacgcttctacaaagattccgggcacgggctcgggtgacgcacgggcaatggccctcaaagacgaagagcggaactgagggaggcagggagcgaggacggttgctgcgacgagggattggatgaagaagccgaccttggtaagccttttgtacatcatgtgaatatgctactccgacattacaaaagcttgatttgagattggtttcacagcg

SEQ ID NO: 22800 - DNA, 2108 bp, Zea Mays
gcgggcggatgacgtcgcggtggggcgctgctgcgcgcttgctctcctgccttgtgcgtgcgttggaacgtggaagaataacgacaacgcctaataacgagaaaagaaaacccaagacttcgtcgtcaccaaaaaaataaagcagaaaaaaacagagagtagtagactacgacagcgtccgtcgaaccggagggtcggaggcggaggcgaagatgaggaagaagctcggcacccggttccccgcgatcctcgctcttccgggcgggatccggtggacgcagcccgccgttaacgcgcggcttctctttttggttccgtgggcggggatttggctgggttcttggtggggggcgccgtgggtggaggcgggctcgggctcagatcggctcctgtgctcgcgcgtgcgcggggaagtaatttcgtttcgttttgttttgttttcattctttccttccacttttttgagggtctacgtctatcgagagttcggattctcgttgctcaacagaggacatcgacaattaattatccggcttctgcactcgtgttgtgttgagcgggtggacggtggagagatttgtggccgctcgcggctgactagatcactgctgatgaaatttggtgagtgttagtccgtgtgaacgggacgccctgatgtgatctctatgccctgttgtgtagatgcaagggatgaggtagatcctgctgccgtgcatgtggtttggttgcaagatctccagatcttgcgagcatgtattgcgggccccatgtatttctggggatactcaacatgtgatctggtgcaggagtactttagcagtagaatttgtgtgagtccctcatcatgggggtttttattatggtctggtaggtgtactggagtggagtttgaaaccacagtaacttccattgttatgttggtctacatatgtgtttggtgatggaactatttgttggagtctgatgttgtagtgctgtaggttctggtgttttcccttggttggagttccaaggctggttttgaatcttcaaaacctcttgttctgttgtcatggaaacaacgtggttgaagttccaagctacacacatctgtatggtttgcactgcaggctcgaatcaaaaagataatgcaagcagatgaggatgttggaaagattgcattagcagtgcctgttttagtctcgagggctcttgaattgtttttacaagatttaattgaccggacttatgaaattactcttcaaagtggagcaaagacactgaattccttccacctgaagcaatgtgtgaagaggtacagttcttttgatttcctaactgaagttgtcagcaaggtaccagatcttggtggtgctgattcatgtggagatgaaagagtgttacctagaagaagaaagtcaaatggcagtgacccagagaatgatgaatcaagatctagtaaaatggctataagaaatgcaaataccagccccagaggacgtgggaggggtcgaggcagagggcgaggtcggccaccaaccaagagaaaggaagttggttacgtacaatttgaagatgagagcagcatgtttgctgaacaaggtgaaaccttaccaggagagggaacagttccagagatcaacagcggcaacgagattacgcctcaaagcacgcaacctccgctaacagcccctgcgcaagctacaaattctaaggtggaagaagcaagcaccgatcatcagtcagattggcctatgccagatgccactggaaacatcggtgttgggccatctggttttggacatctgacagtgcaggttgatgaagatgaggactacgacaatgaggactagtcagggccatcctctcactgtatgcgctaacaggactgttctggtgttgtaaaatgtaaatatagcttgaagtagctgccgcagcttagctatgattgtctgttatgaggttatgtagttgccctgtgtaacttctgtaattgctttttagttgccttttctctacatgattgactgtcaaagcgttttgtcatatttaacccagtatgtttgagcaggggtcgactatttctaagtattttgactttattcgactagtatttgagcagtcatctg

SEQ ID NO: 22801 - DNA, 2399 bp, Zea Mays
caactgcaagacgattcgtttccatcgccatcggtgctgctcgagctcgactgctgcagctgctaccagtagtgagctgtgtgtgtgtgtagtatatacaatattcgtataaactgctggtctcaatcgagtcgtcgcccaatcggttgaatcggggagcagaggcatcgcccccacgcccaatcatccgcccccaaatccccagaagcacccacccctccgcgcgcgagatcccacgcgcgtccctcccacagtcccaccaccccccggggacgcggactccctcctccgtcctccccccccccccgcggtcccagcccagcggtggccctgcgacgaccgatggacgcggcggcgaagaagatgacgcggagcatctcgcggcagctctcgtcgggggcggcgcggctgtggcgccagctgtcgctggacccgcacaccccgcgccgcggcggcccgggcccggtcccagcggcgggggccgggcagacgcggttcgcgatcgccaggcagtcgtcgctcgacccgacgccgcgcggcgggccggacgggtcgtcggcgcaccagcagctcgcggtgccggagaacctggacgccaccatgcgcctgctcttcgccgcgtgccagggggatgccgccggggtcgaggagctgctcaggagcggggtggacgtcgacagcatcgacctcgacggacgtacggcgctgcacatcgcggcctgcgaggggcagggggaggtcgtgcgcctgctgctcgactggaaggccaacatcaacgcccgcgaccgctggggtagcacgccagcagcagacgcgaaacattacggccattttgaagtatataatactctgagagcaagaggagcaaaagttccgaaaaccagaaagaccccgatggctgtgtcaaatccgaaacaagttccagagtatgaactgaacccacttgaactggagtttcgaagaggagaggaggtcacaaagggtacatatctggcaaaatggtatggctcgaaagtttttgttaagatactagacaaagacagcttctcagatgctgaaagcataaatgcgttcaaacacgagcttaccttacttgagaaagcacgacatcccaatttggtccaatttgttggagctgtcacgcaaaatgtcccgatgatgattgtttcagagtaccatcaaaagttatattgagatgaaaggtcggctgaagcctcacaaagctataagatttgctcttgacattgcgaggggactgaattatctccatgagtgcaagcctgagccaatcattcatggaaatttgtcgccaaagtaagctcattaagcattattccatcgttgaattcgtgcaagacttttagatataagtggctacatgtatgctgtacgctatgatactttggtaaggttgcagaaacatcattcgggacgatgaaggacaacttaaggtggctggttttggatcactgagtttgagtaaagtttctgaagataaagtacaaatggctcagccagttacaaaatttgacaatgtatacatcgctcccgaggtctacaaaaacgaaccatttgacagaagtgtagatgtatttgcatttggtctcattctttatgagatgattgaaggagctcctgcttttcacccaaagccacaagaggaagcagctaagatgatttgcttagaggggctgagaccaccattcaagaataaaccgaaatactaccccagtgatgtgaaagagttgatacaagaatgctgggatccgatgccttccgtcaggccaacattcgcggagataattgtgcgcctgaacaagatacatgcgaactgtgctaagcagggtagctggagagacaccttcaagcttccatgaaacatggacgtaactcgctatcatggcataaaaatctgtctcgtggggggttgttggtctcaatcacactcctcgttttacctgacgcaggaaacaaactggagagagataattgtaaagccccgcgaggctgccgtgtcaagatttcgccccttcccttcagcaagtgtgagtaaacacgagtcaagaaacgtacagagttacaaacagaaaggcaaagttcctatttagttcaggtttcagaccagtttgtgctttgtagcctgtataactgtatctaggcttatgccaccggcccaatttctcttgagctatcttcatccaaacgggaacaacagagtattaatcagtattctgaacattcagggcgtgcctattccttttgaactcctacgtgaacgttgtaaattctgcacgatttcctttcgtgccttttgtgtacgttgtgctgaaagagaaccagaggcatacgcatatcccgagaaaatgctgcagcgacgaaggaaaagcacagcgaagaaa

SEQ ID NO: 22802 - DNA, 1725 bp, Zea Mays
gaaggaaaatgtgctcagtgcatgatgaacatcgctgtttcacacctgcagaacctcccttttattgagaacatggagaagaggatccaaggtgctacaaaactgctggatggtagtttggagcgctgctttgtggatggtctggaacaccgtgatgctaaagttatatacaactgtttgcgtgcttatgctgcaattgacaatacatcatcagccgaagagctttttcgtacaacagtggtgtctccattgatccagaaaatagttcctcaaaactatgcaagagctgttgctggggcatcatctgatgagctagaagaggattatcaacagataaaggcatgcgtagaaaaagattgcaaatttatattggaaatatcttcgtcaggctactgcttctccaagtctgctgtaacgaagttacgctatgagcctgcttacacagatttcatgcgacagtggaatgttggtgtctacttttcgttgcgatttcaggaaattgcgggtggccttgattctactcttacaaatacctttagtcctactggattgaatgaggctcaacagaaaccgttgctcttgaaacaaagtattaagctcttagaaagtttggattcatgttggagtgatgaggttcttgtattctctcactgcgataaattcctccgtctgtccttgcagcttatttcaaggtatacaacatggctttcatgtggtttatcagcacgtaaagcttctgacaggagcccaaattcacctgcagatgctgaatgggcactgtctattcctatagaagatttcatatatataatgcatgatgtgcatgctgtaattggtgagctttcagaatcaggcagctttattggacatgtgaatcagtcactagggtcatgccccattgaagtatttaatcttgtgaaaggaagtatattgcaagctgctgaacctttaaaggagctgttgcctgcaataatggatgtcatgattggaatcatagttaagaagtctaatgaggacctgaagcacctgaaaggaataacagcgacatataggatgacgagtaaacttccagtcaggcattctccatatgtatcagggattttacatccactgaaggtgtttcttgaaggggaccgtatgcactatctatcagaagatgataaaactaagttgtgtcgtgggtctgcaaataagattactgcaacctactatgacttggtctctgaagttgtcactgtggcaaggaaaaccgagtcttcattgcagagactgcgccaaggtgcacaaaggcgagtaggagctagtacagatgcctcagatagcatcatatctgatacagacaagatctgtatgcagctatttcttgatattcaggagtacgcacggaaccttcgtgcgataggaatagacgcgagagagattgattcctacagagctctatggcagtgtgttgccccaaaggacaggcacgagaacatccagttttgatgtaaagaacgctgtcagtatatataaaataaaattgtcaacccgtagatatctcagtatgtgaaaatgatacggttggcactggttcatccagtcttcaacgacatgacaccctgtcagtttgtgaaacaaggacgtgtttggtttgatgaatgaggtggtacatttctctcttacttcttatttttatatttggtttttagaatagtacgagttgattcatcaccatttcattcc

SEQ ID NO: 22803 - DNA, 1790 bp, Zea Mays
cgacgcttgcgtggtaatgattgaaggaacaaaatacgaagtcttctgtcaagactgaaaccaagattctgacagtacaagaggctagtttgctcagccaactgaaccagctgaatcacaattcgcagaccattattaatagtggcggtcctcatgaccccaagctcagccgtcctgcatctggcgccggtgcaggcaatgaacacatatcacccccggatcacggacagacagctgaggaaagtgatgcgagggaagactacccggcaatggctactaccacgccagcagaggacgggtacagctggaggaagtacgggcagaagcaggtgaagcacagcgagtacccgcgtagctacttcaagtgcacgcatcccaactgcctggtgaagaagaaggtcgagcgctcgcacgaggggcacatcacggagatcatctacaagggcgcgcataaccacccgaagcccacgcagagccgccgtccaggcgtccagcccgtgcacccgtttggcgacagtgcgcaggcggacgcagccgacaacctggggtcacaggcaaacgcactggacgccaaccagccgaggcgtgcgggtgttcaggatggcatggacgcgacgtcgtcgccctcagttcccattgagcgctgtgactcgccggcctcgatgcaggtcgactcggcaactcggtttgggtcccccgagggcgcggatgtgacgtctgtgtccgacgaggtgggcggggacgacagggtgactcgtggcagtatgtctcagggcggtgccgacgcggagggtgacgagctggaatgtaaacgaaggaagctggagtcgtacgccatcgatatgagcaccgcgtcgagagctgttcgcgagcctcgcgtggtgatccagacgacgagcgaggtggacatcctagatgacggctaccgctggcgcaagtacgggcagaaggtcgtcaagggcaacccgaatccaaggagctactacaagtgcacgtacccgggctgcgtggtgcggaagcacgtggagcgcgcgtcgcacgacctcaagtccgtgatcaccacgtacgagggcaggcacaaccacgaggtccccgccgccaggaatagcggccacccgggcaccgcggcggcgacaggcgcgggtggcccgcgcaggctggagcacccgtcgctgcgcgacggcctgatggggcacttgggcggctgcggcgtgccgttcggcctgccgccgcctagggatccgctggcgccgatgggcaattacccgacgtatgcctcctccattccccttggcggcgccggccccacgtcactgccgagcctgccggtgccggcggggaccctcagcgccgtcgatgggctgaagctcccgatgctggcgccgtcgtccctgcagcagcacccgctgctgaggcaccggcaggcgatgcaggccgctggcctcgtggcgcccaaggacgacgtgaaggtcgagggcaacgttgccggcggcgctgccccgtcggtgtaccagcagatgatgtgcagcgggctgcggttgcgccagcagatgtagatacataaataaatgtggagaggattagtgattctcaagttattagtttcttaccagtcgtattaggatgagttcgtgataattgttataacgtgggaacaaacacccgttgctttctgttttttttttcacccttccacttcatttttagctcagcaactatttatttatttactgcccctcttcattgaggtttggtattcgttgagcgacaggcatcatatggtgtttcgg

SEQ ID NO: 22804 - DNA, 3265 bp, Zea Mays
gccggccgactgcacgcagtccggccggcgctgcctcgcagcaacaagacggacagctcgccaccggcagggggacctctgctcgcccccgtcctcgcggggagacacgggttaggcgctagatccacgcgtccggccccgcctgcggtgcccgcggcagtgcaggacggtgtgaatgaaaggggctcaggatacaaggcacaggaagaagctggacctccaggttctcgcgcccttcccaggatgcctggggaggatgatcgacatgttcgacctcagcaatggcgtggttgccaccaagatgctaactgagaaggcacatagagatgtttctccggccggaaaagaccgaagtaacactttcaagatggcaattatccccccagctcagacagaagataaacaaatagatagccagacgagaaggaattcccctactaaaagatcaaactcgcctactaaaaggagcggtgcagcgcctgttaagatgatcatggagcagggcatgtggaaagaagggatgcctgatgaggagccactgaatgttgttgcaagattaatgggactacatgatgctccagttcagcaatctaatttccatttagcgagacaattggataaggaatatcaacgtggtggttttgaagagaactaccggaatctcaagccaaataaggaaagcaaatgccatcaaaaccaaaaggcagggcacacttggaatggttctggtgaccaaccttcaagaatcaatagcagccggagcaagcatcaaggaaatgagccttgctgtgagaagaggatgtcgcttgtccgcgagaagtttgctgaagcgaagcgtctagccacggacgagaagcttcttcattcgaaggagttccaagatgcactacagtttttaagctcaaatagggacctattcttggagttccttgatgagccaaatcctctgttatcaagcaaccgttatgagttccaacctgtcgcgccaccttctcaagcgaagcagataaccatactgaagccatcagaactagcaaagagaaaaggcagcattcttgtggggagacaactgttttcagatggagatgaaaggggacttaacagatacaggcgccatcagagtttagatgtttgcccggcaaattcaaatttgtccgagccaacaaaaattgtgttactgaagccaggacgactgtcaaaacctcatgattccaggattgcaaggtcttcattatcatcagcagaaaacagtgaagatgaaagtatgacgacggttgatgaaaccgtgtgctcaagaaggttggcaaaggaggtcacttggcagacgaggatgcggctaaaagacaagcaagacgaaaagagcacgctctcatgtgaataccttgacttctatatcggagatgactccttcagtaaatcagaagttgagatttcaaaagagatgcctggtgaaacaagtgaggagttggagtttggcactccgacttctggccgttcctgggattttctgagcagaagtggaagtccttactctgcgtcatgctctagccaggcatcccatagaagggaaccgtcggtagttagggaaggcaagaagaagattttggagagatggtctatggtatcgtcaacagtcagtagcgaggaggaaatggaaggtcgcagaagtacaggcacgcttggtgacatactcacaataccgaaagtcaaggaccaggaaggaattggggcggaaacactggggagcccagcacctgagctggaacctgaggagcctttctcatgcttgccaagatctcggtctcttccactttctctgtcctgtggagtcgccgagtctaatggaggagtagcctctggtagtactcaggaagctgaaagggagaggatcaggaagtcatcatcgtttagggaaaaggtttcaagcctgttctctaaaaacaagaaaccagttagggagaaggcagatctatccgtgagcaatagactcgaggtctatggaggggctgaaactactgctgatgtgaagaagggcttgaaccgtcttgcgttagacaatcttcagaaacaaagtactagtcgtgtaaacacagacgggaagaagaacgctgcgcaaggactcgtcactagttcttgtggtactaatgatacagctaataccacccctgccaaggacaacattgcctccattccaagtcttggcgccccaggaatccttggtgaccctcaggaccagcctagtcctgtatctgtgctagatggaccgtttattatacgtgataacagcaggaatgtactgtactcatctccatccccacaggctttgtcgaggtctcccttgatcggatcgtttccacggtccctgccagtgtcgtgggaggaccccccgccggaagccacgtcgccgaattccctgagactctcgaggcttttctccaaggccgacgaggatctagactcgctgacgttcatccagaagctggtccgctcctgtggcatggaccgagcaagctgcgtgttggctggccctctggacccggacctgctcgagaaggtttcagagcacgaagacgacggaaccaggttcgggagaaggcggcttcttttcgacgccgtaaacgaagcgctcgccgagctcgcctggacggcggaactggccgcgtacccctggggcggcggcagatcacgcctggactgcaactgcaagaacggttccggtggtgactcggcggccgaggagatctggcgcgttatcaggaactggtcgacacttgacaagtaccctccctgcgaaactatcgaaggaaacgtcttgctggagatgatactcaggcgggaggcggacagcggcgagacggctcggttggaggtgtttggtctcggcgcctcggtctgcgccgtggtgttggaggagctggttgaagagacggttgtggatctcctgactgactgctagtgagtgatacttgctgctgctgttaacactgctccgttaatccacccctcaagatggaatgggtctctttgccttgttcacatctttgttttgaccggcatttgctctagccgttgactggtaatggatcatgccatttgtttcgccgtttaattacacacacgagaccaaaaaaaaaaactgtaagtagttgcatctcggagcctgtccctaccctgtccacaagatgatcttgttttaatccaagcttagagcctagtcccatgcatgccacaagtatgaaacataatacatttttttattattctg

SEQ ID NO: 22805 - DNA, 2022 bp, Zea Mays
ctgcagtgtacactcaaaactctttgtttcgtttggatatttctgcaagttgcttcaattcatcttatcgttgtttactttgctggtttgggctgtctaagaaatgtaagagctgcgctttgccgtggaagacttctgaagtgcagtcgatgtggcagacctggagcaactattgggtgtcgtgttgatcgttgcccgaaaacctaccatttgccttgtagtcgaacagaagcctgcatatttgatcatcggaagtttcttatagcctgcaacgatcatcgccatctcttccaaccccaaggagataaatatgttgaactgctcaggaaaatgaagataaaaaagatgaaggccgatatcagaaaggtgtcacatgatgcatggagaaaagacagagaggctgaggagaaatggttagagaactgtggggaagatgaggagttcttgaaacgggagggcaagaggctaaacagagatcttttacgaattgcacctgtttatataggaggctcctctgaaaatgaaaagtcatatcgtggttgggaatctgttgctgggctaagtgatgttattcagagcatgaaggaggtggtgatgttacctcttctctaccctgagttctttagttctctaggtcttactcctccaagaggtgttctgctgcatggccaccctggtactggtaagacacttgttgtaagggcactcataggggcatgttctcaaggtaacagaagaattgcttattttgctcgaaaaggtgctgattgtttgggtaagtatgttggtgatgctgagagacagttaagacttcttttccaggtagctgaacgatgccagccttctatcatattttttgatgagatagatggtttagcaccttgtagatccagacaacaagaccaaacacataattcagttgtggcaaccttgctctcgttgcttgatggtttgaaatcacgaggctcagtcgtagtgattggggctacaaatcgtcctgatgctattgatcctgcccttaggagaccaggaaggtttgatcgtgagatatactttccactaccaaccttcgaggatagatctgctattctgtcactgcatacaaaaaaatggccaagtcctatttcaggtgcattcctgtcatttgttgctagccaaactgttggatatgctggtgctgatctgcaggcaatttgcacacaagcggcaataaatgctttgaaaaggacatgcccattacatcaaattttacaatatgccgagaaaggagttcctcatgggcgagttcctctaccaacagttcttgtcgaggataaagattggctagctgctcttgcagctgctccgccaccttgttcaaaaagggaagcagggattgcttcaaatgatttggtttccactcctctagattcctgttttgtaccaagcctttttaaaccattggtacaccttcttatttctatgtatttggatgagcgtgtatggttacctccatcccttcttaaggcatgttgctctataaaggaagtggtattctcatccatggaaaagaatactgtaccccacactttatggccaacttatcttagttctttgatccaacaaaaagatattgcagatagaattggaacaatcttgtcaagctgtggccttatatctgcacaactaggaaatcgtggttcaatgttgctgagtgatgttaaaacacaggagaatttttgtggcagcagattaaatcccactggtttgcatatgaaaggagggctgccacataagttatcaggctttcgagttttagttgctggagcaccaagatcaggccaacaacacctaattcgttgtgttcttcatggttttatgggccagattgtaatacacaagcttgaccttgcaactatggtgcaggaaggaaatggtgatatccttagtggtctgacacacattctctggtcatgtggctcctgcacgctagctttacaatggttttggtatgctgccacatatatgttcccaacactgaca

SEQ ID NO: 22806 - DNA, 2330 bp, Zea Mays
gccccacaaccgctctatacgactcctccatcctccccccctccccgtgatggctgcaatggatggggtaattgtagtggagctgtagaggcggcgggggtgcggttgcgacggactgtgctgcgccgacaagctgggaagaggaggcagcggcggcggggtgggacttgggatgggtcttctgtcgaaccgggtggagcggtcggagatcaggcccggcgaccacatctacacctggcgggccgtctacgcctactcccaccacggaattctagtagtgtgcaagttagctgttcaccggaattctggcccgcgccggctcgctctggacttccttttcgccgccgctggatgctggtatttgttgtttttttgctttgttccgcgataggattactagtggtgatttgtgtgtactctctacacaaacggaagataccacacaaactgaagataccatggtctctacataaacccttccagatggccaggatgccacatgctgtgttctgctttccgtgcagaacaaatggcacttgttgctgctcacctactgctaaccaacgtgtctatctgtttctgaactttgttgtctctagtgtggagcagccttactgttagctcgagtttacgtgcaggaaagaaacactacataaggtttgacccatgcttcactgtgcctcataattgactagtttaggcctagttgctgtaaaccctgatcaccaaagtatcctatgtcaattaagttgttgaactattcggtcacttttactagttgagggaacttcctttatgtatttattgtttactgcaggttcttttgctttgcgtcttttcactttcagataacggaggtcgatcttcatttaggaagcttatacgacccttcaacagtgtcacaattgtgctacagggacagtgtctccacagtcagtgccttttgttggcagatgccaagatctgggttctgcactaccagcatgaaaagctgctcaaattgttgaaacccccctatttggcttctcctgcatcaatgcatcatacatcctctctggctctggatttttttttcaagtaatagcatttttacatgttcgagcaaattatctgttattaagagaactttagcagggcaatatgtaaagcaatcatatactgttagctatattttgaaattcctttccattttctctcaagcaattttcctctgtatgtccaggtatttatgtcgggggaagcaaagtggtccattttacacgtaagaaagaaactgaaacttcagattcatcagactccacctccagcctgatctcagagatttcatcagagtgccaaacattccctgattgtggatttcagctgtctaatagtggtgttgtcctcacttgcttggactgtttcctccgcaacggctccctctattgcttcgagtatggagtgccatctgcagttttccttgcaaagattcgtggggggacctgcaccattgccgaatcagacccaccagaagttgttgtccatcgagcgatgtacctgcttcaaaatggttttggaaactacgacatgtttgagaagaactgcgaagacttcgcactctactgcaagactgggcttctacctgttgaggagcctggcattgggactagtgggcaagcttcttctgctattggtgtgccgttggcagctcttctgtccactccgttcaagcttctggctgctggtccgcttggaatggccactgtcactgctgggatgtactgtgctggcagatacattactgacataggagtaaggaaggacgtagcaaaagttgaagtggagaaattatcatcgcaccccggtttccaccttgttgaagatgaagaatcagtcaacaagcgatcagaaaaaccaaagaccttgctccctatgaagaggaaacgagaaaggtgactgcgaagcacagcttaggaggatgaacttctcttcccttcaattggtgtcgaattgtggataatttgggatatgataataagactcggtatagatatgtgccttgcgaatgtatcataattggattaggcgcacccctcacctgatcaactgtaactgccttataaattcaatcaaattgctatataatgtagatttttcttctttgtgaggtttcagtcttctgctgcaattaataacagttataatattttttactgatctgggagatcactgtatctgtattctgtagttacaacttacaaggtagagcaaactatcggcaatggcgttttcatcaggtatactgtacgaaaagtgaatataaaaaattgagcagagcttgtttttggaga

SEQ ID NO: 22807 - DNA, 3201 bp, Zea Mays
atgggaaagtgcctagacaaggcacttaggtgccaagtgagctggactcaaggattattatattttcccattaccgagaaagtgtcaatgaaatatattgctcactacaggatattgatgataaacttgtcagacctgttgaattcattggtcaaagctcagcaggtaaccaactgaaggggcaaagccaaaaaactcaacaagctattttgaagaaattccgatctggggtatataatgttttggtggcaacatcaattggcgaggaaggacttgatattattgaggttgatctcgtgatctgtttcgatgccaatgtctcaccattaaggatgattcaacggatgggaagaaccgggagaaagaatgaaggtcgagttgtggttttggcttatgaaggtcaggaattgcaggggtacagaaagaaacaaggagattgtcgaaccatgaggaagctattgcataacagtgagagatttgaataccatgctagtcctaggatggttccacatgtctataaaccagaagttaagtatgttaagttgacaatagacaagtatattcctcacgcaaagaaaatgagggttgccgcaaaagaagcctcgccaattccatggaagatgtcggaggcagacggtcaaatgattactagatatgctaactgatgctatgaagcaacttcaagacccatctcttttcaggacaaagtgtgaaatccctttgcaagaacctgctaatgtttctgctgtggaggagggtctggaacatgaaggtctctatgctgctaatggaaatgaggaaatgcctcaggaatgtgacggtttagaagcttcatcgagtgtagtgtggaatgaaaatgtttctgtgccaggttctccagttaagaagtatccggttcacactttcttcagtggtgattatgtaactgtggatagaagaggcagcgttttgattacttatgtacctgtcctgcctcaaaaaattgcattcagtaaggacataaaaagtgcagtttggaataacaaagatcagaacaaagccaaaccttacagatcagcagcaggcgtctgtaggacaacagttgaatttgtccttggtaccaatacagacaaacatttgtttgtggataatttatcaactgtagccatgcattcccctgagtgctcttggcatggtgacaatgttgatgacaatcatgtgcttactactgtaccatccaaaacactgacaagcccaagggagaaaatggacacaccctgcaatgttaaactgccagagtccacctattcatatcaggaagacatggagcttaattcaaggctaacagtatatatggaagaaggaattgttcctgagtctccagtggttgaagttagccacctacgtctagagatggatgaagctgcagactttggagctgtgccaaagcgtggttctccaaagtcacgtgatgagagggctcatgccaatgtagctggaagtcacaaaggacctttgaactttgagaaaaacgatcaattgctttgtggggaaaacgagtttgatggatcatcaaggttgtatatgctagatcagactcgagccaaaacagaagagccaatgcatccttcaaatgtgaagatggctactactacaagacatactcctgggaatatgctgtgtgatagtttctcaggtgattatcagcttaggtcagggggggatgcatcgggatcagtccagcaagcacctaagtacagaagactatgcaaatatggtgacaagatcaaaagagtctcttccatatctttggatggctgtgatgataggtttgaagaatgcaatattgctaataaagataggccaaaccaaataaaacatgctatggggacaaaaaggaagaccaagaggcgtctagatgcctatattgacgaggaagtcggggtgtctgaagatgcatatgtttcagaggatgaggatgataatcagagtgaagataaatacgaagatagcttcattgatgatcaggcaactccaactgaatttacacaaactgaacaaggtgatcgacacaatggtgacatgatgggtttctacaggcaatcgttgtttactcagtccccagtagttctaccctcaaggtaccttgatgtttcttacaattctgcttctcggaccggaaattcaagctattcttcagaggctaggcacaattacactgagactcccaaagagattcaaacacaacatcataccataaacccaagcccatcgtacagttttgtacaggatcgatgtgaaagagggatcgccaattgtgaatcatcgactaagctggattgcagaaagagaaggctaagcttccagcaacctctggcgatccctgttataaaccttgaaccagaaccagcaccagaaccatctccacacgtcgccagcagagtcgctgatcacctatattttgatgatggtttctttgagaaccttgatcttgatgcaattgaagctcaagcaaccgaacagtggagacagaagaccacacaatcgacgcagaaaccagtggaaattaagaatgcatcagacatgagttttgcacctccgtcattcgatttaggtctctgatagtggtggtaaagttagcatccattcatgatgtcatctagctgcagtacctagccatctcagagcatgctgagaactgcacaagcaatgaggttttctgcagaaggcccgaacctgcatcacatgacaatgccgcaggatctggcatgtctgccgctgtgatatttatcggcgccctggagctggaagatgcgctggcggcagattttgtagagtatttatctcagtacaggctcaatacaccatgtatattctcctgtaaatactgttcgatgtataagggtcttattgtatgcagacatttcagagacttgatgtgttaaacccagtggcaaaggtgacgtcagtgtcggtttttgttgcgcaggattatcctcgctctcgatgctgaaccgactggttttgcatagacgaggcatccgtgcagcatgatggcaacgtggagtttggtcaataggacgagtggttggtacatgatgcctggttgctttccgaaaacaggcaatgttttgtgcagtcttgtcgatttctgtacatctcaattaacgtacgcgttttcgtacattggcgcgacaatgtgagcacagagattctgaggac

SEQ ID NO: 22808 - DNA, 1655 bp, Zea Mays
cgactcttggcgctaggccgcattccttgccgagcgccgccgcggctggagctgggttcagtcggcgcggccccgttctgcggcgaactttttcttaatggtaggggcggtgaacgttgtggacttgcatctgtctcctctctcctgtgagcgagcgcatccgtggcggtggccggcgtggtgttcgacgaaatgcaaatctcggcgatgtttgcatctctcgttacattagaggcaacagaaaatcactggttcacagattcagacagagtcaaaggagcatatggatggtcattataattttatgtcatcttttggtggatgtggatgcactaagaaaaaggagcttatgggacagggcatctgtgcatcagcgacaggaaaagagagatgaatgaacgaacctaatccatccatcagcagcgtaaccaaatcaggcacagaagagctcccgcgatccagtcaagtgccctataaaatccagccccgcttggcttcacccacccttgggctcgcagtcgcagcaacgatggggaggtcgccgtgctgcgagaaggcgcacacgaacaagggcgcgtggaccaaggaggaggacgaccgtctggtggcgtacatcaaggcgcacggcgaggggtgctggcgctcccttcccaaggccgccggacttgtgcgctgcggcaagagctgccgcctccggtggatcaactacctgcggcccgacctcaagcgcggcaacttcacggaggaggaggacgagctcatcatcaagctccacagcctactcggcaacaaatggtccctgatcgctggaaggctgccgggcaggaccgacaacgagatcaagaactactggaacacgcacatccggcggaagctgctgagcagggggatcgacccggtgacacaccgccccatcaacgagcacacgtccaacataaccatatcgttcgaggactggggccaggggaaggcgctcaagtgccccgacctgaacctggacctctgcatcagcccgccgtgccaggaggaggaggaggccatgctgctgaggccggtgaagcgggaggaggccgggctctgcttcagctgcagcctggggctccccaagagcgcggactgcaagtgcagcaacttcctcgggctcaggaccgccatgctcgacttcagaagactcgagatgaaatgagagcttccatccatctctgtctgtctctctctgtaacttcacccctgataacacgcagtagtagtagtcaccaactgatttgtcgctccattaattctgtctctctctctctctctctcgctatgtaaattagcatcaccaactgattgattgatcatgggcaattaataatacttgttgctgctgcaaattgacattaatcacggttgccatgtgcagctgagacagatcttacgacgtttaccaaaccactagtagagcagcagcagcaagcatccaaatggcttcctgctgtgggctgtcccccggcgatgcggtaggggcgccgccccctgctgtgggctgtgggctgtgtggcctgcggaaaaaaggcagctggttttggaaggatctcgcgcagcaacttgcctgatcgattggattagttgcggatgtagcgtctggcggcaaaagctgtgctagcgtactc

SEQ ID NO: 22809 - DNA, 2167 bp, Zea Mays
ggatcacaagctagatttcattaaatgcttggtactagtagtattattgacaacacaagagtacataccgctgatttaaataaactttagttgctccactaaaaactgtataccatggcccatggggattaggccgaggagaggagatccttctccggtggtccctacaaaccaggaccagcccgcacgaccacaagtgccagcgaggagtggcacctgggcatgccacgtgtgcagtgggcatcaccatagccccgattcaccaatgggaagagaccccttatccgctgctcttatcctccgcctgtggcctgtgctcagctgcgcgtagataacgaactctcccgccctcacaaaaccgcccttcacgatacgcacccaccagaggaaaagggcaaaagccaaaaggcatcaccgccgcgacgacgatggcagcctcgctccaagccgcggccaccctgatgcagccggccaagatcggcggccgggcgccctttgcctcgctgccgtcccgcccgacgtcgccagcaggtgcgtcgacgccgcgaagctcgccggcttcgcgctcgccacctcggcgctcctcgtctcgggcgcgagcgcggagggcacgcccaagaggctgacctacgacgagatccagagcaaaacgtacatggaggtgaagggcacgggcacggcgaaccagtgcccgaccatcgacggcggcgtggagtcgttcccgttcaaggccggcaagtaccagatgaagaagctgtgcctggagccgacgtccttcaccgtcaaggcggagggcatcgccaagaacgccccgcccgagttccagaagaccaagctcatgacccgcctcacgtacacgctggacgagatcgagggcccgctcgaggtcggctccgacggcacgctcaagttcgaggagaaggacggcatcgactacgccgccgtcaccgtgcagctcccggggggcgagcgcgtgccgttcctcttcaccgtcaagcagctcgtcgccaccggcaagcccgagagcttcggcgggcccttcctcgtgcccagctaccgtggctcctccttcctcgaccccaagggccgcggcggctccaccggctacgacaacgccgtcgcgctccccgccgggggcagaggtgacgaggaggagctccagaaggagaacatcaagaacgccgcctcctccaccggcaacatcacgttgagcgtcaccaagagcaacccggagaccggcgaggtcatcggcgtcttcgagagcgtgcagccgtccgacaccgacctcggggccaaggcgcccaaggatgtcaagatccagggggtctggtacgctcagctcgagtgattcgagtgtctaactgctaggtgtccgaccgccgtcatggatcttgggaaggtgtatgtataccatggaaaactttggagagcagaggaggaatcgtgtatgtaatgtacttgttaatgcaaattcgggctgtcgcttttttactccgctaaattcccatagagtcacagcaaaacaatccactaaaaaaaaatctccataactgaagtccacaggcgctttaggatttagtcgtttttttccagccacaactgacttgtatatagtatagtatactagtattcaacacagcaagaactttcctcccgttgatttgatccaacgcttcctccccctttcaaccaggaacaacaaagaagggtgcaacccccatcgctttccctttcaaccaagaacaatcaagaagagaatgcttcagaaccaggaaactatatcagcattgtacagttcagcttaaattgaggtaaccaaacaaacagatagcatcctatgtctacacttgcactcaaggaggggggctaatcatgcacaggaagggggagctgcacatcacctgatcttacacaccagaacgagtcatcctgaaagaaacagtaaccatcgcgacgggcaagcaattaattaagcagaacacctctagtcgtcaactccattcattcgctgtccaagaagaggcttcaagaatttgtttcggggtcacaacgcaagtcttcacgaatccgtatgatcaatggggccagtcgctgttaatccagtgcttacaagaaatagcaaaaccaacagaattagaatcagccagcttgagggaagaagcgctgc

SEQ ID NO: 22810 - DNA, 1973 bp, Zea Mays
cccgcctctggtggatcgtcaacggcgcccggcctgagggcagcgggagccagcagccgctgctccgccaagagggtcgcgcgccgctttgggaacgcttatgctccaaagctaagcgttacccgtcctcttagcgctccagcgccctgaagcgtgcgcttagtgccgctttctagaaccctgtgtggcataaacaaccagctgaaaagggttggatgatgggcgagatctgaaggattctgatttctataagcagcaagctaaacttcttttcaagaacttgtcaaaagggcatcatgaagcttcacggatgtcaattgagacagggccctactatttccactacattattgagggcagagtatgttatctgactatgtgtgaccgctcttatccgaagaaacttgcattccagtacctagaagatctgaaaaatgaatttgagagggtcaatggcaaccaaattgaaactgctgcaaggccatatgcttttatcaagtttgatacattcatccagaagactaggaaactgtatttggatacaagaactcaaagaaacctcgcaaaactgaatgatgaactctatgaggtgcatcaaattatgactcgcaatgttcaagaagttcttggtgttggtgaaaagctagaccaggtcagtgaaatgtcaagcaggttgacttctgatacaagaatatacgcagataaggctaaggacctcaaccggcaggcgttgattcggaagtatgctcctgtcgccattgtcattggggtagtattgatgctgttttggctcaagaacaagatatggtgattgtacagtacgaaggatactgggccctgttacaacaccggagaagaacagatggagataaaaaccaggtctattctggaacaagaagatgctttggtgacttgtatcccgtatctgcccattcaagcgattacttaagctgcccttttgctcctccctataagctagtatcaaagtgaattcgttggagtgcagacctgataagagcatctccggaagtctttcaaaatttcactctaaattctcattttgagagtcatttgcttaataattgttattatgtttttttcactctccaacagcctttaatatcctgtttgcactagggagccattctctttctatattggactaccgatgaatttggaggagatggatatattcggatagctgtttttaaaaaaagctgttgggggaatcttagcaattaggaagggtatagtctctagagaaactcatattttgtgcatccgttgaactcaatgtaatataatataagagctctagagttctacatcggggttgtggaactcaatgtaatacaagagctgtggagttgactttacatcggggttgtaatttttagggtggaactcaatataaagattcagggtggtctgatgagttgacgaaactcgagcatgctttttatagctgcctaatatgtattgatttaaggtcagagagagtcgtgtatactacagctacgagcagaaccctccgtggcaactggcacccaagtcctgtcctgtccagcaaaaaggttgggtgcgccgtgcgcgtctccacggggtcggagtcggaggtggatgggcagtgggcaaagcctctcgcgctggcgaccgtgcagatacaggctcagtgctcaactgtctcacaggcaaggatggcaatcgggccttattattcgcggataccttattatatccataaccatacccacggataccaaattccaccatacccgcatccaatggataattatccgcggttatttacccatacccatacccatacctattgctatccctactcacaggctcacagccgcgcacaggaccgtgtcggtgtcacggtggagagacgtctcggcgagtcggtggtgccacaatcgcggacacctggcgacgttgctgacagtcttttactacaccctttctaa

SEQ ID NO: 22811 - DNA, 1956 bp, Zea Mays
atggaccaaggagcgccggaggcggacaataatgccatgccagcaccatctgacggcaattcgaacggaggtcctgtcctcggggagccgaatccacacggaccacaccagaggacgcgggggacgccccggattcttcggattccaggatggaactacacagaaatagcactaatggttcctgcctcagtgcatgtgggccactgacagactactacattcctgattacatactgaagccggcctatgaaccggtcactgttgataatgtgccatgttgtcctgtggtagtcttcatcaactctagaagtggtggccaactgggaagcagtctgataaaaacataccgtgaacttctcaatgaagcgcagattatacagcaactttgaaaggctcaagtctagtggtgaccatgttgctactcaaattcagaagagcttaaggctaattgttgctggtggtgacggtacagcaagttggctgcttggagtagttagtgacctgaaactatcacatccacctcctgttgctaccgtacctcttgggactggaaacaacctccctttttcatttggatgggggaaaaagaatcccgctactgaccaggcagcagtgaaatcattcctggatcaagtaaaaggagcaagagaaatgaatatcgatagctggcatatcatcatgaggatgcgaattccacaggaaggcccatgtgatcctattgctcccttagatcttccacattcgttgcatgctttccaccgcgtatcagcttgtgactctctcaatttggagggataccacacattccgtggaggattctggaattattttagcttgggaatggatgcacaagtatcctatgaattccactctgaaaggaagagaaatccagagaagttcagacaccagctaagaaatcagggtacatatgctaagcttggatttaagcattccctaaaccatctttcatcgaggaacatttctcaacttgcaaaggtgaagatcatgaaaagacctggttcccagtgggaagagctaaagattcctcgcagcattcaatcagttatctgcctgaacctgccaagcttctctggaggattgaatccatggggaacacctggcacaaggaaagcacaagacagagacctgactgcaccttacgttgacgatgggcttatcgaggttgtcggcttccgtgatgcctggcatgggctcatcttgctggctcctaatggccatggaactcgtctagcgcaggcccaccgaatccgtttcgagttccacaagggagcagccgagcacacgttcatgaggatcgacggggagccatggaagcagcctctccccaaggaggacgacaccgtggtggtggagatctccaacctccgtcaggtggccatgctggccaacgacccgtgcaggtccaagagcgtgaacgagccgtcctccccgtcgtgccacggccatgaggacgacgacagcaacagcctggaggacgaggacgaggacgagtgggaggacgggaggaagaagttcggtgcggcggccaccttcaagatccccgacgaggtggacatcgctcatctcagttagaacctagaaaccccgccggctgcttctgcgtcggttggtggtgctgactgctgagtctgtgcatttcagagtgtttgctgcttgctacagcctacagtgctactgctccctttttttttgttgttttttttttggttgcctccacgagctcagatttcagaagctaaccactgctgttggtgaaactgctcgttatgatcccccattgttctgtaaattttcaagttttagcagccatgtgtatttcactggctgataatttttttgtgtgctacgtaatttgaaacgtggaaacgacttgtaccaaaggtctgataccgtgtactatggagtatgtaggagagtagaaagcaacagattttg

SEQ ID NO: 22812 - DNA, 900 bp, Zea Mays
gcagatgcccgctagtccctcgctttctctcttccacccgctcctcacgccgccacagcgccactgctccttcggcctagttgaggagagatacatccatcctggcctggattggctggtgctggtccttctgctgaatggcagaatttgttctatggactttcacagcaaggctaccaactatctcgtgacagctagcgatgatgaatcaatccgtttatacgatacccaagatgcagtggcttactgcgcgcgcaaaggaggcctacagtttcgtacgacgcccagggcatggtatttgctgtcgcctatggtggccgcataaagatgtttgatattcggaaattcggaatgcccatgtcgtacagttcagcggtgatggcaggcggattctgttaaccactaaagctgggcgtgttcatgtgctagattcttttgaaggcaacagcattgcatcgtttcgcgcgaagccaatattaaccaattcgacactggaggcatcgttctgtcccgagggaaaccatatcgtatctggctccggtgatggtagtgtctatgcttggaacgttgagagcggaaaggttgcatgctgggaaagcacagatgtgaaaccgccgcgggtaaggtggtctccaggatccttgatgttcgtgacaggaacgtcggagctgtcctgctgggtgccggatttgtccaagctggagtccttcaccatcagccacaccaacaccaggtccagctcgtccctgtaggcttggaccgatttgcatgccgtgtggccggttgacgcgaaggaggaacaagaaagcatagcggagcatcttgtaccaattgagtttgtgatctgttcctgatggcccggtaagctactattgcaacgattgtggtctgcggcaacgg

SEQ ID NO: 22813 - DNA, 3110 bp, Zea Mays
cgacacgctgcgagaggggtaaagaacttagaagggcaggcaggagaagcgacacaggaaactgacgtcgccttcggcggcctgctacttaaataaatcccctcgcctcgcctccggctgcctcttccctttttccttccgcgcaaatcactcaggtgccagttgcgcggcggagatcgcgacgaattccggacggcagggaggtggtcgggggaactgggaagtgcatgtgagatccgatggcggcggctgcctgcgccggtgcggaagcaggacgcggatgcggagggaaggacgcgctgttcgtcgagctgtggaaggcctgcgcggggccgctgtcctgcgtgccgccgcttggggagaaggtctactacctcccgcagggccacatcgagcaggtggaggcatcgacgaaccagcttgccgagcagcagggcacgcccctctacaacctgccatggaagattccctgcaagctcatgaacatcgaactgaaggttgagccggatactgatgaggtgtacgcccagctcaccctgctccctgataagaagcaagatgagaatacatctacaacagtggaggaagaggaggtggtggtgcctcctgcgctaccagccacaaatgagggtcctcacatccattccttctgcaagacattgactgcctcagacacaagcacacatggtggtttctcagtgttgcgccggcatgcagatgagtgcctcccaccattggatatgagtcaacatcccccaaatcaagaattggtggccaaggacctgcatggggccgagtggcggttccgtcacatctttcgaggtcagccacggagacatctcctgcaaagtggttggagtgtttttgtgagcgccaagcgtcttgtcgcgggggatgccttcatatttctcaggactagtccagctgaatttgtggtttcgcgagataggtactatgaatcactgaaacgaaattattcaatagggatgagatttaagatgagatttgaaggtgaagaggcagcagagcaaagattcactggcacaatagttggaataggtgcttctgatccatctggttgggctgactcaaaatggcgttcccttaaggtgagatgggatgaaccttcttctatttctcgtcctgaaagagtttctccttggcaaatagaaccttctgttagcccatgtcatgtgaaccctcttccagttagattcaagaggtctcgatcaagcgttaatgctttgccatctgacgtgtctactgtaaccagagaagtcacttctaaagtcatggcagactcgcagcaaaatagtctcacaagagccttgcacaatcaaggaaggacacaattgacagttcgataccatgataacagtgatgtgaagactactcaggatcttaccgtgtggtcttcaggaactgagcaacagagaaacaatattgctgcccagacaaagctatgtctggagggttggacgccaactagaagtcctgaaggctacaatcagatattctcggcatttaaaccactgaaagatatacataacccacttggtccttttcctagtcaaatatctgggactcactcaaatagctgggacacagctgatgctcgttatccagtccaacaagctaattacagcatgttacctggcacatggtctttgaggcctcataacagtggttttaggatgaatcaacaaaattatctagtgatgcctgaaggtgcaaattttacggggaaatcagctttcacttcacttcaggaccatggcactgataaatgctccacaggctgctttggtcatattgagtcaagttcccacacagaccatgcatcctcaagtttgatcaggccccagcctttggtccttggaaatggtgttcagaaaagcaaaggcacttcatttaaattatttgggattccccttggcagcccagaaaaatctgaacctctggtatccccaccaagtgtcgcatatgacgggaaacttcaaacttctccatcagaaaaagggaatcagctagacgtagttgaagtggataattgttctcatccttctaagactgtgaagccacttgatggtcctcagtcagattctattacagagaataatcagccttctccagaagctacccttaatatccagaacaaagtgcaaagtagttccaccagaagctgcaagaaggttcataagcaaggtagtgccctcggcaggtcgattgatctaacaaagttcgcttgctatgatgagctgattgctgaactggatcagatgtttgacttcgatggtgagctgaagagtccatgcaaaagttggttagttgtctacactgacaatgaaggcgatataatgctggttggtgatgacccctggaatgaattctgcgatatggtccacaagatcttcatctacacgagagaggaagtcgaaaggatgaacccaggtgccctgaactcaaggtctgaagatagtctatctgactcgctgggaagaggggtagcttccagagatccccgaggaggcgggtctacttcggctctcgattccgagaactgctagtttgttcagtcagtgaggcctttggaagtgaagcagacaaaaggcgtgaatcttgcggtgtagagtgtagttggtacattgtgtgtatgcctccgggtaagccctgcggtacccagtttgtgtcctggcgccagtttaccatttaagctaagtttttgggtgtgccctgtgctggggtctgggctctagttattgtagcagagcaggcaatgcatgcaagaaactgatgatgcgcctgtttggccctctttcccttcccaagccatgtaaatagccttggctctgaagcgtagtattgtattgtcgacagccgtacttgagatagtactccaagaggcgcgcttgctcctgtcagttgggtgtgcgtatgtagatgtgcgtgtgaagccatgcaagcaagggtttgtggggttgatggcttttcatggtagcggatctgctttcatggtactgacgtgcaggtggcaggctggtgttggctgctatgttttgctgcacgatattggcagaaaacagtagtactaaggggtgtttggtttctag

SEQ ID NO: 22814 - DNA, 1105 bp, Zea Mays
ctttggtatagttgagttaaatttgttatacatattggccatgactaaggggaatggtacgcgctgtcagccggcgggagcttcacgcctcatgtcatcatcgtgggtactggggagaagggtccacgctcggtctgcatcctctctgccaacgggtcaatctctaatgtaacactgaggcagccggatgcatctgggagcaccttcacctacgagggccgtttcgagatcctgcagctgatgggctccttcacaatggccgaggaaggccggaggagaaccggcgggctgagcgtctctcttgctggccctgacggccgcgtagtcggcggcgtagtggctgggatgctgcgtgctgcaagtcctatacaggtgatcgtcggaagcttcctgcccaacagcctgaagcagcaccagaggaggaggatgagcatgcagcagccttcccccgttccggcgttaccagcacccgtggcacccccgccgccggtgcttaccgcggccaccccgatctcgcaggcaggtcccgggaacgggttccacgcaccgccgccgccgcactccgcagcacctccccagccccacgccaacgccatgaacctgaacgcgacgacgacgggcttcaccatggtcggctggcctgcaagctcgccgcagcccatggcgtacagggcttcacctgacatcaacgtcagcttgactccccaggagtaggatcgctgggctcgtcttcttcctttttctttcttttttttttctttccctgggctgacacgttttgggtgggagagaggaaacagagcgtggctgatgctctgaatgagattatggactaatctggtgttaattttagggtagggcgtgccaacttgtttgggttgctgctttcggccgtcatggctgtggatgttgatttagttctagttctagtcagtcagtcctattcagtttctgtctttctgcgctgcagctatttagcatgtcctgttattggtgaatcttttctgatgatagagggaggaatcatcttctgatgacagaggaatcagttctgttatttgtgaaaccgaagaagacgtgcgtcgtgaaaatgttgatttctgct

SEQ ID NO: 22815 - DNA, 1742 bp, Zea Mays
agttccttccaagaagagctcaaaaagctttgtctgctcaacctggacgcctcggcctcggcgatccaccggcacggcaccgaaacacctcgtctcgatttcgaaccaaaccctccagtgtccagccccgtctcgttcgccgcggcaggagcgagcgagcgaccgagcgagcagccatggcgccggtcgatccccactcctacaccgacggcgcgcacccggtggtctcgcgcgcggcgctcgccttctacctcgacttcgccgcctccaccatacacgcctccgcggtgctcaccctctccgcgccgcactccggcgacctcctcctcgacacccgcgctctcgccgtccactccgcctccaccgacgccgacccgccggagcccatccccttctccctcgccgcggcgcccgacccggtcctcggcacggcgctgaccctcgccctgccccgcgacaccgcctccttccggctcaccttctcaacctcccccgccgcctccgcgctgcagtggctggccccgccgcagaccgcctccgcgcagcccttcgtcttctcgcagtgccagtccatccacgcccgctccgtcttcccctgccacgacacccccgccgcgcgcatcaccttctcgctcctcctcaacgtccccgagcagctctccgccgtcgccgccgcgcgccacgtcgcgcgccgggacccgctgccctccgaccaccgcggggcgtgcgacgacgggctctggtgcgcgcccggccgcatcgtcgaggagttccagatggaccagtccgtgccgccctacctcttcgcgttcgccgccggcagcatcgggttcagggacctcggcccgaggacgcgggtgtacgcggagggaggggacacggtgttggacgaggcggccagggagttcgcgggggtggaggagatggtcaaggttggggaggggctctttgggccgtatgaatgggagaggttcgatctgctcgtgctgccaccgagcttcccctatggaggtatggagaaccccaggatggtgttcctcactcccacggtcatcaaaggggatgctgcaggggctcaggttgtggcccatgagctcgcacatagctggactggcaatctgattactaacaaaaccaatgaagatttctggctaaacgagggattcacaacatatgctgagaggaggattgttgaggttgtgcaaggggaggagcgggcagccttaaacatggggattggatggaggggattgaacaggatgatggagaggtttaaggataacatggagttcaccaagttgaagccgaagatggcagggattgaccctgatgatgtttactctgaagtgccctatgagaaaggtttccagttcctttggagaattgagcgtgagattggcaggcctgctttcgacgagtttttaaagaagtacattgcaaccttcaagttccaatcgatagatacagagacatttcttgaattcctcaaaaccaatgtacctgggatagaaaacaaaattgaccttcacctgtgggttgaggggactggtatccctcctgatgccatggaaccagattcagctacttacaaaaagatctgctccttagctgcagaattcaaatctggaaaacttccaagtgaagatgaggtagcaaagtggagtgggcaagaatgggaactttacttagaaaatctaccagcagatgttgaagcctcacagttagagcaagcccagcccagg

SEQ ID NO: 22816 - DNA, 1621 bp, Zea Mays
ttgatcgcgtaagcttggcgaaacctttttattggcaaatcagagatgaacatgggctgttttatgcactggatcttggagggaccaacttccgtgtgctgcgagtccagctaggaggaaaggagaaacgtgttgtcaaacaacagtatgaggaggtttccattccaccacatttgatggtcgggacttccatggaactatttgatttcattgctgctgcattggctaaatttgtcggtactgaaggtgaagatttccaactcccagagggtaggcagagagaacttggtttcactttttccttcccggtgaaccaaacatcaatatcatcaggaacactcatcaagtggacaaagggcttttccatcaatggcacggttggtgaagatgttgtttctgagttgagcagggccatggagaggcagggactagatatgaaagctacggcattagtcaatgatacagtgggcacattggctggtgggagatatatggataccgatgtagttgcagctgtaatattgggcactggtacaaatgcagcatatgtggagcatgcaaatgcaattcctaaatggactgggttactgcctaaatctggaaagatggtaattaatacagagtgggggagcttcaaatccaacaaacttcctctttcagaatatgacaaagccatggactttgaaagtttgaaccctggagagcagatatacgagaaaatgatttctggtatgtatctcggagagattgttcgaagaattttactgaagttggcacatgaagcttctctatttggggatgttgttccacctaagctggagctgccatttatattgaggacgccagatatgtcagccatgcatcatgactcctcacatgacctcaaaactcttggagctaaactgaaggacatagtcggggtcgcggacacttccctggaagtaaggtacatcactcgtcacatctgtgaccttgtcgcagagcgtgcagcacgcctggccgccgcaggcgtgtacagcatcctgaagaagataggccgggacaaagtaccaagcggtggcggtaaaatgccgaggaccgtagttgccttggacggtgggctctacgaacactacaagaagttcagcagttgcgtagaagcgactctcacagacttgctcggcgaggaggcttcttcctccgtggtcgccaagctggccaacgacggctctggcattggagctgcgcttctcgcagcctcacactcccagtatcagtatggcgcgagtgactagtagtcctgaaatgggcgcggatcgagattttgagtgtagctctcatttatcttttcttttttcccttttcaaaacatctttttggggatttttttcggcttccttttgttggctattccgtggatgcacttacggctctgcattgggatgtagctagtatagagccaatgagtttggaggttatctaatggcacaaggcaggagcatggaaatggaagcagagcaatgacattcatgctctgcccattcttttttccccttgtatggtgttgtaaaccaataaaaaaatgttaacccttttttttgtgtgtgttggcaataaagagaatacgataatttgaccatgt

SEQ ID NO: 22817 - DNA, 2549 bp, Zea Mays
agttcgggatttcttgcgcgttagtcccttcggaagtcaggatcgtgagaaggaggctcgggaaatggggtgggcgcacccggcggtgaccatggaggaggtgctccgtctggtgcggggtttcgtcgacgtccttgtccttgccggcggccgcacctcgtccggcgccgctgctacttggagcgccgacgagatcaagaaggccctccggtgggcgctcttcttcgaggagattttcaaggacctgctcgactcgggccagtacgaggattctgcaagagaactcgatgcggcactccttgagctcacttcaagtcccgagttccctaagggtcttgctgctgtacgttcagatttgctatccatggcaagggtgttggttatgcgacattttctgaaaccaaacacaatgagcgtggaaaacttttgtgctcttcttgaagcggttgctggcatggatattgatggcatttgtgctagtggtgcgcacaacgcatgccaagagtatgctgagtcaatattgaatatgaatacatcatgttttgcgcagaccatgaatgcttgtgatggtggacttcccactagttcttatgatctgcgggctgaatccacgggccattcatggattatagttaaagaatttcagaagacgctggattcggcatcgtgtggacggttggctgatagaggactggaaacgtttttgaacagtgtgaaaaggaacatcttggaaaatggtagtaataagccttgtgtcccagcaattccgaaaacatcgcaaatgatcgacgagtttctaatgtggaagcaatggagagcaaagtgtttgtcatatttgcttgatcaacggaccattcgagttctgtctggagctagtttgatttttaaagctcctaaagagcagtggatgaaagtgtttgagcccttaaaaagtatagaagaaacatgtcatagtggtcttgttgaaaccatggagctatgcttgctgggttcgattacaaggcgatggaacacattgatagagggcttcatgtcacacactttctgttccattcctatatccaagaagcacgctgatctgcaccagtgccttcacagaacctttcaggacaaattccaagacgaatatcttaatttggaggtttttcatattttggtcttatatcatgttcatagtttgcgaagtattctgtacgttagaaactttaactcggtgtgaaatttttgaaatgtggggattgtacccctctcaaccaagtaggtatccgtacatcttaactcttaagaataaattcaggaaggttttcacctaaatactgaacactgattgtgtcttcgtgcaaactatcaatggtgtttctgtgaatcctcaatgtacttatgtaactaaaatatatcgagggcctacgatcaaacttctctgccagaacttgtaatgggctgtataccaaatcaggtcttcggtgcacttgctgtaactgtgtttacacatgtgagtatgtgacaggaaactgacacaaaactattttttgttgaaagctgctaatgctcagtccttagtctacattcaaaaatggtaaataacattattaaaaccaattacttgtcatactaccttggtctagtttgatttacaagtgatgctcgaccaatttaaacaatacttgagtcagtgaactgtaagttccaaagaaaatttcgtagattaaaggtccaacatagtgtctactgtctattttttatcagtaagcggtccaaaacctaccaggattcatgggccagtggaaggctcctacttgattagatatattataaacgaattaatgatttcagaaaataaatattagcatagaaaggttaggaacttgcatgatagttctaagtagtaatgattagcatgcctttcagagacctctcaggaaataaattgcataacggacctgtcacaactcacaataacaattgttagcaagacggcatatattttagaatcttggtatctacgatgtttcgttttctcacacctcacgaaataatgtatcttcatctaaagcttcgaactacaggaaaaggatattcttgactatgcaagacagacattagagaggaaaccatccgtactatggcttctacctccagttcttaccgccgcagcaattccaccgcagtcaagcttgttccagatatacctagctcaaatcgataagcaaattcatgaagctgctcctgcagatcgaaagtgtagttgcagaggagatgaaatagatcggcatgttaactgtgagattactgaaaggattcaatgtctatatgcattccttattcagcaactttcatataacggttccacaagattacactgaatgttagcagtgtgcactgtatgacgtttcacttttaattgagtgactggccgactatgcatggcttccttggccatattacttttcatttaacgtttgtcactggtggggggtgcgtacatctttgactttgtactcttcttatttaatgaaatgaaatggcactaactctggtgcatccttcga

SEQ ID NO: 22818 - DNA, 2662 bp, Zea Mays
tttatctcttactccgtcccactcattcatagctagtttgcagaggaactatgcagaggctctaagcaggaacgatatcaaggcaatcgtcctcactggttccaaaggaaggttttgtggtggattcgatatagccgcgtttgaaaataagccaaaaaatgagaagcctggatccatgtctattgattttttgactgacatagtggaagatgctcacaaaccgtcagtggctgctatagatggcattgctctaggtggtggattggaggttgcgatggtttgccatgctcgcatttcaacaccgtcagctcagttaggactacctgaacttcaacttggaatcattcctggaatgggagggacacaacgtcttccccgtcttgttggtctgccaaaagcccttgagatgatgttgacatcaaagactataaaaggcaagatggcacatgaactcggtttagttgatgctgttacctcagctaataaattggtcaacactgcctgttcctgggctctggaaatttttgaaaagaagaaaccatggttcaaaagtctccacagaactgatagacttccagatcttgaggaagtgaaggatattctgaaatttgcaagagttcaagctgaaatgaaggctgctaatgttcagcatccaatagtttgcattgatgttattaaagaaggaataatctctggccctcgtgcaggcctcatgaagattccaaatattaccaacataggtttgacagcacggaaaattaaaaaggcagctatcgttgggggtggtctaatgggatccggaattgcaacaatactgatattgaacaactttaatgttgtcttgaaagaagtaaatgaacagttcttatctgctggcattaacagaattaaagtgaatttgcaaagtcttgtcagaaagggtcaacttactgaagaagattatgaaaagaagctttctctgctatgtggtgctcttgactatgaacagttcagagatacagatgtagtaattgaggcggtaattgaggatatggtgctgaagcagcaaatattttctgaccttgagaagtattgccatcataattgcatatttgcaacaaacacttcaacaatagacctgaacataattggtcagaagacagcttctcaggaccgcattgttggtgcacacttctttagtccagctcatgtcatgtcactgttggaaatagtttgtactcatcatacttcctctcaagttattgtggacctgattgatttggcaaagaaaatacagaaaacaccaatagttgttggcaactgcacaggtttcgctgtcaaccggatgttctttccttacgctcaggcagcttcttttcttgttgattatggtctggatgtgtatcacatagatcatgtgatcacacaatttggaatgccaatggggcccttccgattagccgatcttgttggttttggtgttgctattgctacaagaaagcaatattaccaaagttatcctgagcgaagttacaaatcaatgcttcttcagattcttgttgaggataataggacaggtgaatcttcttgtaagggcttctatgtatatgatgataaacgcaaagcctctcgagatcctgattttgggaagtacattgaaaaatcaaggaacatggcaggtgttatgcaagatcctaagctgatgaaactaacagataatgacatcgtggagatgatcttctttcctgtggtgaatgaagcctgccgagtgcttgatgagggaattgctctcaaagcatctgaccttgatgtagcttccattatggggatgggtttcccttcttacaggggtggagtaatgttttgggctgactcgcttggtgcgaaatatgtgtatgacaaactggatgcatggtcgaaggattatggggagttcttcagaccctgtgaatatttagctgtgagagctcgtcagggtgcatccctggctgccaaggttgatggtgtcaaatcgcgactctagggttttgttgttcatttgtccggacatgcttatacggactttggcctcaatgacattgagatgttgtgaaaacccttgagcaccaactgttacaatcatgcagttgcaaaacctgcacaagtgaattatacggaggcctagcgaagtggaaattgcatgtgccttcgtgggattgctgaggatctgcagcaggaatttctctgaaatattatgtgcagttttctgaagtgatgctgacaactttgcatagaatagttacagggagtttctcctagacgttttgcgggaatatactttgttgcagtggattcttatttttttaaaaataaaactcgtgaaatccatggtcgtatgtacgatactacctccgttctttttgaatatttgtcattcgctagttaattttttaactaaaacacgataaataaaaaataatggagggaatacaacatttcagttcgatcatctgctcaaaaagtacacgttcatatcgatggaattgccaaaatgatgtaccgagctgcttatgatttccacgcattttaatcgtactgctttgtttaaaactgtagcatggtctcatgtctcatggcctgtcttttaagacagtgtttggttgagagttaagagcctgtttagggagttaagagcctgtttagg

SEQ ID NO: 22819 - DNA, 1756 bp, Zea Mays
ttttgggttacgtgaagcttcagttctcctcccagacgggcccaaatctatcgcaaacaggcctcgtctcgtcctcgtcctcgtccgccgccaaatcgaacccccccaaaccctagctacccggcgcaacgtccccttcccgcctctccgcggcgctgcgtgacacccggcctccgctacgaaacaccggggcgggtgtagcctagcgggcgggccatggcgtcaacggtgctggaggcgacgcgggcggcccatgaggatctggagaggctggagcggctcgcggtgagcgagctgcaacgggagcccgctaacccgcgtgaccgcctctttcagtcccaccgcgtccgccacatgctcgacctcgtcgtctccacctccggcaagctcgtggaaatttacgaggacaaggacaatgctaggaaggatgagatcaacactcatcttactgcacccacgcaaagtggactgtttagcaagtactatgaaaggctcaaagagatccgtgaatatcatcggcggaacccatctgcccgctttgttagtacaactgatgactatgaagagcttctaaaggaggaaccagttattgaattcactggcgaggaaacttttggccgttaccttgacttgcatgagctttataatgagttcataaattccaagttcggaacactgatggaatattcagcttatgttggctgtttctcccagacggacaagatctcacatagtcataaagctaccagaaaatacagagaatacttggaacatattttggaatatctgacatcatttctgtatcgcacagagccattgcaagacattgataagatttttttaaagctggagagtgaattcgaggaacaatgggccaatgaaggaatacttggatgggggaataaagggacagaaaaagagtctgaaatagatctcgattactacagcacagttgaagaacttgttgagcttggcccagaaaaattaaaacaggctttagctgctcgaggtttgaagagtggcggtactgttcaacagcgtgcagatcgtcttttcttgttgaaggttacaccgttggaacaactagataggaagcattttgccaaagttccacatactaaagatggctcaaacacagctcctaatggtaatgctttcaaggaggatatgaagaaagaaattgcattgatggaagtgaagatgaaacgtctttgtgagctgctagatgaggcctttgtaaggacaaaggaaaatgcggagaagaagcttactttgacatatgaagagatggaagcagaacgggaagaggaggaggtacaagttgacactgagagtgatgacgaagagcaacaaatctacaatcctctcaagttgccgatgggttgggatggcaaacctatcccctactggctgtacaagctacatggccttgggcaggaattcaagtgtgagatatgtggaaaccatagctattgggggcgaagggcttatgagcgtcatttcaaggaatggcgtcatcagcatgggatgcgatgccttggcattcccaatactaagaatttcaatgaaattacatccatcgagaaaaaacgaccggaaaagacacttgttttctctgtgggccatgactccgtcacgtgaagaatctgaaccgtggtgagatttggtgacggggacgcatggcgccaagccgacctcgcgactgccggcaggtttggcggatttgtctgcacaaaagcgtcgctgcttcctatgt

SEQ ID NO: 22820 - DNA, 3159 bp, Zea Mays
cgccgcccagttctcccacttccggggccgccaaaattccctccccaattctctcgtgctttctctcgaccgccgccaccgcctcctctcctccgccaccgccaccgccaccgacgcctccaaaaccctacaccccagcagagtcagcaagcgttgtagcaggctgcggccgctgcctcgctgcgatgcaccgcgccttcgaggagatctccgacgaggagtggtctaatcacaccttcgagccctcgcgcgtcctcaagcgccctaatcagcggccctcgcagcctccgccgtcgatcgattcattcatctacaaccccaaggcttgctccgccgccggcaccagcactgcaactgtcgtcctctcggacgacgacagcgacttcgacctaggtgcggacgggggttcccgccgcgctgcgaagagccaacgcgtcctcaagcgcccgcataacggggccccatcgcggccttctctgccagttaaatcgtcccgccgcaatccccaaccatccaatgccgctgccgcctttgggttctccgatagtgaggacgatgacttcgatcttcctacgtcgcctttgaggacgtcaagccttcgccgcaaaggaaagaaccaacgccccctcaaggcccctcagctcaaacctcacttgcgggctcctccgccacccaactcttccagccataatccgaaacggtccaaatttgcctccgatgtgaagctttccaacagtgaggacgacgatttcgacctcacaaaaacgttaagcctcaacagcagcacaaataggcaacacatccagaagcgtccacagcacaagccccgtttgcagcatcgtcagtcctttggctcatcttgcggcaatcagaagcattccaaggctgttgccaccacacggctatctgacagtgatgatgatgacttcaacatcacggacaatgactttgaccttccagcttcgcattcaaggatatcacgcccacgccgcactactagttgccgccggttgacgagttttgctattgacatctctgaggaagacgaagaagaccttgctgatgatgacttcgactaccaagacccaaggcctccccagcaacgctcctctggccgccgctttgtggtcggggacgatgatgacagtgatgtgcctgtagctctggaggaggaggatggggtgaattggtcggagctggagaaggaggacgtagatgaggactacaatggggtgagaagtgtacatgtggaggagcccgagggagatgtagtgggaatggcattgcacaaatgttcacgcatctcgtcagatctgcgcaaagagctttttggttcatcagcgcagaattgtgaaagctactgtgagatagatgcttccacttgtggtattgttactcaggaagacgtaaatgctgcatgcacacgtgagaagtctgggtttgagcctgtgttgaagccttatcagcttgtgggagtcaatttccttctcctactgcatcggaaaagcattggtggagcaattttggctgatgaaatgggtctagggaagacagtgcaggctgtcacttatcttaatctattacagcatctatataatgacccaggtccacatctgatagtttgcccagcttccgtgttggagaattgggaaagagaactcaggaaatggtgcccttcgttttcgatcatcatgtttcatggagctgcaaggactacctactcaaaggaattaagctccttaggaaaggctggctgtccagctccatttaatgtcctccttgttggctactcactttttgaaaggcggagtgctcagcaaaaggatgatcgtagggccctcaaaagatggcgatggagctgtgttttgatggatgaagcacatgttttgaaagataagggtagcttccgatggagaaacctgatggctgttgcgcaacatgctcgccaaaggctaatgctgacaggaactcctctccaaaatgatttgcatgagctatggtcattgttggagttcatgatgcctgatatatttgctactggggatgttgatctgaagaagctgctgaatgcagaagatcgcgaactaatttcacagataaagtccattttagggccatttattcttagacgtttgaagtcagatgtaatgcagcagcttgttcctaaaatccaacatgttaagtttgttgtcatgggcacagagcagtctgaagcttacaaaaatgccataaatgagtaccgtgctgcttgccaggctcgtagtgccaagtcttcagatggcatttccaataatgttgctggattgattccaaagcgacaaatatcaaactattttacacagtttcgtaagattgcgaatcaccctttgcttataaggtgtatttatggtgacaaagatgttgatcgaattgcacggttgctgtaccctaaaggtgcatttggcttcgaatgctccttggagagagcaatacaagagctaaagaactacagtgatttcaatatccaccaactattattgtcatatggtgatgtgggcacaaagggcgctctaaaggatgagcatgtttttgcatcggcaaaatgtcaggccttaggggagcttttaccttctctggcaaatgatggtcacagagtactcatatttagtcagtggaccacaatgcttgacatccttgaatgggcattggaaattataggagttacatatagacgccttgatggagggaccgctgtgacagaaaggcagactatagtggacacgttcaacaacgatctttctatatttgcatgtttactttctacaagagctggaggccagggtctgaaccttgtaggagctgacacagtcattatacatgatatggattttaacccccagatggatcggcaagctgaggaccgttgccatcgcattggacaacagaaacctgtcactatctataggctagtgacaaaggattcagttgatgaaaacatctatgagattgcaaggcggaagctagtactagacgctgcaattcttcattctggagcagagttggacaatagtaccgatgtaccagagaagacaatgggggagattttggcatctcttctcctggtctgaagttctaaccctggagtttcttgaagttgggtggtgattcctcacttcatga

SEQ ID NO: 22821 - DNA, 1859 bp, Zea Mays
gtgaatgttggtctgatgccgacaccgagaaggccagcgaatttctgcgattaagatgcaaattcgaacaatatccatttgcagctgaatgcaaatatgcacaatctcacatataactgcatgaagatcccgctaggaggtttcccttcacaatgctagtactgcagaaggcagtaagaatggtacgggaacttcctgatgttatgagaattgcttatgcatttgtgctagtcatgctttgttggatggcattatggtcctttggaatttctggcattgttgcctttggcataccaaatggtgggcaatggtggcttcttttgattttttcagtcagtttattttggactggagctgttcttagcaatacagtccatgtcattgtctcagggatggttttcctcgttctcattcatggtggtccagctgctgcaacaatgcccccaaaacctcttctgaaatctcttcagtatgctgtgacaacttcatttggaagcatttgctatggatcgctttttaccgctgctattaggactttgcgatgggagattcgtggaattcgttctaaaattggcagcaatgagtgtttgctatgttgtattgattttttgtttcatattgtggagacccttgttcgcttcttcaacaaatatgcatatgtacagatagcagttaatggacagagtttcaatcgctcagctagggatgcttgggagctgtttcaatccacaggcatcgaatcacttgttgcttatgactgttcaggtgctatccttctaatgagcaccattttaggtggattgattactggaacctgcatgggcgtttggacatatttcaaacaaagtgataaagctgttatggttggttcaacatccatgctgatgggtatgatactggttggactaactgttgtggttgtggaaagtgctgttacatcaatatacatatgctatgccgaggatccccttttgattcagagatgggatcccgaattttttgaacaaatgtcagaagcgctacaccagcggctgcagtaccgaagcgcgcgagctcgtcaaatattgaatgggcggcttgatcatttgccacatacgtccagtatttgaatgaattgcgtgccagatattgattatctctgtgaatccattgatacgtgggcagacatttacagaagatttggatctccctgccattgaaatatatagaccaaggaagatattcgaagccattgacgttccgagaactggagtgccccagcaatcttgtacgccttcaagaacaaaatgttttcaaatccaaatgaagccgtaatgtggatgctcatgcttctttggtactgcaccatcgttttttttatttgtgtaaggcttttctggtaaggtagatactattaaatccatttcgagatttgtgatgcagaatgtgtccggtttcaacatcagtgcgggttagtgtggcaatgtgataggtttttgtcttccttttgtagccttagcgctacaatacgataaactatggagaggaacagcatcatggtcgctacttggccggttgtacataacagtgttgcttagtgctcatatactaaggccctgtttcaatctcgcgagataaactttagcagcttttttttagctacttttagccgtttataatctaaacaggagagctaatggtggtaattgaagctaaactttagcacttcaattcatatagctaaagtttagcaggaagctaaagtttatcccgtgagattgaaacggggcctaactaggtggtctgactgattaaatctttcatttactccatgtaccacagaaagaatgtatttgacttttctgagatcaagtttgacc

SEQ ID NO: 22822 - DNA, 961 bp, Zea Mays
atcagatagcgcgctcccagtcccagtccatcatcggacacacctgctctcggctcgtggttcgcggcttcgcgcacgcgcagcaatggcgctccggccgcagctgcttcgcctcctcctcccatcgcctccccaccggaaccctccgcctccgccctcctccccgtccgtcgcacccattggccgccgcaccgccgcagcagccgtcctcctgctcgccgcgggcgtctccgccccgcccccgcgcgccgcccgcgccgagcccgacggcgaggacgtcgacgaggcccgcatcgtccgcctattccaggaggcgtcgccgtcggtcgtgttcatcaaggacctcgtcgtcgcggggccgcaggggcggagagttggtgaggatgaggacggggacgaggagggcggcggtgctaaggtggagggcacaggctcgggattcgtgtgggactccacgggccacattgtcacgaattaccacgtggttgcgaagttagctggagacggatctgcatctcatcgctgcaaggtgtttttggagggttctggtggcaaaagttactcaaaggaagcgaggctaatagggtgtgatccagcatatgatcttgcggttctgaagatagatgctgacagggaccagctgaggcctgctctgattggcacatcacggagtttgcgagttgggcaaagctgctttgccattgggaacccttatggatatgaacacactctaactactggggttattagtggattggggagggaaataccatctcccaatgggagagcgatccgtggggctatacagacagatactgctataaatgctggtaactcaggaggcccacttattgactcttatggccatgtaattggtgtcaatactgctacattcacacgtaaaggatctgggatctcgtccggggtgaacttcgccatccccatcgacacggtaccgaca

SEQ ID NO: 22823 - DNA, 2272 bp, Zea Mays
gccgcgggctcccgtctcccccctcctgccgcttttcgggatttcgtttcgtttcactcgagggcgaggctggatttgcgcgtcctgtaccgagcgttccatgtgacaggtcgctcgcttgcccccgccccgccgctccccctcctcgtctcgcaaagcaaccgcaacgcgccgagccggcagcggggtccccccaaaagacgaggcagcgagcaaggtaggcaggcaggcaggcagcgggctggcggaaaagactagtgcgcgctcgtgctcgtgctggtgctccccgaccagactagaccagcttgctagcgccagcaaggcgagcggcgatgctcgcacgatctactacagctgccgccgcggccgccgccgggatctgcctgtgattaaggatgtcggcgtcgcggagcgggaggcggcggaccggtagcgtggcgctcggagaccttctgcagcgggaggcgtcggcggagcgggccgcgttgggatgcggcgagcggccctcggtcgcggcggggcaggcctgccgggcgaagaagggtgaggacttcgcgctgctcaagcccgcctgcgagcgacgccccggcgcgccgtccacctccttctccgccttcgccctgttcgatgggcacaacgggagcgccgccgcggtgtacgccaaggagcacctcctcggcaacgtgctcagctgcgtcccgaccgatctggcctgggacgactggctcgccgcgctgccgagggccctcgtcgcggggttcgtcaagaccgacaaggatttccagactaaagctcattcctcggggacaaccgtgacgcttgccataattgatggctccgttgtaactgttgcatctgttggtgattcacgttgtgtccttgaagctgagggatccatctactatttgtcggctgaccatcgcttcgacgctaatgaagaggaggttggacgtgtaaccgaatgtggaggtgaagttggaagactaaatgtcgtcggtggtgctgagattggtccccttagatgttggccaggtggtttatgcctctcaagatcgattggtgatcaggatgtaggtgaatttattattccggttccttatgtgaagcaaattaagctgtctaatgctggaggccgtcttattatttcaagcgacggtgtttgggatgctttgactgcagaaatggcttttaaatgtgcacgagggcttcctcctgaggccgcagctgagcaaattgttaaattgaagcaaaaggattgagagatgatacaacttgcattgtcattgacataatatcaccagagaaaccaaaacgcactatacaatctcaaagaacgccaggaaaaggccttgtgcttctaaaaaatttctttttaaggaaaacaacatctgactcgttgtctctccctgataaggataattatcctgagccagatttagaggaggtctttgaggacggatgcccatccctttcaaggaggcttaattctgagtatcctgtccgagacatgttcaaactttttgcatgtgcaatttgtcaaattgacttggaatctggccaaggcatatccatacacgagggtttgtcaaggccagggaagctgcgtccctgggatggccctttcctttgtcacagctgccaggaaaagaaagaggcgatggaggggaagcgccattcacgagattcctcgtccagaaatagcgggtcaagtgaatcgtgactgaagccgagaatcatcttgaggcaaacgcctagcggtgtgacgagctaattatcgttgctgctgttatcttgcagcactttctcatggattaccattgaattgagacatgttggaagtcgccatgcctatatatatgttggagctgtacggtactggaccgtagagcaaatccaatcgcctctagataccacaccagcgtcttcggcagggcttgtgacagcagcttatgcagggaatgatgacaagaggttattattagtgaagaatgtcgacagtggccaacagtcatgtaaattattcgtcgtgtagaggtgcaagtgacaaatagccacggttttgtaattctcaactaggattaggtattgagacctgtaattcgtctgggcagacctcaaactgaaggtcaacaacgtagcctggccctattgtagaatgtatgttgccctacaatctaaatgattcaacgctgcaattaaatctaagatctttgcagaccaccataattctttttcggttactatactagtgtaatgtttgtccaatcatatt

SEQ ID NO: 22824 - DNA, 3860 bp, Zea Mays
caaagaagtccatatttaaaccttttggaggattatcagagcaaagtgaggttcgcttttctgctataagatgggcaacaacattgtacgatacacgacattgttcaagccggtacatttgcatgattggggcttcagatgttaaactggacataagggaaatggctctagctggtctaaatcttatgaatgatgggaggcaatcatctgcagggtctgttgatttcagctatcctgatataaaggagatgataaattatatctgttgtcagcgacctcagttgctgcattctgatgagcagacaaatggaaaattgcttttcccttcaaaaacatttgtttcaatgatcaagtttctgatgaagtgttttgagtctagtgataacttgaaacttttgcaagaagatccatctcattctgctgtagcaaaaatgtgtgtcatcttggaacatgccatgtcatatgaagggtctagtgaactgcatgcgctggccttgaagtcattggtggacctttcttctcgtgaaccaaagttggtgtcattgaggtatgcagaacgcataaattggctaagatctcttttgggtcatgttgattctgatgcccgtgaagctgtgtcacgcctgcttggtattgcttcttcagctctttcaacctcttctgcactaaatcttctgtctgagctcacttcaactctcagtcaaaaccgtccatcaagatttgaaaattaccatggtgttctttgtgcgatcgggtacctaacagctggtgctttgaagcaatcttgtataactgaggatatggtaaaaaatgtagttgatattcttgtaaaagtagttacttctgaaggttcggcattagcatctgttgcaatggaatctcttggtcacattggtctgcgttgtgcattgccttccatcaaccaaaactcttctacaggtacactattaagcgttctccgtgagaggctgactaagcttctttctgaaaatgatactaaagctcaacagaaaattcttgtatcattgggccacatatcttggaatgagatgtcctttcctcacctgaatgatgcgttagacttgatttttagtctttcacgttctaaggtagaagatgtactttttgctgcgggggaggctctatctttcatatggggagaagttcctgtgacagcagatgtgatattggagacgaactttgtttccctttcccaggccacaaactaccttactggtgatgcatctctagtctcgagtaactcctatgaaaaaagtggctgtgaagaagcacactcaattgcacgagaagaaattattaaaaagttgttcgaaacactaatttatagcagtagaaaagaagaacgctgtgcaggtactgtctggttggtgtcactgacgatgtactgtggccgacataaaaaaatcctagaactacttccacaaatccaggaagccctttcacatcttcttggtgatccaaatgagcttacacaagatttggcatctcaaggaatgagtattgtgtatgagcttggtgatgcatctatgaaagaagagctggttcatgctctagtgaacacactgactggtgctgcaagaaagaaaaaagccattaagttgatggaggattctgaggtctttcaagaaggcacaattggcaataatcctactggagggaaacttagcacgtacaaggagctgtgcagtcttgccaatgagatggggcaacctgacctgatatacaagttcatggatctagctaattatcaggctgctctcaattccaaaaggggtgctgcttttggattttccaagatagccaaacaagctggcgaggcacttcaaccttatctgaataccttaattcctaggcttgtccggtaccaacatgaccctgataaaaacatccaggcgtgttacggacgttttatgttattgggcctcccaaaggtttgtaaacatttgaggaatatatggacaaccaccttccgtgcgatggatgacataaaggaaactgtgcgaactgccggtgacagtttgtgccgagccgtaagctcattgacaattaggctctgtgatatatcactaacttctacttctgaggcaaacgaaacgatgaacattgtgctgccatacttgctttctgagggcatactcagtaaagtatcaagtgttcaaaaagctgctattagtttggtcatgaagcttgctaagggtgctggtcctgcccttcgtcctcatctgccagaacttgttagttgtatgcttgaatgtttgtcaagtctggaagatcaaaggttgaattatgttgagggaatgctggcatcaaaacagataagcttgaaactttgcgcatagctgttgctaaagattctccaatgtgggaaactcttgatatctgtataaaagttgttgacaagaattcacttgatctattggttcctcgcctggctcaaatgattagatcagctgttggcttaaatacaagggttggtgttgctagtttcataactctattggtgcagaaggtcatggttgacatcaaaccattcgcagcagtcttaatgaagttattgcatagtgcagttctggaggaaaggagttctgccgctaaaaaggccttcgcgtcctcttgtgctactgttttgaaatacgctagtcctccccaggctcagaagcttatcgaagatactacgtctctgcattcaggtgggaaaaacgatcagttgtctggtgcaattcttattaaagcctacttgagcaatgcatcggatattcttggtggatataatgcggtggttatccctgtaatttttgtgtcgagatttgatgatgataaagacaccagtgctttatatgaagaactttgggaggatattcctagtagtgaaagagtaaccctaacactatatttaccagaaattgtatctcttttatgtgatggcatgtcattgtcatcatgggctggtaaaagaaagtcagccaaggctataaagaagctatgtgatgttctaggagaacccctttcagcacactaccagaatattctcaaatcacttctgaaagaattgccaggtcgattttgggagggaaaagatgctattctggatgcattggcttcattgtgtgcttgctgtcatgttgctataactgcagaagactcctgcttgccaagtgttatactaaattgtgtttgtgctgcatgcagtaggaaatcaaaattgtaccgtgaagcagctttcttgtgtttacacaaagtgattacggcattcagagatccaggatttttcaatagtgtgtttccaatgctgttcgaggtttctaaccaatctgccatctcgaagacaaagggctctgctgaactagatgaaagtgaaggtgcttctgtttctctggataaagtgctcaattgtgcaacatcttgcatcagtgttgcttttccacaggatattatcaaccaaaagaagaatgttgtagaattaatattgaattctctcttgcctgaggagagttggcaaggagttgtgcctcaaatttgacaattctggtgatagtaacacatggcctcaagacacagcttacttggttgaggagctatttcatttggtatcaccgaaattagtagactccataagattagtaaagattgctcaggttcacgttgctgcatcggagtgccttcttgatttgagcaaactgtacagagacttcccgctgtcgaacagaacagaggccaagttcgaggatgaactcacagagctctgcgagtctgaaaaaagcgaacaagcaaaggcgattctgaaggaatgcctggccattcttaaagctctccctggagtaaccatgacgacggattag

SEQ ID NO: 22825 - DNA, 545 bp, Zea Mays
tcttgttggcgaaaggacttttggcaagttggcaaatacgtgacaccaaaccacaaggatatcaatgggaatggaatagaaccggattataatcatcttctcgatttcaatgaagctagagattacctttcacgatgcgaaattaaagaattaagctgacggacgtttgcggcagatttcaatgaagcattatattctgaaggttctctcacaggtcagacgacctaatatgatagaattgatatggaacaaagttgatgctccgcctgactactacacgaccctccatgtcgcgtgccgctgatacgataagcagcgtatcggcgagcgtcgatacaacctctacagcacagggcgagcatgttgctggtggcctctgcggcatggtgcaagaaatagagtacacgtggcgctcatctaagacatcgcaaatgactgattcctaatcgaacacaatatgtgaatagcttgtggtctgttcaaggcgcttagtcaaaatatacttctagctaaatcctttttaattgtcggtttcacgtcctgtc

SEQ ID NO: 22826 - DNA, 1757 bp, Zea Mays
cttcacctttgatcaggcacaaatcaggacatgtcctagatagttatcgtgttattacatgtttccgttgcaacgcacgggcatttacctagtctatcaattaaattccataaggcccatcaaggaaaaaccctagagacttcatcaccgcaggcagtcgcgcggcggctctcctccccgcaggcagtcgcgcggcggcctcatccccgctggcgagcctccactcccctccgccggagtcagggttctctcaattgcgaatgctcactcttgagtaaagggataggctaaagagcagctccatccagttcgacgaccatagtttttgcgagtgggtgcacaacctcaaattagcaagtacatgcctacatcgtcgacaactaaaggcaattactgagggagctcggtggggaagacctaaaggtgaagacgcggaaaaactcagggagaagctgaggcaggagtgcctgtggaaggggacggaactggcacatggggtggctgacgccctcttcgctgtatcacccaccgaggacctcgacggccctattgtacacctcccaccgcccgctgttcgactcccgcgcgagaagcatcttggtgctgggacctcactgccaggattagtagctgcaaaggttggggcagatgtaacactaacagacatcgcgcagacattattgtttctttaattgcaggccactggtgctgtactacgtggtcctgacgttgcgggacagcgtgcacaaggtcttctacgccgtcgtcgaggccgctgcagttcgcgcagacaacagccatcttggagatacttgtgttgccaccttatcagggtgaaggctatggtcttggtcttcttgaagcaatcaattatattgcacagtctaagaacatttacgatgttacaatagaaagcccttctgattccttgcagtatgtgagatcatccattgactgcctctgtttgctcatgtttgatccgatcaaacctgcactcggtgctattgtctcgtctctgaaggagaccaacctgtcaaaaagggcccaaagtttgagaatggttccaccagctgacctgatggagactatatgtcagaagctgaagataaagaagaaacagttccttcggtgctgggaaattctgatcttcctaagcctcgactctcaggatcataagagcgtggacaactttagggcctgcatatatgacttcatgaagggggagatccttggcagtgcctctagaactaacaggaagcgtctgttgtagatgccaaccagtttcaataaggaggcatcttttgctgtgtattggacacatgagattggggatgaggatgaacaaactgttgagcagcagccagaggatctgaggacgcaggagcaacagctcaatgagctcgtggacatccaaatcgaggatattgctggggtcgccaagaacgtcacttcacgtggcaaggataagatggcagagctggcggttcaatgaatttgggtgaggttcctacttcaaacgacgttaaaatgttgtcgtagcttatctggtgaggtctcttttacgggttggcttcttggtagaaagggaatgtcacagcataggcactgagtagattgtcacggcagattattatgtacttcaattctggaatatttgatgggaatgctattttagattgcttggtaagtgggaaccgcctcaaatcacagaagtagaagcagcttccgattcagccggaaccatttctccaaaaatg

SEQ ID NO: 22827 - DNA, 3278 bp, Zea Mays
gtggaaataggccagtggcggcagcttcttgccctcttcctccattgacttgccgatgcagatcgaggggcgaggctgccgtcgtcgtcccgggctctctgtgcgcgtacgcggaagagtgaggaagctctagtccactcatacagcctttacggttcaggcaagcaaccacccatagcattcctatcactgtgcttggttgcgcatggattaccaaggggacaatcttagagatttctttcaaactaatgggcgtaaggtgcttcagagagcggaaaacaactatagcttgaaatattttacagaaaatgagatacgaaacataactgatgggtataagtctgttctgggaagaggggcatttggtgaggtctacaaaggaacgctagaagaccaatcctcagttgcagtaaagagatatatacatgggacccacaaagaggtgtttgccaaggaagtcatagtgcactctcaaataaaccacaagaatgttgtcagactcttgggctgctgcacagaagaaaatgctctaatgattgtcatggagtttatctccaatgggaacctcgacagcatacttcatggcaacagaggtaatggtcgggttcccttccctctgaagaaaaggatagaaattgccattgaggttgctgaagtattatggtgcatgcattcgatgtatagtcctgttcttcatggtgacatcaaacctgctaacatactgctagatgaaaattttcagccaaagatatcagattttggaattgcaagactgctttctgctaatggcccccagcaagctaccactgtcattggttccataggctaccttgatccagcatactgtgagagtggaattctaaccccaaagagcgatgtttacagctttggagtggttttgctggaaattatcacaaggaataaagcagtggatggcaccgttacccttgctcaaagttttaatgaggctcttacaaaaggggaggatgtgcagcacatgtttgatgaggaaatcagtgttgcagaaaacaagaagtttcttcgacgcattggacagttagcagctaaatgcttgcagagggacgtcaaaacgcgtcctgaaatggttgaagttgctaatagtctaaggatgatcaggaaagctatgcagagagaccaggatgaggatgtactgttagcagcataccaatttggagatctaaaaattttcaatgaaactgaaatgaaggaaatgacaaaaaactacagcatggcctttaggaaatcgatgtgtgaatgtctctacaatggagtcatcggcatgaatcgtccaattatagtaagactacttgagacaagttcagaaactggcagagagatatttctgaacactatgagcatattgagtcaaaagaaccacaaaaatgttgtgaatattgttggcttccacatagggaagtccagtttagagtgtgtatatgagtcttgctgtgatctatccaagacaatgcttggctctatatcactatctaacagaaacctttatgacactatctgttccatgaaaaaacttcatcttcaacaacgcctgtcaatagcagtccagtgtgcagagggtctggttcatatccattcattagcagctgaaagtcctgaatcatgtggcaccagcctcttaggaaacttcagatctgccaacatatttttggacgagaactttgtaccaaaaatcttcaatgtgaacttgtcaacatttcttggactttcaggtgcacaaaaacatacagtgttttcaattcattacaatggaccagaaaagtattattcagacccaagggatgtttctggtcaacttcttaacaaaaaatctgatgtatatagctttggagttgttcttttagagctcatcacttggaagactgtgagatacatgtacaatcttagggctcgtgtgcttaccacagacttccttgattcttataggagagaccgtgatgcaattgggatgttcggcaaggtttgtgatgaacatgaagggtactttgttcatgaggccctttccattgccatcgattgcttacaacttgatattcaaatgaggccagaaatggaacatgtacttttccgtctccggatcattgttgctagaagcaaacttgctgctggtagtaacaataaacctagccaacatattggtcgggcccttgttaacaacattgataaacttcacccaactctcatatcaaccatttccatggaggaactgaatgaagcaaccgggaacttcagtaatgatgttcttataggacagggaccatacgccgaatgtttcctgggagttcttaaagatgggcagaatcttgctgtaaaaaggctacgtacttctgaagaaattcaagtagaggttccgaccattttaagaatgtgttaccatgacaatgttgtgcaatttctaggatgttttcttgaagggggaactcgtgttcttgcttatgagtacgccccaaggggctccttgcatgatattcttcatggtaaaatgggcatcaagggagcccgaccagggccacctctatcgtggttgcagcgtgtgaagattgccgtaagtgctgcaaaaggcatcgagttcctccatgagaaggtgacattggtgtttcaatacatgatgcccatcgccgggttcataattgggccgagtactattctgtcagggaacatctagcacctgagttcgcattcagaagaaggtatagcacaaagagcgatgtctacagcttcgggcttgtactgttggagcttttaactggccgctcagtttttcatgttgcgacacaatgtggcccgaggagcgcagttagatgggctaaaccaatgcttagtcaagacaaggtggaacagtgcatagatccaaggcttggaggagggtacctactaaacgatgtcagaaagatggcttctgttgctgcactgtgtttacaagacgagccagagttccggcctgaaatgagcatcgtcgtcgaggctctgagcctgttactgaacagcaagtgaacaagtaaccgtccctgcattggtgaagcacgtggaatgtgatttccttgcatgtcattgcgagctcaagatcacgggtttcgtgaaggcgattggcccccaacagaaagttatgattactgcattcatctaggcttggaacttgtgctttctttgtctgtgcacatgtaatactcaaaattctaaataaagaatatagagagatcttctcattttatgtgccttatttgcatcataaaaagagcaca

SEQ ID NO: 22828 - DNA, 1732 bp, Zea Mays
cgggcgcgtctcgcgagtcttgcctcgtctctctgcaaatgggtgccgtccatatataaactggacgcggcagtggtcctcagtcttcacactccccactcctctctctctttctccctccctcgtcgtcccatcggaactcggatggggagcgggagcgaggcgcatctgccgcggagccgttcggtctccgcgcagccttgagcgccgcaccgtgtcttcgggctgtccagcttgcgtcgcgaggggcgagacgctacgcgagagcgcgacagggctcttggatccccccagagggccacagagcccacacaacagcaggctcggcgggcgctgcgcgcgctcaagggcctggtgcggctgcaggcgctgatccgggggcaggcggtgcggcggcagacggcggccacgctgcgcggcctcgaatccctcatgcggatccaggcccgccaccggtccagggccggcggcgtcgaccaccaccagcagcaggcggcggacgacgacgacgccctgctgctgcggcgcggcagggagctctttgccgctgccgccgccgtccacgagcagcagcaggcgagcaacaagcggtgggacagcagcatcttctccaaggaagagatgagcgccatgacgaggagcaaggaggaggcggccctcaagcgcgtgcgcgcgctgcagtacgcctccctgcacaacgagaagctgggcctccggcggccgccctccccctccatgtccagggacgacgaggcggacgcgctgaacaaccagcgctggagctggctggaggagtgggtcggctcgcagcccttcgacaaggacgtccccgtggcgcaccagtccccgtacacccgcagcgccagcaggggtgagcacgacgacgtcgtcgaccggctcggctgctcggcccgccgctccttcgcccggccgacgcgcacgccgccgaggggggactgctacggcgacgcggcgcagttcccggggtacatggcctccaccgcgtccgccaaggccaagttcaggtccatgagcacgcccaaggagcgctccgccgccggctacgacgcctactcggagcactgcttcccgttcgccgaccgcctgctctcgccgatcccgtccatgtcgcccatcccctccgtcgccagcgacatgggcttcgccaggccgcccgtcgcgcagcggtcgccgcgggtgccggccaagagccccatgacgcccgcgagggcgcgcacgcggaggtcgcacggcggccaccacagcttcggctccgaggctgcgctgcaccagctgcagatggagcactacaccccagtccgctgaacgtttgctctttttctgatgatgcgatgcaacgagcaacgatgccgtccgtcggtcctttgtgaagatacaattcttttgtttgttcgacttccttaccataaattggtgggttcaaatgttggatgcaagacgatggaactttcaatcgcactgtaggtgacaatgcaccgtggatccatgatgtaagagcgcaaactatatgaattgtgatctgggcctagtcagtcctgaacagaggcacggtcccctttcccactgtctagggaataagagtcgccaacaggagtatgtaaactccttgattgcacgcttcctgagtcgccaacagggaataagcacaataattatcttctttgcatgttagtacttggtatctcaataaaaatactagactcgccaacat

SEQ ID NO: 22829 - DNA, 1266 bp, Zea Mays
gcgttattaacgtgtcttccttctctctccggcgtcgcgtcgcgtccctccttcctccctctccatttccgccaccaccccccctctctctctctcttcttcttcttcaatcctccctccccgcgccggagttggaggagggagaggggacaagctttccggcgccgacgccgacgcggacccggcgccgacacgatccggtggatcaagtgcatcacacctttagggaggccccttggacagcagtttgtgctgcaaattctatatagctctgtcgcagcatggcctcggtgggcgtggcacgctcttctttgggatttcagaatggcacaagttctagcagtgacccagatcgtcttcccaacgagttgggcagtatgagcataagggacgacaaggacgttgaagatattgtagtcaatggcaatggggcggagcctggtcatatcatagtgaccagcattgatgggagaaatgggcaggcaaagcagaccattagttacatggctgagcgggtggtaggtcatgggtccttcggaaccgttttccaggccaagtgtcttgaaactggtgagaccgtagctataaaaaaggttcttcaagacaagagatacaagaatcgtgagctgcaaaccatgcgagtgcttgaccacccaaatgtggtggctctaaagcactgtttcttctcaaagactgagaaagaggagctttacctcaatttggtgcttgagtatgtaccggagactgctcatcgtgtcatcaaacattacaacaagatgaaccagcgcatgcctttgatttatgcaaaactgtatatgtatcagatttgtagagccttggcatacattcacaacagcattggagtgtgccacagggacattaagccgcaaaatctcctggttaatcctcatacccatcagctaaaattgtgtgactttggcagcgcgaaagttctggtactacagagctccagagctcatatttggtgctactgaatacacaacagccattgatgtttggtctgctggctgtgtgctcgctgagctgcttctaggacagcctctgttccctggagaaagcggtgttgatcagcttgttgaaatcatcaaggttctgggcacacccacacgtgaagaaattaagtgcatgaatccaaattataccgagtttaaattcccgcaaatcaaagctcacccatggcataagatattccgtttaaagatgcctgctgaagcggtagatctcgtgtccaggcttctacgaatc

SEQ ID NO: 22830 - DNA, 1498 bp, Zea Mays
gaattgaggatatgactcagtatatagggtaatgtatgtaggactcgagagactgagccctataattatttgatgaaattttataaaatagagccaatgttggaagagtgttttatggttttgattcatataattaaaataggattatgtttagagtctttatgatcttagctacctaattccactgccaatttttagccaaataactagctaaacaaacacccctcggcactgatagaagagagaagaaacagacagcctaaagcccttcctctctcctcggcgccggaatggcgaaaagcggcggcgagtccactgtggaggttcctattcccgcttccgcgtcggctacgaggccgaaggcgaaacaccgtatagagatcgaggggtaccctgtggatggcgtctccattggcggtcaagagacttgcgtcatcttcccgactctgagcctcgccttcgacatcggccggtgcccgcagcgcgccgtctcccaggagttcctcttcgtctctcacgggcacctcgaccacatcgggggccttcccatgtatgtggccacgcgggggctcttcaggctgcgtccgcccaccatcttcgtccccgcgtgcctccgggacctcgtggagaggctatttgaggtgcaccgcgccatggaccagtccgagctcaaccacaacctggtccccctggaggtcggggaggagtacgagctcaggagggacctcaaggtcagggctttcaggacctatcacgccatacccagccaggggtatgtgatatactcggtgaagcagaagcttaagcaggagttcattggcctaccagggagcgagatcaagcggctcaagctatcaggtgtggagatcacaaatacggtgtccacccctgaaattgctttctcgggggatacaacagcagatttcattcttgatccggataatgcagatgtgctgcaggcaaaaattcttgttgtcgagagtacctttctagacgactcaatttcagttgagcatgcaagagaatatgggcacacacatttatttgagataacaagtcaggccgacaagcttcaaaacaaagctattctactgatccacttttctgctcgttatactacagaggaaattgatgcggcaataaacaaattgccaccgtctttccgtagcagagtttatgccttgaaggaaggcttctaataaaaacatgaaccaggaaatcagtattgaagttttgtcggagcagttttccaaattggattgcgtgggtatttttcaccggaaacctttttgctatgtgtgctctgatgatactataccaatcatctgaaggttcatgcggggctttttgttgtcggtactcatgcttgtgacattggaatgtttgaatggtgaaatgcgaaacatcatgtccagaacaggaactctcctcacctcatctctgaagatatacaagtagtactaaatcaatttcacacaaaaaaaagagctacccattg

SEQ ID NO: 22831 - DNA, 2149 bp, Zea Mays
tggacaaccgccgcggcggcctcaggtgccgaggcattcgtcggtgtcttagctggcgacgaacaccaccagaatcacggactgtttcgaattctgagaataagcgcactctcccagcatggatgttgaaagcaacctcaggtaatcaaacagcaaagaccgcagatcagaataagcaggcactggaatctgctgacattggggctcttgatcagagcaaacccatcaaaaggaacaacagacggccgctaaaaaacttggattcagtagctgctggtgaactgggagttttgcagcgatgtgagggtagaggaaaggccagaaggaagagcaaggatgctgtcaaagatgaagttgaagaaattgtggaattaaagagtaagaatgcaagaaaaacgagtggaagaggtgctgcaaagaatagcaagaaacggaagttggataatgtcgaatcaggaccatcatcgccagtatcaactgatgatgacatagagcttactgttgaggatcttgtgagcatagctgaagagtttgttaatgctgataaacagaagcaatgtgaactacaaactgtggaggttaccaggcataaagagcatcatctgtgccctaaaatttccactgaggtagatagagggcagtcagtagtaaatgctcaatcagtgaaaggatcgatgcagtgcgcaacagccacaagtaatacaggtgcaatcaagtatacagaagatgagagcactagccatcaagaagtgcaattttcaagtttcaaaacgacagaagatgttgctcaggatatgataaacctgttattcggtcacctattgagtaaacctgttgccaacacagagaagtctgatcctgtagaatcaacgactagaactgtaaatcaggtgccagaggggagaggctggcacagcgaagtaccaaggcaggaggaacctgtgaagaaaccagagcctgtagtagaatcaatgcctacgactataaatcatgtgccagagaagaaagactggcgtagcgagttaacaaagctgggcgaacctgtggcaaagaagaagagcagcctcagggacaaggtggccttgtttctttgactgcatcagatgagatttgggcagtagattgtgattcgtatgggaccgtgtctgctggttctgagcgtgtcccagtcccacggcattgtttttgcatatagttatacctttggttaataagctgtcctctttaaatctagcaagccagccctcactgttgctagatggtattcctgtgtataaaggatgcatggtgcattttctgttggttgaagtacgactgtatgaagtatcggtgttcctcaacgcgacaactacactagagggaagcggtttaaacatcgtagagttattaggcatggaggagcccagctatctccttactcgccatggagcctttgcagaagttgctggagactgacacagctgagagtgtcctgttcccaatcatttacagtgctgcaaaactatggatcagtatgggcgctgatgatgcagccatcttcgtaaaagtggtaatggatcgttgtctatctttgggaggatcagaagaggtttcctttggacaagctctggcgatcggcagatgcaaaaatttgggggcattgagtgtcagacctggatgtgcacagattgccactcccggtaatgctgttgacaggcagttcatcaaggccaacaccatcctcactcttggggatgaggaataccaatggacatgggtgtcgaacttctacgccgcatgcaacaagaacagaacggtcagggacgttttgcacggagtatgtttcttgaatacgaaaacagtgacagagatggcagaattgttatgctatgggactttctcagtaacagaaagacctgacgagaatgaaaccggttagctctggcaccacaaccggaagagccgcgacaaaagccgtgggcggggcttgtgccttgtggggaggagtcctgtcaaacgagtttggctccggagcggggctcctgtctttatgtactcccctgttccaaaatagttgttttagccttttaacaaattcattcaataattaatatatttgttttgtatatgtgtctagatttattatcatattttaaatatagacataaaa

SEQ ID NO: 22832 - DNA, 4897 bp, Zea Mays
gagaaaaccaaacgaaccaaacaagcgcaggcgcaaacgcaaacgcctcccttcttccctccgttcgttccatcgtcgctccctactccggggcgccctccctcggtttcttcctcgtctcgagctctcgtctagacgtcactgtcctcgcaccgctcccttctccggcatccgagccgtagccctgccctccgcatccacaatttgatgcggagggctcggccgccatgtcgtggggcctcggctggaaacgcagctccgagatcttccacctcacgctcgactatggggactacgacgacaacgacgaccatcagccctcgtccccgtcccctccggcgtcctcttccccttccgcctcggcatcgtcgaccccggtatcctcctcctcgcccaccgccacccgcaacggcgacgtcggcttccgcatcgagctcgaatggtcggcgggggacgacgaggatcaggtcgcgctccgcctccagtcccagctcatggtcgcgctgcccccgccccacgacgccgtctccgtcgacctgatcccgagagacgacggggaggaggaagtggtgcagatcgagatgcgtgtggtcaggaggcgggaggcactgcggtccgtgcgcgtgtcgcgggctcccggatccgcgctgggcagcggcgatggcgcgggggtgctcgcgcgcctcatcagatccaacctcgcgcccgcgcctgccgtggatggccccacagccgccgcgggcgtgccagtgctcgctgatcactggcggcccgtcgccatgctcagcctctgcaactgcggaatgtcggtacttccagttgagttaactcgccttccacttctcgagaagctatatcttgacaacaataaattgtcagttttgccccctgaagttggtgctttgaagaatatggaagtgctgtcagttaacaacaacatgctagtttctgtccctgtagaactgcggcaatgtgttatgctggaggaattatcattagaacataacaagcttgtccgtccactattggatttcaggtcaatgcccaagctccgaattttgcgtttgtttggaaatcctctagagtttcttccagaaattttgccactgcataacctcaggcatctcacacttgcaaatattagaattgaagcagtggaaagtcttaaatctgtcaatgtgcaaatagagactgagaatagttcctacttcatagcggccaggcacaaacttggtgcctttttttctcttgttttccgtttctcttcttgtcaccatcctttgctagcttctgctttggccaaaataatggaagatcgtagcaaccatattgcaattagcaaagaagaaaatgctgtcaggcagcttataagcatgataagcagtgataaccgtcatgtggttgagcaagcatgccttgctatttcatcactggcatctgatatttcttcagcaatgcagctgattaagtgtgacattatgaagcctattgaagctgtactaaagtcatctgacgaagaagaactagtatcagtattgcaagtggtagtcaccttaactttcgtttctgatcatgttgctcaaaagatgttgacgaaagatgtgttgaagtcactgaaagcactttgcggacacaagaactctgaggtgcaacgtctatctctgtttgcagttggcaatttggctttctgcttggagactcggcgcaccctcatgcattctgaaagtttgcgtgaccttttaatccgtttaactatttcacaagaacgtcgtgtcagcaaagcagctgcacgtgctttggcaatcctaggggagaatgagaacttgcgtcgagcaattagaggaaggccagttgcaaagaagggtctacgcattctatcaatggatggtggtggcatgaagggccttgcaacagttcaaatgcttaaacagatagagcaaggaactgggaaacgcatacatgaaatgtttgatctcatatgtggtacgtccactggtggcatgcttgcaatggctcttgggatcaagcagatgactttggatcagtgtgaagaaatatacacaaaacttggaaaacttgtatttgctgaacctatcccaaaggatgaagctgctacgtggaaggagaagcttgatcaacttttcaaaagttcgtcacaaagttttagagtggttgtacatgggtccaagcacagcgcagatcaattcgagaggttactaaaggaaatgtgtgccgatgaagatggtgaccttctaattgaatctgctgtaaaaggcattccaaaggtttttgctgtatccactttagtcagtgtcatgcctgctcaaccgtatatattccgaaactatcagtatcctcctggcactctggaggtatcaccaggaatggcagaaagtccatcaattagtgcaattggtactgctgtttctggtgcgccagttggtattaaacgtggtgccttcatggggagctgcaagcatcgtgtgtgggaagcgataagagcatcatctgcagcaccatattatttggatgatttctctgttgatgccaatcgttggcaagatggagctattgtagccaacaatcctacgatctttgccattagagaagcacaacttttgtggccagatacacgaatagattgtctagtttcgataggatgtggctcagttccaactaagagtcgtagaggtggatggcgctacttggacacagggcaagtgttaatagaaagtgcatgctcagtggagagagttgaagaaactttggatacactgataccaatgcttcctgaaatgcaatatttccgctttaatccagtggatgaacgatgtggtatggaattagatgaaactgatcctgctatctggcttaagttggaagctgcaactgatgagtacattcagaagaattttctggctttcaagaatctttgtgagcttctggtcccaaggtaccaagaggaagaaaagtcatctgatatttacaaatccctttcattttcaaggctgacatcactaaatcaaggtttcagcgaaagtaatcctaccttaggatggaggcgtgtggttttacttgtcgaggcttcctttagtcctgatttcgggaagaaaataaatcatgcacgctcccttgaatctttctgctcccagaatggtattaggttagctctaatgaatagtgcttctgggtttgggaaaccagccactgcacttcctaccccgataacttctcccttgtttactggaagtttcccatctagtccacttctatatagtccagatggcactcaacggatcggtcgaattgacctagttccaccacttagtttggatggccacccaactacaaagtcctcaccaccaacatcaccattgaagtcaaggcagccatcagcacatgttcggtcattgtatgataaactgcagaatatgcctcaagttggtgtaatacacctggctcttcaaaatgattcaaccggttcagtattgagttggcagaatgatgtatttgtggttgctgaacccggagaacttgcagacagatttctgcaatctgtcaaaactagcttgtcaaccttgttgcgtgggcgtaatagaaagggtgcatattccttgtccaagatttcatgtttatctgagctggttgctgaatgtccatcttttgaaatcggtgggatacaccaccgctatataggtcgacaaacacaagtaatggaagataaccaagaaattggcgcatatatgtttaggaggacagtgcctgctgttcacatggcacctgaagatgttcgatggatggttggagcatggagggagagaatcattgtatgcagcggtaagtatggcctcgctcatggcctggtgaaggcattcatggattgtggcgccaaagcagtcatctcatcgtccatcgagcctccggattcccagacaatagtctatcatgggatggatgtcaatggaagcctagagaatgggaagtttgtcatcggggatgaagaagccgatgaatcggaacctgaacctgttagccctgtaagtgactgggaggacagcgacgtggagaaaggtggcaaccatgacatggatgatgaggagtacctggctcagttcatgtgcctgatgtacgataaattgttccgtgagggtgtgactgtggatacagctctgcagcaagctctccgctcgcatcccaagttaaagtacagctgccacttacctcacgttttgtagttagggacattgacaaaccatacaggagtatagcaaaacgggcatggacaacaggaaatgaataaggattgggtggattcatagtggggttatagaggtttatatcgtgttcgttgtgcaggcgtagtgacagagggtacccccttactgaatctttgggcgagaaagcctatgtaaacctgtgtgctcatgagcagagtagttaagctgacgaataaaagcatgatgaagggcattgtaatctggatgtgcatttttgtttcagctaggagaatggacattcgcaatgttttggtgtctcatgacgttcagttgctagcttgcaggcttgcggcgtacagcctgtagttaactatcttcagagacccggtttcatgtatacactatacaggctggcaccttatgctagaaacctgaatgtgtgtactgtagaagttccccattttaccacagtttatgcgatgctggtagtggcatgaactttgctagcccatatgttctgtttaaggccccgtgctgtcttgaaacaaatctctgcattaataaacagtaaagacatcaagtgctaagctggcgattgagcggcggctctgattttcagtaattggcagctcttaacgaagcatgaccttattgagcaatttggcaggtcgcagtacacc

SEQ ID NO: 22833 - DNA, 1579 bp, Zea Mays
cgctcggctccgccccgcccgcctctccccattctcacttcttttcccccagttgcgttgcgtgcccctcgtttccacactttgttgcgctcctttagcgccggcggcccgtagcctcaatcatcatttccattccatccggtttcttccgacgacggtgtgtacagagagcaggatcggacaagtctctgctggtagaagcatggcgcagcgccggctgttgggcacggcgccggcgcccgcgggcgatgcggcgtcgcacggctcgggctccagccccgacgcgatgcggatcatggtgggcgtgctggtaacggtcatcgtctgcacgctgctctactgcgtctactgctggcggtggcggaagcgcaatgccatccggagatccctgctggacagcctatggcggcggtcgagctcggacctgccgctcatggacctcgcctccatcctcgctgccaccgacaacttctccaaggccaacaagctcggcgagggcggcttcggccccgtctacagaggcgtgctgagcggcggctccgagatcgccgtgaagcgtctgtcagcgcggtcgcggcagggcgcggcggagttccggaacgaggtggagctcatcgccaagctgcagcaccgcaacctagtgcggctgctgggctggtgcgccgagcgcgaggagaagctgctggtgtacgagtacctccccaaccgcagcctcgacgccttcctcttcgatccgagcaagagtgcgcagcttgggtggagcacccggcacaacgtgatcctgggcatcgcccgcggcctgctgtacctccacgaggactcgctgctgaaggtggtccaccgggacctcaaggccagcaacgtgctgctcgaccacaagatgagcccaaagatctccgacttcggcatggccaagatcttcgaggacgactccgacgcgattaacacgggccgcgtcgtcgggacctacgggtacatggcgcccgagttcgcgttggacggcgtcttctcggtgaagtcggacgtgttcagtttcggggtcctcctgctggagatcttgagcgggcaacggaacggcgccttgtacctcgaggaacaccagcagtccctcatccaagacgcatggaagctgtggagtgaagaccgcgcggccgagttcatggaccagtcgctggggcggtcctactccaaggacgaggcgtggcggtgctaccacgtcggcctgctctgcgtgcaggaggaccccgacgtccgcccgaccatgtccaacgtcctgctcatgctcatcagcgaccacaccaagttacccgagccagccatgccgcccttgttcgcgcggctcaggaacatctccttgctggcgccgccactcaccaccaaaaccgagtccaccacgtctccgctgtcgatcaacgacgtctccatcaccatgatcgaaccgcgatgagctcatgcgttttgtacttctgacaactgagggagaggcttcgagtgtaaatttataagactgcaatcgttcagaatgactactcatatgtactaagcacactgatcattttgcaagagtcataaaaactat

SEQ ID NO: 22834 - DNA, 1686 bp, Zea Mays
ctaggatcagcacaaagatgcctcctggtcgtgagaaggttggagtcaaaaggccacatggacctcagctatcagggctcaaaggaatgtaacataagaactactgataattctcttggtgcaatcaagctctggtctaagagagtttttgcgcaacaagaaactactagaattacaaggtcaaagaaaaatattgctcaacctgatgcaactcttacaccaaggcacaacattgattaccacacacaggctaatggccatgcccatttggatgagaacactaacatgaccaatgaaggtcatgttgctccttttgatgggaagaaccctacaggcaatgaagataatgtggatgtcctagctgataacaacatgacgattggaggtcaagttgatgacactaatcagatgtcgaacggagatttagaattaggtcagaatgatcggtgggaaaggggaatcaatatgggacatggtcttcatagaattaaccgaggtttgcgtggaaagttgcaagttgttattcctgaagggaagataaggcctatggcaccacttgttgctgctaagtttgcaactgaatgcaacattgttgtgaggaaccatgtgccagtgttcaaacattggaaggattacaagaaccattcaggcctattcaatctatttacaggaaaacttagtgcaaagtttgacattaacacaagtgatgcaccagttcaaaaggcttgttcccagatgatgaagagtgcagttcgacaacaacgataccggctcaagaaaaagtactttgatccttttccgctacatctagtggcaaaaaaatctccaatcagatctatgactgatgaagagtggaatgaacttgtggagtattggaagagtccaaaaaagtggagacatctcaaaaaaacaaagagaatcgatccaaagttaaattccatcaaacaactggctctcgtagctacatggttcatgtagaaaatttgggagataaatacattgatcaagaacctgatgcactggatttatttaaggagtgtcactacagcaagataaagaaatgctattcatcttctgttcaacaagttataactgaaatagaaaacaagtggtctacaccaacagaaggtgaacaagaaatgtttgtgactgaagttgttgctgatgtacttgctcaaaatacaaagaaaaatttgttccttcaaaatgtggggatacaaagtgcttatccaaggtctagtgtaagaaatatcgaagcacaacttgaagtagagaagagagcaaatagtgctcttcgatctgttgtcaacacccaacgggaggaactagaagtattgtcaaagcaaatgcatgaagcagaagagtcacggatcaaggagcaagaggaattgaagaagaggcaagttgagatggaagcagagatgaagaagaggcaagctgccatggatgccaagctccaacttttgtttagtaaatttcaaccacgttagttgcatgtgtggtatgtgaagtcaggttcaatataggttttggtgttgtagtcttatgttattactgtgatggagtgactttggatggcaacttgatttgtgttggaatgatattggttggcaattttatccttgtgatgttattatattattgatgttgagatattattttgaactgtggaaaataaaattaaaa

SEQ ID NO: 22835 - DNA, 287 bp, Zea Mays
agaagaccaaaatacatttgaagacgattcgcatgacacctttgtgcaagaagctgatgaggaagactgtgacgatggtgatgataagtactgagtctagcgatgcgccagtcatcttcgtgtggaagattgcccatgttatatccgctgtactttgatgatgatactatttgagagttatataagtctggatgatgtaataaagttactatactctcttttacacctttattgcattgtcttttgatatattacacttgtgacatcaatatatgagtagaaaataa

SEQ ID NO: 22836 - DNA, 3305 bp, Zea Mays
tcctttgaggctgcacccatgtacaaccataacataggaaatatgttttgtgataggttggacctggagctgttctaaggggcccacttataaatggaagtcgtgatgagatggccccaaaactgaattgcgaagatgagagttgccctatggaaatctttcatccacctgaggattgcaacttgaactcttcattgccttttactttacagatatgccgtgttgaagatattgatgtttctggccttgttcaaggaactgtagttaattttaacagagcaagaagtgtcactgttcagacatctgggaccataagtgcaacaggattaggctgccgaggtggcattggaagaggaaaaatgttaagcagtgggtttagtggtgggggtgggcatggtggtaaaggcggtgatggcatttataatggtggtcatgtagagggtggatctgcgtatggtcatgctgatttaccatgtgaacttggcagtggcagcggtaatgtcagtggatcttcaactgctggtggtggtataatagtgatgggttctttggaacaatctctgccgaacctctccctttctggctcgattgaggcaaatggtggtaattttactggtttgatgtctcatgccacaattggaggacctggtggcggttctggtggtacaattcttctttttgtgcggacattactcttgaagaaggactctgtactttctagtgttgggggagttggtggcaatggcagtggtggaggtggagggggtcggattcacttccactggtttgatattcccactggagatgattatattccttttgcaaccattaaaggaacaatacttgcaagaggaggagtcagtgaagggcaaggtttctctggtgagaatggaaccatcacaggaaaggattgcccaaaaggtctttatggaacattttgcaaggaatgtccctcaggaacatacaagaatattactggatcatctaagtccatgtgctcaccatgccctccaaatgagctacctcgccgtgctgtatacataagcgtccgaggaggtgttgctgaacccccatgcccatacaaatgcgtgtctgatagatatagcatgcctcactgttttactgcccttgaagagctgatatacacgtttggtggaccttggttgtttggtctgcttctgtctggccttcttgttttattagctcttgttttgagtattgctcggatgaagtttgttggtactgatgagttgcctggaccagcaccaactcaacagagctcccaaattgatcactcttttcccttccttgaatcactgaatgaggtattggaaacaaacagggcagaagaatctcactgtcatgtgcacaggatgtatttcatgggcccaaacaccttcagtgaaccttggcatctcccacacaccccgccagagcagatttcagagattgtgtacgaagatgcatttaacaaatttgttgatgagatcaatgctcttgcagcctatcagtggtgggaaggttcagtttttagcatcctatgtatactttcatttcccctggcatggtcgtggcaacagtggcgcaggagaaagaaattacaaaaactacgtgaatttgttcgttctgaatatgatcattcatgtttacggtcctgccgttcgcgtgcactttacgaggggctaaaggtagctgctactccagatttaatgctgggttatttagatttcttccttggtggggatgagaaaaggactgatcttcctcctcggcttcatcaaaggtttccaatgtccctgatctttggaggtgatggaagctatatggctccattttcacttcatagcgacagagtggtcacaactcttataagtcaggctgtgccatcatctatatggcatcgtcttgtagctggattgaatgcccagttgcgtttggttcgccgtggaaatctaaacacatcacttctccctgtgctcaaatggctagaaagtcatgcaaatcctgaattgaacacgtaccgtgtgcgtgttgaccttgcatggtttcaaactacagcattaggttaccttcagtttggtcttgtccttcatgctgtcgggggagtggtggctgctgaactccaggatggctgtacaagtaaaaccgatcagcattcagtaaaccagaatacatgcactgactctcaaatgggccactcaaggaccaatgatgttctgcgtaaaaggataactggcaccattctcaatgttgacaacttaaggatgcttggtggcaggagaggtttcttttaccttctctctcttatcttgcacaatacaaaaccagttggacatcaggaccttgtcggcttagtcatctcaatactgcttcttgcagatttcagcttagtcttgcttactttcctccaactatattcatattctatggtcgatgttctgttagtcttgttcattcttcctcttgggatactagcaccatttccagctgggataaatgctctttttagtcatgaacagcggcggtcagctggtcttgctcgtgtctatgccttgtggaatattacatcactggttaatgttgttgtggcttttgtatgtggatttctgcattacaagtcatcaagcaaaaaacatccaagcatgcagccgtggagttttggtggggaggaaaccagctggtcgctattccctataggacttgttctatgcaagtgcattcaagcaaggcttgttgattggcatgtatctatcttggagatccaggatcgtgcagtttatagcaatgacccaacaatattttggcagtgaaagcatttcgatttacaggagttctcatgaggagagcttaatgcaactcaagtttttgtgggagttgataaaaggaaggctatggagttagtctgttctttgtccgcccagtcaggggaagcatgtacaaagtagatgctggtaattgcctgcctatatagacttaatgacttacagtgcatggtcaaccttttgtccagtcactcacccagctttgttttccttgtacataggaaacgggtttaattagttgaccgattcgttgtaggatttaggatttagacaccatagaattatagattacccaaggtaatctcaaagagatggtggaaaacatatatacttcttttgtttaaagctttgtcttttgcattgatgttgagctgggaaacgggtgaggcatcaaatagagcttttttcccctctgttaagattaagacaaatgttaacgtgctgatgttttattcaagatctggttgccatatgttcccgtga

SEQ ID NO: 22837 - DNA, 1978 bp, Zea Mays
actggaaaggccgagttttagctccggttccagaaaaaaactcggaaccagatctcaaaccacacaatccacggctgctccttcgctggacaccgagaaaccgtcaaggcgcaacgaacgaacttgcagcaaaatttcccggagaccctcgagcaaaaatctggtctggttcaaactcgccttttgcctgtgggcggccgcgttcttacgggccatgtcgcagcgcgacggcgacctcgccgccggagctcatccggaagaaggagaccgccacgccgttcgaatggatggctccgacgatgagctggaccaacctacgagtaaagcgactgagcacatcacggctatggacgtgaggaaggggaaggatatgcaagggatcccctggaacgtgatgccgactacaagggacaagtacaggcagtcacggctgcaggggtacgccaactttgagaacgtgcctaattccggaaggctttctgagaaggaatgcatgcctgcagagaaaggccaactctactacgagtttcagcacagcacgaggtcggtgaaaccgaccatccgtcatttccagttgaggaatttagtgtgggcaacaacaaggcacgatgtgtatcttatgtcaaacttttctgtgcttcattggtcagcaatgacttataagaagcaagaagtcattaatcttcaaggacatgtgacaccgtgcgagaagcaccatcggaatcactacgagggtttttatcagactccagtcagtactttggcggtgaagcataacttgcttgttactggtgggtttcatggggagataatatgcaagtttctggatcgtcaaggagtaagctactgttgcaagacaacaaatgatgacgacggtattactaattctctggagatatttgagaagcctagtggttctctgcacttccttgcgtcaaacaatgattgtggacttagagactttgacatggaaaagtttcgaatatgcaaccacttccattttgcttggcctgtgaatgtaagcctgcagtgcttgttgaattttcaattttctatctaaatctagctgctgaagtcaatgctcatgttttgtcaaagagcatgtcttaaataaggacagaaacacattactgcatcctgtgttggcccctgttttaattttctgcagcatacatcgttgagcccagatggtaaacttgctgctattgtgggggacagtcctgatggacttctgattgacgctaattcaggaaagacggttcacaaactccatggccatttggattactcctttgcgtcggcatggaatccagacggccgaacattcgccacggggaaccaagacaagacgtgcagggtctgggacgtccgcaatctctccagatcagttgttgtattgggtggcaacatcggagccgtcaggtcgattcgctacacgccagacgggaagttcatggcgatgactgaacccgcggacttcatccacatcttcgatgttgagatcggcgacggttctactcgtaccttgattcaacactgtgagcttgtgctggtgtagacctgtgaggtcgacatcacaggctttagaagcaagaaagttgtggctatgttcataggtgttgctgtgaagaaactggagaacgatacgtttacttttgctgaacaagctgtaggtattcggcgacccatcttttctgggtgatcagagtctcaattaagattcccgctttctgttatctatcccatacttacaccgtacgactacgattagatcatcctatcctacgggcgagacgtgagtctacgtaattgattgagacctgctgagggctttgctttcacatgcatgcatatgtaatcatcgatcatggaattgctaataagctgtctgtttgaaactcagtttcagttattccttcttgttaccagcacttctctgctgtttcagtcagttacttaattggaggatcaaccagca

SEQ ID NO: 22838 - DNA, 172 bp, Zea Mays
aagaaagtgaagtcacacgacacctgtcagatgttcaacgacaagctcgagctaggatttatcagcattcgtacgagtattgagtcgcgtttgatgctggtgagccgatttataatttttgtaagtgtaatacccaacttgcaatttgtggaagatagcctaagaggagaaa

SEQ ID NO: 22839 - DNA, 3675 bp, Zea Mays
cccaaattcccccctcccacccgtcggttctgtagccctctacatttctgggttttgggtcgtctccacgggctgggtttggggtcggtcggcggcggcggcggagctaggagtggaggcctgagatatactccaagcgggagtctgggcgctctctgcggtcggagaggcgcgggtgagatctacgagggccgctgcgtcgttctcgcagggccggcggaagacatgggtttcctctcggcgaagctgctgccgtcgtgcgagagcgtgtgcgtgtgctgccccgcgctgcgcccgagctcgcgccgccccgtcaagcgctacaagaagctgctcgccgagatattccccaagacgcccgatggtgctccgaatgagaggaaaatagtgaagttgtgcgagtatgctgcgaagaacccattgcgcataccaaagattgccaagtttctagagcagaggagtcacaaggagctgcgctctgcccatgtgaacttcgtcagaatcatcactgaagcttacagcaagctactcttcatttgtaaggagcagatggcatattttgccatcagcctagtgaatgtccttaccgagcttctagaaagcaagcaggagaatgttcacatccttggctgtcaaactttagcaaactttattaacagtcaggtagacaacacatatgcacgcaatattgaaagcttggtgcacaaagtatgtgcactttcacgtcgacaaggagaggatcacaggcttcttagggccgcaagcttgcagtgtctgtcagcaatgatctggttcatgaaggagcattcatacatatttgctgattttgatgagatagtgcattcagtgctggaaaattataggacagaggaatctaatggtggtggtgatgacagacatgcattgcagcataattgggttgatgaaatagcaaggtctgagggtagacctggtgtaggtggtggtaatgatgtgaatattaacactacaactattaggttgcggccagcaagaaattcgtcagctcttacaagggatgaacgtgactccccagaagtatggtcacatatttgtgtccaaaagcttgcagaactggccagagagagtacaaccatgcgtcgcattctagatccgatgctttcatactttgatatgaagaaacagtgggccccacgacatggcttggctttgcttgttttgtctgatatggcttatctggaaaagagttcaggcaatgaacagctgattctaaccaccatcatccggcacttggatcacaaaaatgttttacacgatcctcagacaaaatcagatattattcagacagcaacgtccttggcacgacaacttcgatctcgaggatttgctgttgaacttgtagtggcaggtgacttgtgcaagcacttaaggaaaacacttgaggccgtggaatcaggcaatgttgaagatcagaatttgaacgaaccccttcagattgtcttggaggactgtcttatggaagttgttagaggaattaatgacgtacggccactctatgatatgatggcaatcacattggagaatttgccttctatgccaactgttgccagagcaacccttggaagcttgctgatcatttcacacataatctcgttgacatcagtatcttccaacaatctgatggtatttccagaagcacttctccagcagatactgaagtccatgttacatactgatattgatactcgtgtgggagcacaccacatgttttctgctattattgtccgagggccaagccatctgcggagtgaatcagagtacctatatgaaacaaaaaagcagtctcggaatacatctgtatttgcttcagctactgctctactggagaagttaaggagagaaaaggagagtttgagttcagataagcctcgaaatatcatgcatgatgatgtgaaggaaatgaacatgcatgaagaggataaacgaaaaaacccagcttatttctctaagctggtttcctctttcattgaaagatgtgcaacacgaagttctgtagaggagaccaatattgccatgctaactgaagatcaaaccaaccaattgctgtcttcattctggattcaggcaaatcaaacagataataccccttttaattatgaggctattggacattcatacagcctaacagttctttcttcccgccttaagaattcaagcaatggcaatatcattcagtttttccaattgccattatctcttcgaagtgttgctttaaccccgagtgaagttctgccggcttattgccaacggtctatttttacattagcaatgagtatgctggcctttgctggaaaagtttgtcacgtcgctgaactgtcggacttgctaaggtgtttttcatcttccaaaattgacccttacctaagaataggtgaagacttgcaactctatgtaaggttgcaatcggatctaggcagctatggttctgaaagtgatcaagagattgccaaatccatgctttctgactgcaggacaaaaatgggcaaggatgtaatagtgaaggagctgactgagttgttcacgcctgaagagatgcctctgtttgggtcgaattcagcacttgactgggccaacttcaatgcacaagcattttctgatgaatccctttcttttgatgaggaatgttcaagaacctcttcagtagattgtggcttgcacgagtcaccaatcaccaacactgctagctctatctcaaagattactctaccacagtctgttccacatgttttaggtgtcggtcaattgttggaatcagcactacatgtggctggccaggttgcaggtgcatctgtttcaacctcacctcttccatatggtacaatgactagtcaatgtgaagcccttggattgggcaccaggaagaagctatcgagctggcttgtcaatggacacgaatcaaccccggacaatcctatgccaagccttcccactgcccatcattccatcattcccaagtaaagctcccacctgccagccccttcgataacttcctgaaggctgcctatcgcacccagcccgagctgtgatcgatttacctaagaacaaccctcttcacgagtgctaggctgcagtaccaaagcatagggtactagattatctaaaggaacttatctatgacgttgttttagttgtagtagcgtaactatgtgtatctatctactagatgtctgtaacgtttgcatatgtatcatcttacgactgtgcctctgtagttgtaagccgcgagttctgtgtcgcatgttcagactgagttgtatgagaatactgagtatgcttggcactcctgtatacagtatgcttgccaaaacgtttcttccgaggtcatccttttacacactccctacaattcagatgcctgaactttggtttcttcaggcgtctcctctccgtcacggcagtagacatggtggcggggttacggtttcgagattttggagatctccggtttatgactagagataaaagtgtgtttggttctggactataccagaatcgatttggtaatatttcttgtagatgttgcatctggtggctccttaaaactgaaactgaacctggtggcttgtgactagagataaaagtggatatcttaattgtttgaacaaatttaatattttaaaataaatatgtatgaaa

SEQ ID NO: 22840 - DNA, 741 bp, Zea Mays
aagcaccacaacaaaccaaacaggtgctattagattagcgagagtcgttcctccaccaaccaattcgcttctctgtcaacttcacttcctcgtcgacgcctccggcccaccaaccatgccggcggctgcggcggcgcagaggctcctcgcggcgagcacgaaaatcatcggcgttgggcgcaactacatagcccactccaaggagctcggcaatccggtccccaaggagcccgtcctgttcctgaagccgacctcgtcgtttctccacgctggtgtggccaccgccgccgttgagatcccggagccgctcgagtcgctacaccacgaggtagcggccaacggatggagtggtagcggcccagggctccgcttggctcgaaggctctgcacctacgacgagagagatgacagggcactagaggaagaagttgagaagaaatttggatggatattgaagataatcttcctaggaactgctggcctagttggttaccaattctttccatacatgggtgataacctgcttcaacaatctatctcgcttttgcgtgtcaaggatcccttgttcaagcggatgggagcttctcgtttagctcgttttgcagtggatgaccaaagaagaatgaaggtggtagagatagggggagctcaggaactgcttaatgtattggaaggtgctaaagatgataaaacacgaaaagaaactctaaaagctcttgctgcgctttcaaaatctggtga

SEQ ID NO: 22841 - DNA, 3342 bp, Zea Mays
taaaacctggaaacaccttggagcaccagttacccaccctaccttcaaaaacaatcgcctgaacctgaacaaacgatctcacgaggtgcagagcaatttctcgcctttctgtctcgacatttcttgcaacctcgctcgcgtccccgtgtctatcagcccctctctcccaaccccgggtctgtagtgttctcataggaggaaagcgagagaagcaagcaagcgagaagctggagcagcgaacaccaagaattcggtgccgaagcggaggcgaaggggaggaggacgaagggaagggcagtgaccgaagagcgagcgcgccacgtttgatctgggcctcaacgagctagcctgagacaagaacactggaaccatggtttcaaaatcatattcaaatctgctagacatgaccccaggagatgggtttgactttcgacgaccttttaagtctcttcctcgtgttgtaacttctcctagcattatatctgaccatgattgggattccataagtgatggtgattcagttggttcagcattttctatcgagaggaaaataattgtcgccaacttccttccgctgaattgtacaagagatgaaaccggggaactgtccttctcattggatcatgattcactactcatgcaacttaaagatgggttttcaaatgagactgatgctgtgtatgtaggcagtttgaaggttcatgtagatcccagggagcaggaccaagttgcacagaagcttctcagagaatatcgatgcatacctacttttctcccatctgatctgcagcagcagttctatcatggcttctgtaaacaacagttatggccactttttcattatatgcttccaatttgccttgacaagggtgagttgtttgatcgcaccctgtttcaagcctatgtccgagccaacaaactttttgcagataaagttatggaagcaatcaatacagatgatgattatgtttgggttcatgattatcatctcatgctgctccctacattcttgaggaagaggttacaccgaataaagattggtttcttccttcacagcccttttccctcttcagaaatatacaggactctgcctgtaagggatgaaatcctgaagtcactgcttaatgctgatctgattggtttccaaacatttgactatgcccgccacttcctatcttgctgtagcagattgctaggcctgcattatgagtcaaaacgtggttacattggaatagagtattttggccgaacagtgagtttgaagatcctttctgtgggtgtccatgttggtcggcttgaatctgtcttaaagttgcctgctacagttagtaaggttgaagaaattgaacaaaggtataagggcaagatactcatgttaggtgtagatgacatggacatcttcaaaggaataagtctgaaattgcttgcactggagcttcttctggacagaaacccaaagcttagagagaaggttgtccttgtacagatcatcaatcccgcaagaagcacggggaaggatgtgcaggaagctatcacagaagctgtctctgtggctgaaagggttaacacaaagtatggttcttcaagttacaagcctgtcgtcctaattgataatcgcataccgttttatgaaaaggttgcattctatgccgcgtctgactgttgtattgtaaacgctgtgagggatggcatgaacttagtaccatatgagtatactgtttgccgacagggaaacgaggagatcgacagagtcagaggccttgacaaagacacccatcacacaagcacacttattgtttcggagtttgtgggttgctccccatctctgagtggtgctttcagggtaaatccttggagcgtcgatgatgtggcggatgccttgtgccgcgcaactgatctatctgaatctgagaaacggttgcggcacgaaaagcattatcgctatgtcagtactcatgatgttgcttactgggcgcacagctttgctcaagatctggaaagagcatgcagagaccattacagccgaaggtgttgggctattgggtttggcctgaatttcagagtcattgctctttctcctggcttcagaaagctttcttcggagcactttgtttcttcttataacagggcttctagaagggcaatatttctcgactacgacggcacacttgtgccccagtcgtcaatcaacaaggctccaagtgaagaagtcatctccattcttaacaccttgtgtaatgatccaaagaacgttgtgtttatcgtaagtggacgaggacgtgattccctcgacgagtggttttctccatgcgagaagctccgtctagccgcagaacatggctattttatcaggtggagcaaggaagctgcatgggagtcgagctattcgagtccgcggcaagaatggaagcacatcgctgaacctgtcatgcaggtatacaccgagacaacagacggatcttcagtcgagtcgaaggagagcgctctagtgtggcactatttggatgcagaccatgatttcggttccttccaagcgaaggagctaaaggatcatcttgagagggtgctatcaaatgagcccgttgttgtgaagtgtggccattatatcgtagaagtaaagccgcagggagttagcaagggtcgtgctgtcgacaagctgattcaagcactggccaacaacaacgggaaggcacaggatttcctgatgtgcgtcggcaacgacagatctgacgaggacatgttcgaatgcatcaacggtatggcctccaacgatgtctcatcgaccacagtaccggaggtgtttgcctgttcggtcggccagaagcccagcaaagcaaaatactatgtggacgacaccagcgaagtgatcagattgctcagggatgcaacccgcttctcatcgtcgcagcggagggaggacgtcaacgccagccgcgggcgtgtgaccttcagagacgcactcgattacgtggactaggcaccagcagcaattcttagttactcgaaatgattagctgcggagcttgtaaattccgctgtcttctgtctgccaatggttttcgttctagagaattgtagtgtagccgacatcgacatggatcgtcgtcaccgatacacgaacagcggaaatatgagttgaagttcgccgtttcgaggctcagaattggtacatttatagaattgtagtgtaggcaattttttggtagggaatagtaattggtacatttatagaattgtcaattgtttttcttctaccgctgataatactatagcttcgctaaattaatattattgtttcacttagcgatgaaatatatttagcaccactgatattgatcaacg

SEQ ID NO: 22842 - DNA, 645 bp, Zea Mays
agatgaacccacggggcccaacttttcctgctgcatgaacgtgagatcgtctggccctgcggtcctgccgtcctggtggactcctaccagccatgccgtcttccttggccggcgcggcggcgcctatcggcggccgcgttgcggggctgtcctgatggagacgtcaatccccacccgagagttcatggatcgccgataatgaatgcctcatggctgcagaggctggtgacgtcgactctgcgaggttatccaaacaatgcccatttgaaggagctggagaaggccccagagaatctgtatctgttcaaggctgacgagccagaccacgacacgctaacagctgcagttgagggatgcgaggggatcttccatctcgccactccggcggtgcctgaagataagattgttgatcctgagcgtggatcgttaacatgtcagaagctgatggatctggctgggaaccaaggaaacggtcttggacacagcgttgagcgctctgaaaaaggcatggcttctccaggctgtggccgggcgtccctgccgccttccccatctcttccgtcgatctgtcatgtgacgatataggagattgatcagttgcaatcatggtgaaaatttgattgtagtattggtttttcatcctcc

SEQ ID NO: 22843 - DNA, 7273 bp, Zea Mays
gtctgaacttcacagggtgaaataatggcggagccctaccaactgaacggcatactgaacgggatgcctaatttgagtcatccatcctctccatcagaggtcgatgaattctgtaaggcacttggtggtaactcgccaatacacagcgtgctagtcgctaacaatgggatggccgcggtcaagttcatgcgcagcatccggatatgggccctggagacctttgggacagagaaggccattcttttggttgctatggcaactccagaggacttgaagataaacgctgagcacataagaatcgctgatcagttcatagaagttcctggaggaacaaacaataacaactatgcgaatgtacagcttatagtggagattgcagagagaactcgcgtatctgcagtttggcctggctggggtcatgcgtctgagaacccagaacttccagatgctctagatgagaaaggaatcatttttctcggaccaccatcagctgcaatggctgcactgggtgataagattggttcttctcttattgcacaagcagctggagttccaactcttccatggagtggatcacatgtaaaagttccaccagaaagctgccattcaattcccgaggagttatataggaatgcttgtgtttccaccacagaggaagcagtggctagttgtcaggtggttgggtaccctgccatgatcaaggcatcatggggaggcggtggtaaaggaataaggaaggttcataacgatgatgaggtgagggcgctgttcaagcaagttcaaggagaagtccctggctcacctatatttattatgaaagtggcatctcagagccgacatctggaggttcaattgctctgtgataaacatggcaatgtggcagcactgcacagtcgagattgcagtgttcaaagaagacaccaaaagattattgaagaggggccaatcacaattgctgctccagacactgttaaagagcttgagcaggcagcaaggcagcttgctaagtgtgttcaatacgttggtgctgctactgtagaatatctgtacagcatggaaacgggcgagtactattttctggagcttaatccacggttgcaggtagaacatcctgtgactgaatggatagctgaaataaacttgccagcagcccaagttgcagtcggaatgggcatacccctttataacattccagagattagacgcttttatggaatggatcatgggggcggctaccataattggaggacaatatctgctgttgcaactaagtttgatttggataaagcacagtcagtgaggccaaagggccattgtgttgcagttagagttacaagtgaggatcctgatgatgggtttaagcctacaagtggaagagtggaggagttaaactttaaaagcaaaccaaatgtttgggcctatttctctgttaagtctggaggagcaattcatgaattttctgattcacagtttggtcatgtttttgcatttggggaatctagatctttggccatagccaatatggtacttgggctgaaagagattcagatccgtggagagatacgcacaaatgttgattacacagtggatctcttgaatgcaacagaataccgcgaaaataagatccatactggttggcttgacagcagaatagctatgcgtgttagagccgagaggcccccatggtacctctcagttgttggaggagctctatatcatcaagcaggagctcaagcgttattactgattatgttggttatctcagcaaaggtcagataccaccaaagcacatatcgcttgtcaatttaactgtaactctgaacatagaggggagcaaatacacgattgagacagtaaggggtggaccccgcagctacaaattaagaatgaatggatcagaaattgaaacagagatacattcactgcgagatggtggacttttaatgcagttggatggaaacagtcatgtaatttatgcagagacagaggctgctggtacacgccttctcattaatggtagaacatgcttactacagaaagaacacgatccttcaaagctattggctgatacaccttgcaaacttttgcggttcttggttgcggatggctctcatgtggatgctgatacaccatatgctgaggtggaagtcatgaaaatgtgcatgccactgttgctgcctgcctctggtgtcattcactttgttatgcctgagggtcaggccatgaaggcgaatgacctgatagcaagattggaccttgatgacccatcttctgtgaggagagccgaaccatttcatggttcctttcccaaactgggacctcctactgctatctctggcaaagttcatcaaaaatttgctgcaagtgtgaattctgcacacatgatccttgcaggatatgaacataatatcaatgaagttgtacaagacctgctaaactgcctagacaaccctgagctcccttttctacaatggcaagaacttatgtctgttttagcaacacgacttccaaaagatcttaggaatgagttggatggtaagtacaaggagtatgaattgaatcctgacttctgcaagagcaaggatttccctgcaaggttgctgaggggggttattgaggcaaatcttgcatactgttcggagaaagatagggttacaaatgagaggcttgtggaaccacttatgagcctggtcaagtcatacgagggtggaagagaaagccatgctcgtgttgttgttaaatctctatttgaggagtatctgtcggttgaagagctcttcaatgataaccttcagtctgatgttatagagcgtctacgccttcaacatgcaaaagaccttgagaaggttgtatacattgtgttctcacatcagggtgtgagaagcaaaaataaattaatactgcggcttatggaagcattggtatatccaaacccatctgcttacagggatcagttgattcgcttctctgccttgaaccatacatcatattctgaactggcacttaaagcaagccaacttcttgagcacactaaattgagtgaacttcgcaccagcatagcaagaagcctttcagagctggagatgtttactgaggaaggagagcgtctgtcaacacctaggagaaagatggcgataaatgagagaatggaagatttagtttgtgctccactggcagctgaagatgcccttgtagctttgttcgatcacagcgatcctactcttcaacggagagtagttgagacatacatacgcagattgtatcagccatatcttgtaagtggaagtatccggatgcaatggcaccgagctggcctaattgccttatgggagttctctgaagagcatcttaagcaaagaagtgggcaagatgtgcccctacagcaagtagaaaatcccattgagaagagttggggcgtcatggttgtaatcaagtctctccagtttgtagcaactgcaattgatgttgcactgaaggagacttcacagtacggaattggtgtcagaagtgtctctaacagtaaccatgtacattctaatcaaagcaatatgcttcatattgctttggttggtatcaataatcagatgagtactctgcaagacagtggtgatgaggatcaaacacaagaaagggtcaacaaactattcaagattttgaaggataatactattacatcacatcttaatggcgctagtgttaaggttgtcagctgtattatccaaagggatgaagggcgtccaccaatgcgacactccttccaatggtctgttgacaaactttattatgaggaggatccaatgcttcgccatgtggaacccccgttgtctacattccttgagctggaaaaagtaaacttagaaggttacaatgaagtaaaatacactccatcacgtgatcgtcagtggcatatttatacgcttatcaagaacaagaaagatcagagattaaatgaccagaggatgttccttcgtaccatagtcagacaaccaagtgcaacaaatagtttcctgacaggtaatattgacaatgaagtagggcacacacaagcttcgtcatcgttcacatcaaacagcattctcagatcattgatgggagcactagaagaaatagagctacatgctcatagtgagactgtgagatcaggccactcacacatgtatctgtgcttactgagagaacaacaattgcatgaactaatcccgttttcaaggatgactggtaaaattgataaggatgaaggaactgtgtgcacacttttgaagcatatggtattgaatttatatgaacatgttggggtcaggatgcatcgtctttctgtgtgccagtgggaagtcaagctctggttggtttgtgatgggcaagctagtggtgcttggagagttgttgttaccaatgttactggccacacatgcaccattgatatttaccgagaagtggaagaccccaccacacatcagcttctctaccactctgccacaacctcggctggtcctttgcatggtgttgcattgaatgaaccatacaagcctttggatgctattgacctcaaacgttatgctgctaggaaaaatgaaaccacatactgctatgattttcccctggcatttgaaacagcgctgaagagatcatggaaatcaagtagctatggtgttagcgaagctaatgagcacaatcgattctatgctgaagtgaaagagcttatatttgctgattcggttggagcatggggcactccattggtttcagttgaacgtcctccaggcatcaatgatattggcatcgttgcttggaacatgaagctgtccacgccagaattcccacgtggccgggagattatagttgttgccaatgatgtgacatttaaagctgggtcctttggtccaagagaagatgcattttttgatgctgttaccaatcttgcctgtgagaggaaacttcctcttatctatctggcagcaactgctggtgccaggcttggtgtagcagaggaaataaagtcatgcttccatgtcggctggtctgattatgagagccctgaacgtgggtttcagtacatttacctcactacacaagattactcacgtctaagctcttcagtaatagctcacgagctgcaactaaaaaatggagaaaccagatgggtggttgataccattgttggtaaagaggatggacttggttgtgagaatctccacggcagtggggcgattgccagcgcatattctaaggcatacaaagagacctttactctgacatttgtgactggaagagctgttggcattggggcttatctggctcgtttaggcatgaggtgtatacaacgtcttgatcaaccaattattttgactgggttttcggcactaaacaagctcctggggcgggaggtgtacagttctcatatgcaattgggtggccccaaaatcatggctacaaatggcgttgtccaccaaactgtgtcagatgaccttgaaggtgtttctgctatcctgaaatggctcagttatgttcctccatatgttggtggtcctcttcccattatgaaacccctggacccacccgaaagaccagtaacatacctccctgagaatgcttgtgatgctcttgcagccatctgtggcattcaggatggtgaagggaggtggttgggtggtatgtttgatagggaaagctttgtggaaacattggaaggttgggcaaaaacagttatcaccggaagagcaaagcttggtggaataccagttggtgtcatagctgtagaaacccagactgtgatgcaagtcatcccagctgatccaggtcagcttgattccgctgagcgcgtagtccctcaagcaggtcaggtttggttcccagattctgcaaccaaaacagctcaggcattactggatttcaaccgtgaggagcttccgctgttcatcctagcaaactggagaggtttctctggtgggcaaagggatttatttgaaggaatccttcaggctggttcaacaattgttgagaatctgaggacatacaagcagcctgcttttgtatatatcccaatgggtggagagctacggggaggggcctgggttgtggtggacagcaagatcaatccagaccacatcgagatgtatgccgagaggactgcgaaagggaatgtccttgagcccgaaggattggtggagatcaaattcaggccaaaggaactggaagattgcatgctaaggcttgacccagaattgattggtctgaatactaggctgaaagagatgaagaaacaaaatgccagcatctcggaaatggagaccatacggaggagtatgactattcggatgaagcagttgatgcctatttatactcaggttgccacacgatttgccgaattgcatgacacctctgctagaatggccgccaaaggtgtgatcggtaaggttgttgattggaaagagtctcgggccttcttctacaggagattgcgaaggagagttgctgaggatgccctggccaaggaagttaaagaagctgctggcgagcagctttcccacagatcagcattagactgtatcaagaaatggtatctagcgtccaaaggaactgaaggtgatggtgaaatgtggaatgatgatgaatctttctttgcttggaaggatgatcccaaaaactatgagaattatcttgaggagttgaaggctgaaagagtatcgaactggttctcgcatcttgctgaaagttcagacgtgaaagctctaccaaacggtctttcgctgctccttaacaagatgaatcctttgaagagggagcaggtcattgatggcctcaggcagcttcttggttgatcgatggtggcaaagtggagcatgaagccctgtttagttgggaacggattgttctggttgtagtcatgtatttagctgtttaacatgtatttaattgggtggcgttactccacgtcatacggtacaacagcaatcctgatcaagtgattatttattcttcaatcgaagtagtacatgattttcatcagtaagctttgtgcttgcaattagggataaaatcggatggaaatgaactgaaaaacactcattttcgtttctatattttttttataaaaatggattctaattcagaaaaaccgtgagcaaaaacataaggttctcggtaaagaagggatttggacagcgcatatattgaaagaccggtaggagatgcaatagagacccgattctcgatttcttgtggaggatttctctattaggaataaaaaacggggaagtttctttctccacatgaa

SEQ ID NO: 22844 - DNA, 135 bp, Zea Mays
cataaatattacattaattcatgcataggaatgaagaaacaacttcaaaaacattattgttgtgataaacactccagatagtacaagtttaatgacatggctggcttacaagctatgaagataaatcattttgaa

SEQ ID NO: 22845 - DNA, 834 bp, Zea Mays
gttttgtgaatgaattagtggtaatagaataaacatagaaggcactttctgtttgccgtgttccgcaaggaagagagctagttatagatctttccgagtgtacagtttatttggagggaagaaggataaagatgagaatggcgatgaagcgccatcgaaagcagggatttttggaaacatgcaaaatctctatgaaactgttaagaaggcccaaatggttgtccaagttgaggctgtccgggtgcagaaggagcttgcagcgttacactttctggaaaccagcaacctattagagttgaaatcacagaagctgcaatggagttgggtgctgaaaaactttcggagctggtcaatgatgcatacaaggatgcgcatcaacggagcgtccaggccatgaaagagaggatgtctgacttggcacagagcttaggaatgcctgcgggccttggtgatggtctcaagtgatgctgcctgccattcgggaagcctttctaataatttttttccctcaattttgaatacgagccgtgtgggcacctctcgtagtcacgtagtaagaagtgtactcgtgaccagctgtttcgttcagcgttagctgtgattttgttttgtacaagcagatatatttgcactaaatcgtggtaacgtcgtcctatggaactcggatatcacatgtggtatgctaatctgcaagatataggggatatgcaccgaaaccaatttaaatcgtgtgataaatgatgtacattgtgtgtgtaacaaattaatgaattatgtttttttatacacccttttttttaacgtgaacgtaagggaccagattgtaaaatataa

SEQ ID NO: 22846 - DNA, 1312 bp, Zea Mays
cgggcgagatattttttgccaagctggcaggcacatgacacatcgccccagccccaagtccaaagccgcgagaggcaggggcgcagcaaaaccctagccgccttcccgtccttttcctttcataaaccccaagccgcgccgcaatagctcgccccctcgttcgccgcctctcctgctcctaccgcagctctccctcaggtttagtgttcgcaatggcggccttcaacaagcttggtggccttctaaggcacagtgctctggtgagcggtatcactggtggctcttctcctgcagtgttcaatgctgcacggctcatgtctaccaagctatttattggtggtcttgactggggtgttgatgacgtgaaactaagagaagcatttagcagctttggagaggttactgaagcgagggtgatcacagacagggagactgggaggtcaagaggctttggctttgtgaactactccgacagtgatgctgccaaggaagctatttctgcaatggatggcaaggaaattgatgggcggcaggtacgtgtcaacatggctaatgagagacctgctgggaaccgtggtggcagccaaagctatgatgcttgaggggggcaggatcctattaagtgcattatcaaccaagatatttgaaataatgaactttaggacttggtatgacgttttatgttaagcattgtcaggttttgctattcgtgttatgctgaattgttggaactcctagatgcagaatattacgtattggttttggttccttcgagaagtgcaaatgcaagacgcatctattcccattgagtgaatacaggactaccacatgaagtatttgcttgaaaatttgcttagctaccctgtttattggtgggttttgtgtttttagtgtagctactttaattggaggtctacattcatcttgtctgttctcatcaattgaatttttttcgaatgagagcggttgtgctggctacaataaccttatcattcatatagaggacttaaagccaatttaacataaaccaaaccattgtcaggtttaagccaggtcaaaggatttggcgtctgaacatgacggaattttccttgtgccactcatattgattactgtgctcgttttttcctcctagacttttcctacctggaaaattaatatacagttaagtttttgtacaatcaaactatcaaaaaaaatcatatttgttttaaaaaagcataagctttaggagccatataaattaaacggactcgcagatacgtgagataggaaccctattagttcataattagccagttgtctgtgtttt

SEQ ID NO: 22847 - DNA, 168 bp, Zea Mays
ggtgcaggcatttcgaggtcttcgaccagtcgaacgaaggcttcaaacgcgaaatcttccaggtcgaggacccggttctgaagcggtcggcgggggcgctcttcgacaggatgtggggccctcacggtcaagagacgatctgggagaggtccgaccgggcaatggatc

SEQ ID NO: 22848 - DNA, 2639 bp, Zea Mays
agccaaatcagtgggctgctttgagcggtactcgatgctgtcgtgtcgtctgccgacctgtcacgaggagacaattctgttcttttttaaaaaaataaaataaaataaaaacacgtttcgagggagaaacaactgcaatgccgatgtttgcagtcgatgtacggtgccaaaatttctcaacgtgagattttactgtgttgcgccctcaggggaggacggcgtcgcgctgcggccgaagacggccgtgaagaccgaccccgagctggtggcgctgctcaaggaaggcggcggcggcgcgagtgccgaccgcgcccgcgacttcctcctgacgctggcgacgtgcaacaccatcgtgccgatcgtggtcgacgacgacgacaacgactccgcggcggcggcggccaggctcctggagtaccagggcgagtcccccgacgagcaggcgctggtgtacgccgccgcggcgtacgggtacaccctcgtggagcgcacctccggccacgtcaccgtcgacgtgctcggctccaggcaaagatatgatgtccttggtcttcatgagtttgacagcgatcgcaagaggatgtctgtcataattggctgccctgataagtctgtcaagctgtttgtaaaaggcgctgacagttcgatgtttggagtcatcgacaaaactgcgaattcagatgttgtccaagcaacagagaagcatctccattcatattcatcattaggtctgcgaacacttgtcattggtatgcgggaacttagccaagaagagtttcaggagtggcaaatggcttatgaaaaggctagcacggcactactaggaagaggaaaccaactccgcaacgtggctgccaacatcgagagaaacttgcgtctattgggtgccactggaattgatgacaagctgcaggatggtgtacccgaagcaattgagaaactgagggaagcagggattaaggtttgggtgctaacaggtgacaagcaagaaactgctatctccatcggctattcctgcaagcttttgacaagagacatgacacagattgtaattaacagtcgctcaagagaatcatgcaggaagagtctagaagatgcaatcgccatggttaacaaataccaatcgttctcgacagacccccaacttagggtgccccttgctttgattattgatggtaacagccttgtctacattttcgatacggattgggaggagaagctttttgaaatcgctatagcctgcgatgtcgtcctatgctgtcgggtagctccccttcagaaggctggtattgttgatctcattaagaagcgaacaagtgacatgactttagctattggagatggtgcaaatgatgtatccatgattcaaatggctgacgttggcatcggcatcagtgggcaagagggaaggcaagctgttatggcctcagattttgccatgggtcaattcagatttttggttcctctgttgttggttcatggccattggaattaccagaggatggcctacatgatcctatataacttctacagaaatgctacttttgtctttgtgctattctggtatgtactttacactggtttcaccctaacaacagcgataactgagtggagcagcgtgctatactctgtgatatatactgctgtccctactattgtcgtcgccattctcgacaaggatctcagccggcggacattgctgaagtatccccaactctatggcccagggcagcgtgatgagaactacaacctgaggctattcatattcatcatgatagactccgtctggcagagccttgcatgtttcttcatcccctaccttgcatacaggaagagtataattgatggttccagccttggagacctatggacactatccgttgttattcttgtcaatattcacctggcaatggatgtcatcagatggaactggattacgcatgcggcaatatggggtagcattgctgcgacatggatttgtgtcatgatcatagattccataccaatcatgcctggtttttgggcaatctacaaagtgatgggaactgggctgttctgggcactgctgcttgcggtaactgttgttgggatgattcctcattttgccgcaaaggccttcagtgagtatttcatccccagtgacattcagattgcaagagaaatggagaagtcgcaagatttccatgatgtaactcatccagaagttcaaatgagtacagtgagtagagcttagggtagggggttacacagtgatcttttgttcattcgagtaggatatagctctacactttctttggttctttttgttgtgtgtacaggcaattctttcagcagtgtgcaagctttcttgatgcttgctcccttgccaactatccaaaggataggccccttgtaccattctgtgtatccaccagccaaattttgttgatttacatgaaaggagatcatacaggagctattattatattatatattatatataatatacataataattaataacaataaattctgcagttcggaacatgttccccgccggagagccacgtcgccttaatttcgtccgccgttagattctcgtgcacaacgtcgattcacgcaagaagcaactaccttctccagccgagccgggcttcgtc

SEQ ID NO: 22849 - DNA, 1164 bp, Zea Mays
tgagcagctcaagaatcctgatattactggactcgctacccttgtagtaaagaaatgaggggttgtgacttgtatattgtcaaggatcacttggatgtggtaaatgctatactggacactgatgatagctgcataaggattgtgcggaaaaacgggaagacatccctacatactgctgcaaggattggataccatcgtattgtcaaggcactcatagagagggatccaggaattgttccgatcaaggataggaagggacaaactgcacttcacatggctgtgaaaggcaagaacacagatgtagtggaagagttactgatggctgatgtttccattctcaatgtgcgagacaagaagggaaatactgctttgcacatagctacacggaaatggaggccccaggtatggttcttttcaggtgtcttttacaagtagtttgctatttcagttttagctgactataacctgcattgagagctataacgctgttatatctgtaaggcgtggtttcaatgtgtagccaattttttatttatttgcccttattttagagttacatctgcgtggacatattgttttcttacagctgtctgaagtttagtagctgtctgaagtttagtagctgtctatcttgtttttcagggatctggaataacaggagcctgatggttgcatcagtagagttgaccacttctcagtattgcgagatgcatcttacatggtccagaagataattcctattctgaactacttgctcgtgttgatcagttttgcctagtcccagtaccatacaaagatgttcagctggatataaacatttctccacgtctctcttctgaatacataagttatctggaaaatcctgttgagttgctcaatgaagcggcaaaagctgcagagaaagatctatggaaaatcctgttgagttgctcaatgaaggcttttgcgaatcacttgaagtgttagtacttttgtgaatgattttgtaaagtgtttgtaaatatgtgcaaaacataataacatgtgtaggttttgtgaatgattttgttgtggtgcttgttgatggtttatgtgatgtggatctatcattgtgcaatactaattaaatttgtatatctatgtgattatgtgtataaaaattggtgatttgtgatgcttttgtat

SEQ ID NO: 22850 - DNA, 1313 bp, Zea Mays
tcaaggtttatagatggtttcagtaatcatatcatatcatcggtggaaaatgcaattaagaacaaagtaatggaaggtgcactgaagcttgattctttcctgggaaacctcccaaagaaaattgatcttgatagtgttgctgcaatgaatgtgactgttgttaatgatccaatattcaagagctcctctgttgagtttgatatagatggcttgtttattccatctgatgaaactgctccgagagacatgcatcttggagatacccaatttgcattacctcttgggagctcctcaaaaatgctttggatttcattggatgaagatgtcttcaactccgtttcagctctctacttcaaggctggtttgctgcaacggatggtggacaagattcctgatcagttttttctgaacactgctagctggagatttttggttcctcgattgtatcgagagtttcctgacgataatatgctactgaatatctctgcagtttcgcctccctctgtgagaattaatgtgggtagaattgatgccacagttgacttagatataacggttaatgttttggattttggtgagatagttccagttgcatgcttatcagtgtcggttgatgtttatggagctgcagcagtatcagagaataatcttgttgggagagtggaattggactatttctcatttaccttaaagtggagcaaagttggcaaactccacaccattctagtgcagactgtgctgaggattttgctgaaaaaattgtttgtaccatatgtgaactcgtatctcaagcatggcttccggttgcccatcatcaagggtttctccgtcacagatgcatatatcctcacttcttactcaagaatgattgttagctgcgatgttgccttcattgagccagaggttctgtctcctgtccaagagtccaacaccaacgaagatttgtcatatgaggttctgtctcctgtccaagagtccaagaccaacgaagagttgaccaacgaagatttgtcatttgaggttctgtccagtttactgcttggatctgccaaaacatcgcaaccaacagcgtaaaattcatgtaaatagtaaagctattcatcagtttattgctttgtaaaatgtgtaaataactgtgtattgtgtgtgtagttttttttaaaaaagtttaccatgtccctacatgagagcacctttctttttctttttcttcagcctcacgatcagacttcttattttgcttcgcttctctatgaatataagattggcagaattcctaccagcacttagaaaaaataaagtttaaacttaac

SEQ ID NO: 22851 - DNA, 1282 bp, Zea Mays
cattgaaatgccacagccagaaaaaaagaagaggtcattgaaatgccacagccagaacagcatgagtatatgcactaaccaaagagcgtgatacactaaggagagaacagaataaaaaaagtgatgcagctgcccttttgaaagaaaaggatgagatcatcaatcaggtcatggctgaaggtgaagaactatccaaaaaacaagctgctcaagaagctacaatacgaaaactgagagcacagattcgtgagtttgaagaagaaaaacaacgcctgaactcaaagatccaggttgaggaggctaaggttgagagcatcaagagagacaaagcagcaactgagaagttgcttcaagaaacaatagaaagaaatcagactgaacttgcagctcaaaaggagttctacaccaatgctcttaatgcggctaaagaggctgaggcattggctgaagcaagagtcaacagtgaagccaaaattgaactggagaatcttttaggagaagctggtgaaaaagaaaatatgctgattaagacaatcgaggagttgaggcattttctcacccggcaagaacaggaggctgctttcagggaaaaaagactaaaaggggactatgatgatcttcaaaagcggtatcaagccagtgaacttcgttataatgaactggtaacgcaagttcctgagtctaccagaccgcttctaagacaaattgaagccatgcaggagacaactgctcgaagggaagatgcttgggctggtgtggagagaaccttaaactctcgccttcaggaagcagaagctaaagctgcttcttcagaagaaaaggagcgatctgtaaatgagagattgtcacaaagtttatcccggataactgtccttgagacccagattacaattcttagaacagagcagacacagctgagccgatctcttgaaaaggagaggcagagagcatctgaaagtagacaggagtacctagcaatcaaagaggaggcagcaatacaagaagggcgagctaaacagtttgaagaagagatgaaggagcttagagctaggcacaaggaggagctgcaagaagcagcagaacacagggacctgcttgagaagggttctaggccttgtgttcaaaatgtggtgttagcaagtggtcgaggaagggcgcacttggtgcttggctgggtcttcagccctccaagacctgctgtgtcagctcccctcggggtctccaccgtaattcggtgaagctagtggtcgttctctaccttgtgtgtggcgcgctgttctta

SEQ ID NO: 22852 - DNA, 731 bp, Zea Mays
atacaaataactttcttttgaggcagtgtaaccacagatgcctttatccccttccattccgattttttgttgaattcaggttcttgatgatgttctaatctacaaatgtgttagaagatggtcggatcctgtgtgactggcaagatttaccatttaaaaactatgcccccggagaatgaggagaattctatccgacttattacacgttctgatgccacatttgagaagagccagaactgagcacctacaacccttttaatatcgtacaactgacctgttacctagggggaaacactgcatgactgttgttggtatccttgtctgatatgaggcggagcgagcgattcttgcaggaggagagagtgattctcctagaggtggaggaggatgaagtggtgatagacttcaagccaactccaagtgtcgtgtcgacctctgcctccgctccctgcacacatccctcccggtcgtcttcaaggtccagacctcctccccgctcaagttcctcatcagcacgttgcgtggtgtcatgtcgccgctttcctcagtgtccatacgcgtcgtgcgaggcatcccgcttcatctctaatcacctttatgtgcacatcgtccatatgtgacccccttctccatataatttcaacaagttttactcttttgggctccgtgtaagttcattagtaaaatctctactaattattaatgctgcaaagttaacctgtcattctgtg

SEQ ID NO: 22853 - DNA, 416 bp, Zea Mays
gccagacggacttaaaatattttatcatcacgatcgttgtgaaaaatgaatagagaaaaatgaaatagaatggcagaaaacctaaacgtgaggttggcgaaaagagaaaagaactagagcatcccgtggagagaaggcggcggcagcgcctgtgggagatgtcaatcctgtgggagaagagcgcgggttggcgatggctggttcggcggacgcgtgactcgaagcccttctttttcacgttcgcggcgctgtgcggcgtcgtccccggcgtaatcggctacggcgtgatgcagctcaccggctcccgcaacgagcagctcgaggcccaccttcgctccacggcccgtcccgagaccacgatgtttacatttgtgactattccatggtccccgccgactgacgaaacacgtggcaag

SEQ ID NO: 22854 - DNA, 1375 bp, Zea Mays
tcgatttgaacctgccgctgcgagtccacagcgctgcgcaggcggcactgcggcaggctcttcctccctctcctctctctctgtctgagccgagggctttggcgctcccccccccccccccccccccctctctctctctctctctctcgcacgggcccgcctgcctatcccactgcccggtccaccgccgcaaactctgcccgcccgcgcgcgccccaccccgccgatcgcggtgagcccggactccgccgccgccgcttcgctctaccctgaccagccctagatctgtgcgggatccgccgccatgttctggcgcatgaccggcctctccgcggcctcgcccgtggatacaattctggacaaggagaactttacattggaagagcttcttgatgaggatgaaatcattcaggagtgcaaagcgctgaatacccgactcataaatttcttgcgagataaggcccaagtgtcgcaattacttcgttacattgtggaagaagttcctgaggattcagagaagaaacaatctttcaagtttccttttatcgcttgtgagatttttgcttgtgaaattgacattattttgagaaccttggtagaggatgttgagttaatggatttgcttttttcatttataaaacctgaccatccgcatagcacactgttagctggttacttcagtaaggtggttatatgtttgatgcttcgaaagactgctcctcttatgaattatgttcaggagcatccagatattgttgtccagcttgtcgacctcattggtatcacatcaataatggaggtgttggtgagattgattggtgctgatgaaaccatatacttgaatttcgcggatacattgcattggttagagaatacatatgtactggaaatgattgtggataaatttagctcatcagactctcctgaagtgcatgcaaatgctgctgaaattctttctgcggtaactcgatgcgcccctcctgctcttgctgcaaaaatatgcagtccaagttttgttggcaggttgtttcatcatgctcttgacgagtcaagaccaaaatctgttctggttcattcattgtcagtgtgtatatctttattggaccccaaaagactagcatcagtctcataccaagcatttagaagcaacttaactcacgggacgctggttacagccagtccagaaacagttgatggtatactggagagtctaggtgacttgctgaagttactggacattacttcttctcaaaatgtttttcctacaacttatggatgtttgtgtccgcctcttggaaaacaccgtttgaagaaatcttcccccaccactcagcaaaggactgatcagcaacaaccggagtgaggtcacaaagcc

SEQ ID NO: 22855 - DNA, 1187 bp, Zea Mays
ctctttgatgccacttatcctaaggagttgcgaggaagattgcttcagctggatatggagtatttgcactggactaccctggctttggtctttcagaaggacttcatggatatattccaagttttgatacacttgttgatgatgtagctgaacacttctctaaggtcaaaggaaatcctgaatatagaggcctaccgagctttctgtttggccaatctatgggtggagcagttgcattgaaggttcacttcaagcaaccaaatgaatggaatggtgcaatactggtggcaccgatgtgcaaggtagttttgtctttgtggaatattatatatacaagttaatgccttcccacttattcacaaactcattccaatagatagcagacgatgtggttccaccttggcccattcagcaacttctaatttttatggccaaacttctgccaaaagaaaagcttgttcctcaaaaggatttagctgagttggcattcaaagagaagaagaaacaagagcagtgttctttcaatgtgattgcctacaaggataaaccacgtttgcgaacagctctggagatgctgagaacgacacaagagatagaaaggcgtctagaagaggtttctttgcccttgatcattttgcacggtgaggctgatatggttactgacccggcggttagtaaggctctgtatgagaaagccaagagccaagacaagaagctgtgcctctacaaaggtgcgtatcacgctatcttggaaggtgaaccggaccagacaatattccaagttctcgatgatatcatatcctggctcgatcagcattccacaaaagaaggtatatcgttgtgaatcaggcagcgctgttcaccaggattgggtgaattcctttggcaatgctgtatcgcttccggttggggatcccagattcaacggtggggattccatttttgatatgaccctgtaaaatttttagttcagattatcgatgtctccgtcatgtacctgaacgatgtagacgtacatatatgtaactgattaatgtgtatcaattgaccacgaattatttgggaaaacctcagttgcaaaacgccttttattttatcacaatttctatcctagagaggtgtctgaaagtgagatgaactagcaataaaggaggtgttctgatgaactagcgataatggagaaggtg

SEQ ID NO: 22856 - DNA, 2119 bp, Zea Mays
cccaccccactctccttctcctattctatctatatatcacccgcctcttttttctccctcactccgccacaccttccctcttcttcctcagctccgtcgcccaccgccggagctccgaaaggccccgcgcccgccgcctttcctgtaaaaaacccaacctttagctagctaaccgctcctcttctccccctactccccttgcccaaatcagagaagatatttaacggaggaggggaaggagaggatatttagctgattgttgattggtggtccggggtacggtgttcttgagtcgtgaagcgaccgtacagtggctagggccgtctccgggttgcgtgcaggatggtcgtcagagatcgggagtgaggaggcagctcgtggtcgtggaggctaaatgtaccgcaagaacgactcggcactctcctgtttctacctcttcctcctctggttcttcttcttgaaatagaccagcgccagccaccaggtagctacctactagctagcagcccagttgcgactggggacgggctgctgcttgcaagttggaatcttggagcaggagcagaggagcgggagatggagctggatctgaacgtggccgaggtggcgccggagaagccatcggcggcgctggaggcgagcgactcggggtcctcgggctcgtcggtgctgaacgcggaggcggcatcggcgggcggcggggggcccgcgccgggggaggaggggtcaagctcgacgccggccgtgctcgagttcagcatcctcaggagcgacagcgacgcggccggcgcggacgccgacgacggcgacgccacgccgtcgccacctcgccaccaccagcagcagctcgtcacccgggagctcttcccggcgccgcagcattgggccgagctcggcttcttccgcgccggcccgcagcagcagccggacatcagggtcctgccgcacccgcacccgtacccgcccccgccgccgcccgcgcagccgcagcaggccaagaagagccgccgcggcccgcgctcccgcagctcgcagtaccgcggcgtcaccttctaccgccgcaccggccgctgggagtcccacatctgggattgcgggaagcaggtgtacttaggtggattcgacactgctcatgccgctgcaagggcgtacgacaaggccgcgatcaaatgcaacggtagagaggccgtgacgaacttcgagcccagcacgtacgacggggagctgctgctgactgctgaagctagcgcagaagttgctgacgacgttgatctgaacttgagcatctcgcaaccggcatcgtcccagagccccaaaagagacaagaactgccttggtccgcagctccaccaccaccatgggcggccgtttgacggctccgccgttctgaagaaaaccaagatcgatgctccgtctgagctgtcgtcggcgggccgccctcaccggtcgttcctccctcatctcgtggctgccgagcatctaccgcctcggtctcaccccttcttcatcacacaccatgagagtgatgcatcaagaagagatcccagctgggcagcagcagcagcatggaaggtgaccgcagctgcacctcctcctcctaccaccaccctgttgccgttgccgctgccgtcgacgtcgtccgctgcagcatcatcaggattctccaataccgccacgacagctgccgccgccccatcggccgcctcctcccgccggttcgacccgccgccaccgtcgtcgtcctcctcctcgagccatcaccaccaccaccaccgccgctgagaatcgaagaagccacactgtaaatctgccgggaagcggctggtggcatccggcccgctcctccctccgggcgccgcaacttttttcgatcggttttgcgccgcccgggacgggttgtagttgatcgattggattcttcataactgtatttgcgtactgcttacactacccaagtgaaatcgaaaatggcgccttctctcgttgaataaattgcacgtacgctactcgatccgctgcggctcttgctggagtggccgccgccgctatagatagaaggatcaagccaaggaatctgtcatgcatgggcatgtgaaggaggagcctcctgcaatgttta

SEQ ID NO: 22857 - DNA, 2730 bp, Zea Mays
caggggcaaaaccgggaaatcctccaagctgaggttgaagccgctcgatttgctcaccagaaattcagattttcgagtggaattcgcttaatatagcaatgcactagggtttactgtgcaccactaggctactgcctctgctattaggaagccgacatctgttgtttccgaagtctttcaagtctctgttgggtggcgttgctattgtgggtgtgataacatgataaagcaatttcttggacgtctccccaagaagccatccaaatctggagataaggatcctattggccggcccagcccctcggtgtcgcaccagccattgggtccgagagctggagacagggccaccaacttgagtagccatccaccggttatctccagctctgggctcagttatgggagtggcatgcatgtcggcaatgcatacacgaaggcacacgtgaacggtgattcggccgcttcagcatttcggtcgttgccgagcttcaaggacgtgcccaacacagagaaacagaacttgtttaatgagaagttgaacttgtgctgcgcccaatttgacttcaccgatccaacaaagaacataaaggagaaggagataaagaggcaaactttggtggagctcgttgactatattgcctcggccagtgggaaattttctgaggcaagcatgcaagagatcacaaaaatggtttctgcaaacctgttcaggacgctgagtactcctcctagagacaacaaagtggatggctttgatgtggatgaggaggagcctgtcatggaccctgcatggccacacttgcagattgtctatgagttgttcttgagattcattcagtctcaagagacagacgccaagttggctaaacggtacattgatcattcgtttgttctgaggctacttgacctctttgattcagaagaccctagggagagagagtacctcaagatgatacttcaccgtgtctatggaaagttcatggttcatcggccctatattcggaaagccattaacaacattttctatcagttcatctatgaaactgaaaaacacaatggaatcgcagagttattggagattttgggaagtatcatcaatgggtttgcattgccacttaaggaagagcataaattgttccttgttcgagctttaattccacttcacaagccaaagtgcatcgcgatgtatcatcagcaattatcttactgtatcacccagtttgtcgaaaaagattgcaaacttgcagatacagttatcagaggcctgctaaaatattggccaatcactaatagctccaaggaggtgctgtttctgggggagttggaagagatattggaagctacgcaacctgcagagtttcagaaatgcatggtccctctcttccgccagatcgcacgttgcctgaatagctcacactttcaggttgctgagcgggcgctatttttgtggaataacgaccacatcgagagtctgatcaaacaaaacagcagggttatattgcctatcatctttcctgcactggagagaaatgccagtgggcactggaaccaagctgtgcaaagcctcactctaaacgtccgaaaactgttctctgacaatgaccctggactattcacggagagtctgcggaaatacgaggaagagaaagcgagagagaaggaggttaagtcgaagcaagaggccacatggagacgccttgaagagatggcatcagcgaaagcgacaagcggcgcggcagttctcgtctctcgacccttatcccggcagtcttcggctgtgtagcgaattttcatgtggtggtcgtgagaacattgtacaggattgagttgtatatacgaggtatattaaggtgggcaaattgacaaatgatatcgtcggagaagccagccagatgggttacagggctaggcacacatcattttcttggtcccgaatctgggcttctgctaagatctacagctggtcgcggtatcatcattatgtttatccttgtcaggagttggctatgattcaattgttttcacctgctggtcctgcagtcttgccatgcatgggtatctgtttctggagacaaaaaatcggtggaagtcgatagaacttagagcctggaaacgagtcgtgctgttgttcttggagtctggaattgttgcgtttctttctagtacaattcatgtgttgtcatcattagaagttaaatcctttgtgctcatcatcatcatacgtatgtggatccaattataaatgcctgataaatggttaagggttcacgatgaagatgacatggattcgtcacgcatgcagctctacttattgtaattggaacgtgcattctgattgtctcaaaatcacggcttcccctggcgggctttcatggccagcaggtccttgaacgctgggcggcagtagccgtcgccactgaagaacatgccggcgacgaccttgtacatggcctccgtcatgtggacgccgtcccagttgacgtactcggcggggcgcgcgcaggccgtggtgacctgcggcgagccgcaggtggcgaagaggtcgaagttgtaggcgccgccgccggagccgcagcaggtgcggaagggctcggcgaagccgtggcgcgcggggctccgcatcacggcgaggtgcgcggcgtagtagtcggcgtacgcgaggacggcggccgggtggcggcggcgcagcgcgcggagggccgccaggaggcggcggttgtgcgcgtagctctg

SEQ ID NO: 22858 - DNA, 315 bp, Zea Mays
taagaactaagaacaacgagttgcgactatggcgagaactagggttttgcagcgaagagtgagagtcgggagaagagggagcgcggtgaatgtaccgtcgtagaagtaggatatccggtctttctccagcatcgcttcactcctgacggccgtggcagcgggagcagagaaaatcaaagtcgcccagattaacagagcccggcccaaactcagcgcggcggcggcggccgcggatggaggtccaaacgagacggaagcgaaagggcgacaagggtggggacgtggggtgaggactggggaatgctctggatcggg

SEQ ID NO: 22859 - DNA, 804 bp, Zea Mays
aatatatcatcggggatggaacgaggagaggacattattgaggagaagcaagctggtggagctgctacgagtgatgagagatcgtcatcccaaaaggtcgccgatggaaagggcgccgagccaccggcggccggagtctcgaaccgcctaaagcctagcgacgacgcagagaagcttgttgcgttcatggaagaccactacgacgacgtcgttgcccgcgtgcaatccttcgacgagttctaccacgccattttcgagctcatcgagatgttctgcgaggaacgtgggcagctgcagtacaggttagcggagaagaaagccctcgaggaggcatacaacaagcaccacaggtcggacggcaaggtgacgaaggaggagttcgaggcgatgagcagggaggtggtgaaggcgggcagcttcagggtggggaaggcgagcctggagcttggcgcgctgctgttcggcgccccggcgtgcgcgctgctggccaagaggatcctgccgggcctgggctggctgtccgacgacgtcgtcgtgcccctcgccacctccggctccgtcgcctacctcatcaagtccaagaggctgtgagcctagctgtgactgtctctgtggaccaagagagggttctgatgtgtattatgagattaatttgcacacgtacgtgcagtggataggactcgatctgcagctgaaacaagcaaagaattatatatataagcatggaatatgtatgatatgtgttagaaatttagtcaatttaatcagaaatctaatcccaaaatagataatgggcagtttttg

SEQ ID NO: 22860 - DNA, 210 bp, Zea Mays
ccggaacccaaagactttgatttctcataaggtgccaggcggggtcctattagtaacacccgctgatccctggtcggcatcgtttatggttgagactaggacggtatctgatcgtcttcgagcccccaactttcgttctgaattaatggaaaacatccttggcaaatgctttcgccagttgttcgtctttcataaatccaagaatttcac

SEQ ID NO: 22861 - DNA, 184 bp, Zea Mays
cacaaatatcattattacatagcagaagtcttacaaaaaaaaataaatgagaacaataaagagaactaagtattattccttagcgccatcaagctgactgggagataccacctagataagcttgtactcctcattgtaaggctcctccaggaccacctgttcttctcatatgggggtttatata

SEQ ID NO: 22862 - DNA, 2083 bp, Zea Mays
cacactccttcatcgggctcggcccgcgcggtcgtgagttcgtgactgcggaggaagtagcgcaggcgaaaaggctgcagcagtggacggcggcgaaccctagcctagctccgcgagtgcgttggcggtttgattcgatggccgtggcgtcgcggctcgcggtcacgcgtgtgtcgccggcggacggcgcgcgccccgcggcggcggcggggaggaggagtgggctcgcggtggttcggctcccgccgaccgacagcagggggagaaggaggaggcgcggcggggccgtcgcggccagccccccgacggaggaggtcgtgcagatgacggagccgctcaccaaggaggacctcgtcgcctacctcgtctccgggtgcaagcccaaggagaactggagggaaagcaaagcatctcactagaacctggaggccaatttgaacttagtggcgctcctctcgaaacgttacatcaaacttgtgctgaggtcaactcacatctatatcaggtcaaagcagttggagaagaaatgggaataggatttcttgggcttggctttcagccaaaatgggcactgagtgatataccaataatgccaaagggaagatacaaaataatgaggaattacatgcctaaagttggtacccttggccttgatatgatgttccggacatgtactgtgcaggttaatcttgacttcagttcagaacaggatatgataaggaaatttcgtgctggcctcgcattgcagcctattgcaactgcaatatttgccaattctccctttaaagaaggaaaaccaaatggatttctcagcctaaggagccatatctggacagataccgataacaaccgtgcagggatgctcccttttgtctttgacaactcatttgggtttgagcaatatgtggattatgcattagatgtccccatgtattttgtgtaccgaaataataagtatattgactgcaccggaatgtcatttcgggtctatttctgtccttgatgtccttttacttctgtagttctgtattgtaaaggttttagatttttttgatcccttcacttacatgacactgtttggtttccattcataaaactcaatttgatttgtatttattgtgcaggattttatgcaaggaaagctccgacaagctcctggggagttgcctactcttaatgattgggagaaccatctaacaacaatttttcctgaggttaggttaaagagataccttgagatgagaggtgctgatggtggcccatggaggagattgtgtgcgctgcctgcattttgggttgggctgctgtacgatgaggaatcattacaaagcattttagacatgacttttgactggacacaggaggaaagagagatgctaagacataaggtaccgttgactggtctgaagacaccatttcgcgatggatatgttagagatttagccgaggaagttctaaaactggccaagaatggattggaaagaagaggatacaaggaggtcggtttccttagagaggttgacgaagtggtgaggacaggagtgacacctgccgagagacttctgcatctgtacgagacgaagtggcaacgcaacgtagaccatgttttcgagcacttgctatactgatgttgtagatgtaccctagtacaaaaatctcatctttgattcattcaacgccttgagtgggagggcacaggaacacagcttttggttaagttgctgaccgggggaacagctacccggtgctgcgtgcggtgcctacaaataacttcgctcgggacggatcactactctctagggagatggaacaaatcactgtttgtaccggccctttttgtttctgttttccttcagagatggagatgccgtattgaaaataagtccatcttctgtacgatgggaactgtctgttttccccccttctttcctttcagcattgttgggatgtttgtcccgtgttaacatgcaaaatcaattacgtgtacgataaataagctgatggtttgatccggaatctgcaattgcgcgtgccttttcccaccttgtttttagccaaaaatcactatggatgagactacagt

SEQ ID NO: 22863 - DNA, 1402 bp, Zea Mays
cgtggtggagagagggatttctacatgtgctctctatcttctagataagagatggttcgtttcggcgtccatgcagggtgtggaatggatccagtttgtcccagttcggaaatcggaatggtgaacacatatgagatgagcttcccggatatgtattatcaagaaaataagaagaaaagaaacagatggctactttgaggaaaggtgccatttttacccagcggcttcctcgccaccaaattaaaggttgcattttgtctccggtctcaccattcccattttattctctgcgtgttgctgtctgctccagggcgacagtgggcatgctgctcggcgtcgaggacatgcacaggttcccggtgcgctccccgtggatggaccgcggcgacctcatccgcagtcccgccgcgcgatagatcgtgtccaactacttcaggtacccagagcacacgccgccattattggcacccctgctccgctcgttccattttgtttccactagccgtccaataatgttgccccgccatcgatggaccgagcagcatgttcgggccggtgcaggacgtgcgcatcccgtatcagcagaagcgcatgttcggcttcgtcaccttcgtgtacgctgagacggtgaaggtcatcctgagcaagggcaacccgcactttgtgtgcgacgctcgcgtgctcgtcaagccctacaaggagaagggcaaggtccccggtaggtttaggaagctgcagcacacgcaccatggcggagccgagttcgtcggttgcgcgtcgcccactggattgctggattccagggacccctacgccctcctgcttctttcaggtgcccagaatttctccaggttttctcctgggcatgaagccattgggctatgatgtgtgaggtgcacagagcaaaaaagggggagggcccccctccattcctctaatctgggagggactactaatatggctacatgatggccggtcccatcaaccgagcatagagaagctttgataaagaaaaaagaaatacctttggagaggtgtaatcttcttcagagtgggagaaggaggggacagtgaagacaacaacagagaagaaacaagtccagtttgttttttagctcttaggcctatgataagtatatgatagtaagtgagtgagtagtaggcataaataatagtagtagtagttaattagtagtcgtttattagtagctgctgccagtgtcaagaaggtgatgaaaaggcacactccagctctctcctatgctcgtttgtggcatggatggatctctcactgttgctatgatatgttgttttatttataatatcgtgtgtataaatatttcatgtttttcactttgtttgatttgcggtaccacatatataacgatttcatgtgttttcc

SEQ ID NO: 22864 - DNA, 1283 bp, Zea Mays
atggaagtcgctggacgggggatagggttgtggaagccgccggctagggggagaggcggaggaggccgccgtcgttggggtctggaggaggccgccgtcggtggaggtatggaggaggccgccgtcggtctggagaacgaagaccgtggttctatcctctgcttttgcaagtgtctatgtgtaaaccctatctgctcatcgttggctgcggcaacaggggtacaccgcaaggcagggaggagaaacacacacgcaaagactcgcgggagatcggatacccaggaccaggagaagacgcgcggcccgctccgcttcgctgccccacacccccacctgcccctgctcctcgaaccgtccgccgttgcgttcgacatgggcgacccgccggcgctcaagaggcccaaactcgagaagggcgacaatgactccacctactgcccccgctccgcttccaatggcgcgggcgccaacggcccaccgccgcgtgacgacgtggaggaggatgacatctcggaggaggcggtcatcgccctcatcgcgcaccgcgagcgcgacgtcgagcgctgcaagctcaagctgctccactaccagtccctgctggacgccgcggagatgaagctggaagaggcacactcgcggctcgccaggttccgagatcgcaagccgccgccaacccggtcggagcccaagctaccgacgccgccgatccagagggaacccaagccatccccgccgccaatccggagggatctcaagccatcgccgcagccaccagagaagaaggctccatcgcccgcgccgcagccgtcggcgagcccgcagcttgtcatcccagggaccaacaaccgaccggccccgcgccctcagcccatgcctggcttgaagaaagccgctgccccgtcatcgtcttcatcacgggcgccgctggaacggtcaaggaaagaggagaagccgcccaagagaaagattgaacagaaggaacatcggaacttgattccgagtgtcaggaaatcatctgcgactgtgcttaaatttcaaggtggcaatttggtctcgagccaacacaggaggaagcttaggtgtctcgagctatgccctgctaatgatcagctcgttgttaccagtgcgctggatggattagttactttatggcaagtggagactagaggatttatgccaacaggagccttaggcaatgctttattcttgaagtcttactcccaaaatcaatgatttcaagtcgcccgactagctagtcgatacacctgggcgaccaggcgact

SEQ ID NO: 22865 - DNA, 761 bp, Zea Mays
ggcgcaggcatgatcactaccagtgcctatatgaagtctaatatggttatataagctttcttagtgctgtttgtgatccttaacgacatgaacctaaatcaatattttggaactggagggattatatttcagcagtgacaccagtgcctatatgaagttcttgccttcaatggcacaccggttaaaaatttgaagcacctagcgaccatggtggaagagtgcaatgaagcattcttgaagtttgatctggacttcgatcaggtggttgtcctggagacgaaaactgcaaaggctgcaactcaagatattctgacaacacattgtataccttcggctgcctcagaagagctgaagagctgaggaaagctaggtgttgtctgtcggctggtgagattctgcatgtcgaagagtggaagctggaatgtaacctagttgtaccaaagagtgcctagcaagtatcacatacacacaaaatgcatactgatgactgaatgtcgcattgagccacccgggtcagttgtaggataggtaaaaaaacaaaacaaagttttgcccatattccattaatctagttgacatcaacgaaatcatcatgagtaactttgcgtatccctatttgccatgattggtctgatgacacttctgctttagacatctgtggtccggttgccaagagcatgccactactttgttgtggagtactctagttcatcgaagaaaacaatcgtatctggatggcttttgcatcagttttctgtgtc

SEQ ID NO: 22866 - DNA, 1245 bp, Zea Mays
aagatgcggcagtggttttcttctcattgttaccgctaatcacgtggacagtctccggcacaagattccctctccagcggcgcaccaccgctaccatcctccgacccccaacccgaacccgccatgtcaccggcgccgtcgcgcccccgcatccgtccgtggctggtggtgggtgacctggcactggcggccgcgtgggtttgcgcgggcgcgctggtcaagctgctcgtttacggcggactcggcctcgggggacggcccgaggccgaggccgtcaaggtctcgctctccctcgtatacatgttcctcttcgcctggctcgaggctgcctcgggtggggcctcctacaatccgctcaccgtcctcgccgctgcgctcgcctcccacggcggacccgccgtgtacctgttcaccgcgttcgcgcgaatcccagctcaggtgattggggcggttcttggagtaaagctcattcaagtaactttccctaatgtgggtaaaggagcccgcttaagtgttggtgctcatcatggtgcgttagctgaaggcttagcaactttcatggttgttatggtatcggtgaccctgaaaaagaaggagatgaaaagtttctttatgaagacatggatcacaagcatttggaagaacacaattcatctccttagctcggatataactggagggattatgaaccctgcatctgcttttgcttgggcgtatgctcgaggagatcatacaacatttgaccacctactggtatattggctggcgcccctgcaagcaaccctgctgggagtatgggcggtgaccttcttcactaaaccgaagaagatcaaggagcaaaaggtagatgaaaacaagataaagaaggaatagactattcttgaattagagctagagcttcataccatcttcttagtcagataacttgtggctacacacaaggcgaaatgtttcgaagctaatctaagaaatggcaacctatcatggtcagcttctgtgaagtctccttgatgtgtattccttgtatctggcttagcttagattgtgcagaagcttgtaagcaactgctccaggcttccattcaagacattgtcgtattggaaacagtatatatggaagctaaagcttctcagagttgactcacaacctacactaatgttccacagcattgttgaaagtatcttgagttccattatctatgataatgggaaattgcaggtctcatctagtttccaggaaaacgaa

SEQ ID NO: 22867 - DNA, 1771 bp, Zea Mays
ctctccctctccgctccccattgccgcattgctctccctcggctcggtccctctccggctctccctcacggcctcgcccactgcgccttcgaggagctccgaatcccgatcgcctcggtccccgcgagctcacatggtgggggcgcgcaccagaggctagggttcccagttcccatcattctcctgctgattaaaaccgtggggttttggagagcctgaggctgtggcggcggcaggaatgaacggggaggtggaatgcagcgtgtgccatgcgaaggtgccggtgccgccgccggtgtcgaaagcgtacgacagccaccggagcactgtgtcgtcgcggcaacgtgcgctaaacgtgctcctcgtctccggcgactgcgtccttgccggcctccagcctatattagtgtacatctcaaaagtggatgggaaattcaaatttagcccaatcagcgtgaatttcttgacagagattacaaaaattatgtttaccattgtaatgctattcatccaggctagacgtctaaaggtgggagacaagccactttttacagtttcaatatttatgcaggctgctcgcaataatgttcttctttcagtacctgcttttctctatgctatcaacaactatttgaagttcataatgcagttatattttaatcctgctagcgtgaaaatgctgagtaatctcaaggttctggtaatcgcagtgcttcttaagatgataatgaggaggcgattttccgtaatccagtgggaggcccttgcccttttgttaatcggaatatctgttaatcagctgaaatcattgccagaaggttctagtgtgctaggtcttcctgttgcagctggagcctacctatatacattgttttttgtaacagttcccgcattggcttcagtttacaacgaaaaggctcttaaaagccagtttgataccagtatttaccttcagaacttgtttctgtatggttatggtgcgatatttaactttattgggcttgttgtcactgctatcatccaagggcccagtagttttaacattctagaaggccactcaaaggccacgatgtttcttatctgcaacaatgctgcacagggcatattatcatcatttttcttcaagtatgcagatacaattttgaagaagtactcatcaacaattgcgactatcttcaccggagtagcctctgctgtgctgtttggccacacactgacgataaattttgttcttggaatttcaatagtaatcatatctatgcatcagtatctttctaaccaaattaaggacgaagtgcctagcagcaaagttgaaatggctgaagctcatgatcacagaaaagaacctagttatgtcaacgtgcctgattcaggggcaagtgagtctaaacaccgccatggatctgacgagaggcagccacttcttcccgtatgattttgtagaagaggcgcactgtttcctcaacagagcagcatgtaaagagagtatttttagcgggtatttgacctaattgtctctgaagcaacattggtgccatgctgttggcggggtaaagtatatgcatattcggcggcagtgacgagcttcgtgaagtacactaatagagtaatggtctttggatgaatgagtcgatacctttagcctaatgggtggtaaaactagtgtgataagatcagcgaggaataaagtcaccaccattttttcctgtcttgtgagttggtgagttgatattgatacagccatcagccgtggttctactctctctcccgg

SEQ ID NO: 22868 - DNA, 2316 bp, Zea Mays
ctggcccactaccaacgggaagttcggccgatgcatgaaaacacacacggatgaaatcgtttgattggtagccccctgtcaacatctcgatttcgaatttcacccagctccgcacgcgcctcaacccttcctctcgggcggcggcgccggcaaggcggcagccaaccggagcgggagctgcgatgaagaagatcttcggcgccaagaaggacaaggggccgcccccctccatccaggacgccaccgagcgaataaacaagcggggtgagacggtggacgagaagatcaagaagctggacgaggagctagccaggtacaaggagcagatccgcaagacccgccccggcccgtcccaggaagccatcaaggcacgcgccatccgactcctcaagcacaagcgcatgtacgaggagcaacgcaacatgttgtacaaccaaacctacaatctcgaccaagttggctttgctgccgatggcctcaaggatgctcagcagactatgaatgcaatgaaggcagcaaacaaggagctcaagggaatgatgaaaactgtcaaaattgatgaaattgataatatgcaagatgaaatgacagatctgatggacgtgagcaatgagatacaagaaactcttggtagaagctacaacatccctgatgacgttgacgaggaagaactgatgggcgagctagatgctttggagtctgatatggaatttgactcagctgcagtcccctcatatcttcaaccagattctgactttgatgctgacctcaacttacctgctgcaccaagtcgccctgcaatggtcccagcaggcgggctgcaggaggatgagctaggattgccagcggtgcctcgggcatcacttcgcagttagaaataatcttgtgtttcgattttaagttggtgtgaaaactctgtagtttgtgtctgagtctgaacaatctaatgcttttcgtcatggtaatgcttcagtttattgcacttcctgttgctgctgacgtttcaggttccttttttttgtcattctggaatttttcatctgtcacctgtcacttgagccgtgtttgtttgcaagtacacgtcactatacagcaattattccaggggaaaaaatcactgtacacaccagtaattctccaagacaagtcggcagagtgaacagaagactgaggggaaaatatcttggaggctgttgtattcttgcaatgcagtatcctttttgctagcaatagcactcccttttgtttacaataattgaggcaagataactatcaggatcaaaggtggaaatatcttttccaaggggttcaaaatatcaggcaacaggggtgagcgggtcccccttctccttggtccaagaacaccggtagaggggtaccacataccagaatcttatccagagcagggaacccctcctggccctgcagtatataacggagggggtcaccacacaaaatagataagcgttccagatcgtactggaccaatctgccaccacactttgatcacacacaggaagttgagatcagaaaaatgcaggctgccgctactgccgccgggttctcggccgtgctgcccgccaagggcaggccggcggcgaggagcagggtggtggcccgtgtccccgccacaaggaggagcgtccgtgtagctgccgtcgtcgcgaccgaggccgcgcagatcgactacagctcaagcgtctcggtgttcccgatggaggcctgcgacctgcttggtggcgacgcgtgcaacgggcccatgttcccggaggccaagcccgcctcggcggcggcggcggcgagcaggagtgtggtcggggtggacagggactacctgtcctacgacgagccaaagacggtgttcccgggcgaggcgtgcgatgaccttggcggcgagttctgcgaggcgccgtaccaggacggcgtctccaaggagctggcgcacgcctgaagaccctgatccatccatttctgtccaccacgctatgtacgtatgtgtagcagatggtttacatctacgtgttagagcccggagagctggagaagctagctagcgtgcttacagaataacagcagccaagcaaagccaagggtgtgtatataataggcatgccttgggttgtgtcagctgcgactgtatgtatagtttaaaccaagatgaaatggtactgatggtgatattccgtgttttacgatacaaaggctagaaaatagattttgcctggatatcagatagctttcaactaccacaaaatattatttctacctgaaacattgaccgcgttgatttatttcaactactgcacaatattatcc

SEQ ID NO: 22869 - DNA, 836 bp, Zea Mays
gttgcatccgccctgcgccaagaaaagccatcgttcttcccacaaacgcacacatagaagcatcattcccctctcggctagcttcttcctctctctccctcctcctcctcttcctcttcctcctcccttgggaaacctgctgcctttgagctttcttcttcgagagctcccaccagatctcctcctccttaccttctttggcacgttcggcggcgcgcgcggagaaagatagatcccgccatcgtcgtcgtcggtccttgcttccgatcggagggccacaaccacaacctctcgctccatagcgtgcaagcgcgagccagggtcaagaagagagctagctagctataggccggagatcgatggggaggggaaagatcgtgatccgcaggatcgataactccacgagccggcaggtgaccttctccaagcgccggaacgggatcttcaagaaggccaaggagctcgccatcctctgcgatgcggaggtcggcctcgtcatcttctccagcaccggccgcctctacgagtactctagcaccagcatgaaatcagttatagatcggtacggcaaggccaaggaagagcagcaagtcgtcgcaaatcccaactcggagcttaagccatacctcatttatacgttgtcctccgccactgttcggaatacattcacttaactagcaccaggaacactgtccatccctctgcagtacagaacagatcaacgtacccctggatgtgtttttgggttctatagtatgctctatataaagttcatacagtcatacatgtttagcttagatatttatcattatatgagaactgtggcattattctat

SEQ ID NO: 22870 - DNA, 1870 bp, Zea Mays
ctcttccccccaccccgactgcagctcaccccacacgcgctttcgccgcaccaaagcgtcgtgagctgctacctaacctaaccccaccgccaaacaattcccccattcctgattccaaccagcccgccccgttcgagtacacactgagcgagggagacagagagagagacgagaacaaccagcgatctcgcgtatgtgtgtggagttggagatatacagtacagaggaaagatccgatattttttgctgtacggctgctgagcggaagagatgttgagggcggtggcgaggtgctgcggccactggccgccgggcgcggcggcggcggacgggatgctgtggcagacggagctgcggccgcacgcggcgggggagttctccatggccgcggcgcaggccaacctcaccatggaggaccaggcgcaggtgctggcctccccgtccgccacgctcgtcggcgtctacgacgggcacggcggggtcgacgcctcccggttcctgcggcttcgcgagggagcaggggggcatcagcgcggaggcgatccggagcgcgttcggcgcggccgaggaggagttccacaggcaggtgaggcaggagtgggcgaggcgcccacgcctggctgccgtgggctcgtgctgcctgctcggggccatctccggggatacgctatacgtggccaacctcggggactcccgcgccgtgctcggccgtcgagtgggcggcggcggcggcggggcggccgtcgccgagcgtctgtccgccgagcacaacgcggcgtccgaggaggtgcggcgggagctcgcggcgctcaacccggacgacgcgcagatcgtggtacacgccaggggagcgtggagggtgaaggggataattcaggtatcaagatccattggtgatttttatctgaagaaaccggagtacagcttggaccccttgtttcggcaagttgggccccctattgcgttgaagaggccagctcttagtgctgaaccatcggttcaagtacgcaagctgaaaccaaacgacctgtttctgatatttgcttcagacggtctttgggagcacctcagcgatgacgcagcggtgcagattgtcttcaagaatccgagaactgggatcgccaacagactggtgaaggctgccttgaaggaggcagccaggaagagggaggtcaggtaccgtgacttgaggacgatcgacaagggagtgaggcggcatttccatgacgacatcagcgtcgtcgtggtcttccttgatcgccaccgtgagcgccgccacactagggtcgttgactcgagtagcaactgcatcagtgctcccgtcgacatatactcctccaacacacaccagtctgcggagcccttgcacggttaaaagagctgaactctggctagagtagaagactggggtttgccttgcgctctcctgctggtgaacggtggagttgtagagctgagggactgcagtgccatagccataggaagggaagaactcgagatgtacatagatagcgtgggtgtgtagcatcggaaaagatcatttggtctggaactacgtagcgtaattggtcagtcagatcattttcttgtttctttttgtctgattatgcttacccagtggtaaatccgtccattgtatcggatttaatttaagaaatctgtaatacagaggtgtcgtgaaatagttgatgacgcaactggaggttagtggtgactggtgaccaaagaacatatgctctgcttatgatctagaagttaggttgtgacatgagaatatatactatttatttgcaacggatgagatgctcttatttcatttagcattgctttttgtcaaaacttcgttgtatgtagttacaagattacctct

SEQ ID NO: 22871 - DNA, 2226 bp, Zea Mays
gtgtggacatgttttcttaccgctctgtttattgtcatgcaagctttactttacatttttaaaaaattgtaccctagtgtgttaagcttgtttcagaagaattttatttaacaaatattgcctttattgattttgttctgattccaatgccaagcttgcttgatggtgatatctgtgtgcttaattgctttctcattgacatatgcaattaggtttccgctgaggcagagaaatggtagcaacggagattgtgataccattgaaataactgtctatgactactatgcaaagaaaggaatcgatctaaagtattctggtgatttcccctgtataaatacagggaaggcaaagcgcccaacatattttccaatcgagctatgctcgcttgttccgcttcaaagatacaccaaagctttgtctacgctacaaaggtcatcccttgtggagaagtctagacagaagcctgaagaaaggatgaccgttctaaatgatgcactgcaacgcagtaactacgattctgaccccatgttgagggcatgtggtgtttcagttgctccaaaatttacccaagttgaaggaaggatccttcaagccccaaagctgaaagccggcaatggtgatgatatcttttcacgaaatggacggtggaatttcactaataggaagttttatgaaacctgctctgtgaataagtgggcggtcgttaatttctctgcacgttgtgatgttcggaatcttatccgtgacctgatgaggaatgcatctgcaaagggaattcaaatggaggaaccttttgatgtgtttgaagagagtccctctatgaggcgtgcacctgtgtcaagaagggtggatgatatgtttgggcagataaaatcaaaacttcctggagctcctaggttcctcttgtgccttctccctgagaggaaaaattgtgaaatctatggtccttggaagagaaagtgcctggccgagtttggtattgtcacacagtgtctagctccattaagagtcaatgatccgtacctgcttaatttgctgatgaagatcaatgcaaagcttggtggtctgaactcgttgctgcaagttgaagcatcttcgtcaataccacatgtgtcgcaagtacccaccatcatcttaggtatggatgtttcacatggtcatccaggacaagatagaccttcggttgcagcggtggttagttctcgtcaatggcctcttatctctagatatagagcatcagtgcacacccaatctgccagactagaaatgatgtcctcgttgtttaagccgcggggtactgatgatgatggcctcatccgggaatcactgatcgacttctacactagctctggaaagcgaaaaccagaacacataattattttcagggatggagtcagtgaaagtcagtttacccaggtcatcaacattgagctggatcagatcatcgaggcatgtaagtttctggatgagaagtggtcacccaagttcactgtgattgttgctcaaaagaaccaccacaccaagttctttcagacggcatcaccagacaatgttcttcctggaactgtggtggatagtaaagtttgccatcctaagaacttcgacttctacatgtgtgcacatgctgggatgattggaacaacaaggccgacccactatcatgttctgcacgacgagataggtttcagtgccgacgagatgcaggagtttgttcattcgctctcttacgtgtaccagaggagcacgacagccatctcagtggttgctccagtgtgctacgcccacctcgctgcagcccaggtgagcacgttcctgagattggaggagatgtcagacgcgtcctccagccagggaggagggcatacctcggctggcagtgctcctgtgccggagctgcctcgcctgcatgacaaagtcaggagctccatgttcttctgctagctgatgtgaaaataagaccctcaaaaaggaggcgaatgagctcattcacgtcttaattaaagcctacagtggtttcgaccagggcgcgcaccaagactttggtgatcattgtgaacatgcttcggacgaagctaattccgaaggtcctatgggcgacgacaaactaagtcgagaggaggagaaggatgactttacccttgacatgtacattagaatgaatgtataggaattaaggatataattgtaattttacttgagctatgtctcgagtttataaatagagaa

SEQ ID NO: 22872 - DNA, 2345 bp, Zea Mays
atgggttcggtggtgtttgttcttggcgtgcgtgatttgggcgagtccggagctacccgcgagttctgcggacggttgaagaagacgcggtcctgggtggcccacgcgacaatgctgcgcgatgaagagctggcgcggcatggcaatgactggcgtccacacagtagcgggggtgcacggttctgcctgcctcaacgcccgcgctcctcaccaacgccgcaatcatcgcccacgcgcggatcccccacgatcctccccaccaccgccgccacaatcatcgctcacgcgcggatcccccatgatcctccctaccgtcgccgcaatcaacgcccacgcggatcctccccacgatccccaccccgcacacccccacccttccatcgccggccggaatcgatcgatccaaagctccctttagagctcgagctctatccaacccacgaacgggatcccgatgcccatggcggcctcggttcgtctcgccgcaccggctgcctcgcccccgctgacgtggtggaggtgggctcctcttctcgccgcgtcacatccacgggcgaacccgccgcctcccgcaccgcgcctgcgggcgcccgctctcttctccgggcctcccctgttccccgcgattccagcgccggagccatcgtccggaggacaccgtgtgcggcggcggcaataggtggaggtgtggaggcggagtccacggagcgggaggcgcccgatcgggatactctgaagcgggtggcgctgctcgcgcttggctgctgcactgcagccgccgctctcggcgtggcgcgggcagcggcgggggactccatcaaggcgtcaggattcaggctatgggtggcggagtcgctgcggaggctcggatggcccgatgacaccgtcgtgttcgcgctcgcaacgctgccggtgatcgagctgcggggggcgatcccgttgggtattggctgtggggcccatccccactgcccctctgtcgcaaaccccgcgcacgccgcctccactgcacacccccgccttccatcatcgggcctctgccgcaaaccccgcacacgtcgcctccaccgcacacctcgcccttccatcgtcgccaccgcgcactcaccctccacaccatcctcgccccaaatcgctcagcctaagcatagatggaagtccccccgcatccgctcccgcgcatcccgacatcagtggattgcggcagaggcccttcgtgcacgatctgtttccccctccacgcatggcggttccgcctccacctaccgtcgccccatccactcaaggccaattgcatccaaatgtcacgcaggccgcacgtcatcctcatccttgtggcgtcaacaaccatgtgcggcaagcagcggatgcggtagatgattgtttgcgtcccatatagctcaatatatgcctgcccccgatgccatctacatgcctagaggcgacggtcggacgggccaagtaggagccaaaaagaagcaagccccgtcgccgtcatggaaggaggaggccatcccacccacgctgacgaggagccaccaatagcaggtgccaccaccacccaaggagaaagccgcccaaggagacctttcatttcagattggagatgactcggcatgtttccatgatttcaattacactgtcccctagagagctggacaagcacactcctgggtaccaagctccagtgtatgttgaacaaccaaggcaacagcaggtgccaccaccacagcgccaaccacgcagaccaccagcacaattccagcagctagagtacgaagattcttatgcacggggtcgaggaagagggcgtgggcgtggaaggggctggggtagaggtggctacggtggctatggtggatatggaaacaaccaaggtggctatcatcagggtggtgggtattatgacaatcaaggtggttataatggctatgataatcaaggtggatatagtggctatgataatcaaagtggatatggtggtggatatggctataaacaaggcagatatgggaactatcaagaaaatggtggatataaccgagacccaggaagtggtatgcgaggaagatgcaattggggttaccaaggagcgcgaaccccttggtggccgcctccagctgcgcgaatgtgaactctccagggggtccttgaacgatgacggtccgctccgcttccgcgtcatcacacgcgacagctgccaccggaataggatgcgcgcccgcgacccgtacggtttgtgacttcaaaaataacagcaagaagcctcgaagacattcttttggataaagttaggaaagtaccatgcatcccactttcagatggttcatttacctctatttcag

SEQ ID NO: 22873 - DNA, 711 bp, Zea Mays
aggacctcagggacagccggacagcgacacggttcgggcagtacagccggatagcgacaccagactgtgttcagaggggctggggatcacgttgttcgggatggcctacatgttcgtgcacgacggcctcgtccaccgccgcttccccgtcgggcccatcgagaacgtgccctacttccgccgcgtcgccgccgcccatcagatacatcacatggacaagttccagggcgtgccctacggcctgttcctggggcccaaggagctgaaggaggtgggaggaactgaggagctggagaaggagatcaagaagaggatcaggaggagggaggccctagacgccatccaataagacctgattagctatacagtgcttactgctttggctatagaattccactgttttttttgaccttctcctcacattagatcttctagcgtttcgatgtatatacgagtggtagcgtgtgcatgtgtcttctttcctgttaatagagtagaagcgcagatcgaggaataatttcgagttgggcaaacaggtagccgcagctagctcttgcatgaagcgttacgtgtcgtgggcgatgcttgctaccagacagagacactgccgatatgaccgatgctcgtagctagtcgccgttggtacaggacatgtggggagggctctgcctgagctgacatgacaactgaagcgtgaaggcagaggcagac

SEQ ID NO: 22874 - DNA, 1947 bp, Zea Mays
cgagctatcctaaactccgaatcggtgcagcacatcgtgttggattccacgacacggaaatgaagctccaaaattattggcttgcaaatccagacaatagtataaatatatttgttcttttatcgtcgagtctcggagccatgcaactttacatcaagatgtgccaaggaagctcttgaggtggtccacagaaaatagctcaaggaatgcatgtgaaaggtctgggttgaatgaaaataatcaggacattggtgattcttcagaaaagcaggagcatctcctggctgtgccaggtgtgattctcttatgctgtggccttatgttaccatgctttcatgctgaaaggaaagaagtcagcaggcatgacaatgcaaccattcagcgcaacgcacttgaatcagtttcatcctatgaaggaagcatgtcatctgagaaagtcccaccaactccacatcgaatacctccaagtccctctagatttgcgccgtctccacagatagctagagttggatctgtcaacttaagcatccagcagatcctcagggcaactcagaacttctcaccttcatttaagttaggtgaaggaggatttgggatggtctacagggctgtattgccagatggcaatgttgttgcggtcaagagagctaaaaaggatcagtttgcaggtcctagggatgagttcagcaatgaagtagacttgcttgctaagatagaccaccgaaatttggtgaggttactgggttttactgataaaggaaatgagcgcattatcatcactgagtatgttccaaatggtactcttagagaacatctagatggtcaacatggaagagtcctagattttaatcagcgtctagaaattgcaattgacgtggctcatgcacttacttatcttcatctgtatgcagagaagactataattcatcgtgatgtgaagtcatcaaacatcctgctgacagatagctatcgggccaaggtgtctgactttgggtttgcaagaagtggccctagtgacacggagaagacacacatatcaacgaaagtgaaaggcacagctgggtacctggaccccgaatacttgaggacataccagctaactccaaagagtgatgtcttctcatttggcatattgcttgtagaaattctttctgctcgcagacccgtagagctgaagcgaacccctgaagagaggatcacaatcagatggactttcaaaaaattcaacgaaggcaacacgagagagatactggacccattgctggaagatcacgtggacgacgaggtgcttgaaaagctccttagcctggctttccaatgcgctgctccgacacgggacgaccggccgaccatgaaggaagttggggagcagctgtgggagataaggaaagagtacggaaagagtgttaggaaggtgtgaagatcatggaaaacatttccctgtttctcaagactttccctggaccaaggggactaagggggtgtttggttttatagggattaaattttagttcttccattttattctatttaagtccctaaattaccaaacacggaaatcaaaactttattttagttttagtatttggtaatttagagacttgaatggaataaaatggatagactaaaaataagttcctagaaatcaaacaccctctaagcatgcgaagtatttgtgcccattggataaacacctgatcatctatgtttcttggaagatgtgacctgaagaaatgtacagtgcgataacaccgccatcagtttgtgctttcttgtctcagtttgcagtgcactccctctatggagaatgtatattttggagttctcgcatttcttgattctgttgatatggtattctgatggatgtacccgcatacattactgcaaacggtctgaaataatatacgaagggaaattgtttgtattggaagacactgaagcttccgg

SEQ ID NO: 22875 - DNA, 943 bp, Zea Mays
cccacattaactgcagttcagatcagggatactgaaattagtgattaagctccaccatgaagatagcctggggtaagaaatctaaggttaagaagcagtcagtggttgtatcaactataccaggcctaccatttggagcggggagtgacaacgatgaggttgaaacggaggaaaaatcagatgcaaacacaaactgtcctggaacaaagccagttgaaactgctgagttgctccagagtcagggagacaagctagccgaggaagggaagtaccatgaagcacttgctaaatgggaggctgctctgatcttgatgcctgataatgcgatacttcatgagcagaaagctcaggttttacttgaagtgggagatgcatggcgtgcactgacagcagcaaccagagcaacagaactggatccattttggcctgaggcttgggttacacttggtagagctcaattaaattttggggagccagattcagctatactgacttttgacaaggcgttagctatgaagcctgactacaccgacgcaaaagctgaccgtgaaactgctgctcgcctagtcaagaaacgaggacagctgcatacgtcaggtttaagtgctaacaaaagacgcttcacagttggggagtacccaaaggagggaggtgcagagggtgaagaaaaagggaaagaaacagccgagcaactccaaaagatcacccaagaaaattagctaaattaactgattttgttactgtgtaaaatagatattacaaaaaaatattacattagtgttggtcacctgctttaattcgtaaagggaaccataacaaggcaatacaattaaagataatcggccttcgttttcctaatctatctaatagataaattaagggaggaggattatggtaatccaagaccttcgaataataaaataggaatgtctgatgagaatca

SEQ ID NO: 22876 - DNA, 2548 bp, Zea Mays
gaggggaactgggaagggaagggagcggaagagaggtgggtgaccgccgctcctccgtccagccttccagttccaggcgtggcgaactaggcaagcggcaagctcaccgctcctcgagtgaggcccaggttccgtcgccgccgtactcagcagcggataccggcgagtcaacaggtagtagagggggaaggaggggagcagttcctgttcgcccggtcaccgcgcggccggagcaatcccgctggtgcgtccgcctcagtttgccgtcaccctgttgcacgtacggctagggtttggagatagatccgcccgccagctcgtgtggaggcgcgccgtggtgcggggaggaatagaggaagcgcggttttggttccttgctcctgaagcttcagggcgtgcgaaccggttcggtcgcaatgtcgggctcgtcggcggcaggggaggacatagtgcagcacctatcgtccaattctaacccgtcttcgtcgaagctcgcgaagctcgaggcacgcatggccggcaaggctgtctccgcgccatcgtcaccgccacaccatcccatggctgcccccgcctccgcacctgccatatccttcatggaccaggaggagctgcctgagacttcctcttccgatgacgataactgtgaggagtttttgatacaaaagaataccctgaagcgtccgagatctccagatggtgacaacatctctgctcttggaaattttgagggttcatcaaacgaggcagcaaagattttagatgtcacggatacaagaccatccctggacaattcaaataggaaaaaacaaggccgtggaaggggtcgtgctggtacaggccgaggccgtggctcaaagactgttgatcaaccacgactgactttgatttcctcagcagttgtaacaaatggtcaactagataaattaaccaacaaggaaccccaatcgagtgttcaactgggccatgacgacagggctgctttacaggaagaattgtcaatgttacatggcaaagttgcatttttggaggaggaactttctaaatcgcgtcaagacgcaacaaattaccatcaactgagtgatagggtagcaaaggaattgaaggatctcaaagatcatgaccaacaaatgagatctaagcaaatgaaggtgctgtctgatctgctgatagctgtgtcgaaagcagagaggcaagaagcgcggatgaggataaggcaggaatctttcagacttgggaatgttggtgttatgagagctggaactatcatatctgaaatttgggaagacggacaggcaataaaagatcttaattctcacctgaaatctttactggaaactaaggagactattgaaaggcatcgtaaatcacttaagaaaagacaatctggcttttgatttggtggagtacaagtatgtggcatgcaagcttcatggattgaacgctcaatggagtgaggagaaaaaacagagctacatacgtcatgcgattcgtgaatataacattcacaaaactttggtgcatccaaacattgtcaggctatgggatatatttgagattgatcacaatacattctgcaccgtcctagaatattgcagtggcaaggatcttgatgcagtccttaaagccacaccaattcttccagaaaaagaagcaagaatcataattgttcaaatatttcagggcctggtttatctaaacaagaggggccaaaagatcattcactacgatctaaaacctggcaatgttctctttgatgaggttggtgttgcaaaagttacagactttggcctcagcaagattgtggaggatgatgttgggtctcagggaatggaactcacttctcagggagctggaacctattggtatcttcctccagaatgctttgaccttagcaaaacaccatttatttcatctaaggtggatgtttggtcagctggtgtaatgttttaccaaatgctttatggaaggcgtccttttggtcatgatcagactcaggagagaatacttcgggaagatacaattatcaatgcacgaagagtggagttcccctcaaagccagctgtatcgaatgaggcgaaggatctgatacgccggtgcttgacatacaaccaatcagagaggccagatgtactaaccataactcaagatcattatctctcgtatgcaaagaagtagccactaccccggagaacattttggcgatggtatctgttcaggcattgagattatggatggggatggataatctcgtggaagagctaagtattaaacaagctcaagaagaccacaaagggtgtataattgtaaattttagtctgccctattacggcaatgacctgaaatccagaaggcatcagttcaaaggccagcttcttttgtaacatagagaaaacatgcattaacgggcccatttaccctttgactgagatctccttgactcgcttgtggcatgcccccgtgcgtaacgcgacggttacttggctggtgggcaatggtcctcttgattttctgtttgctgatactgtcgataaggactgccgaatca

SEQ ID NO: 22877 - DNA, 738 bp, Zea Mays
aaaaccgctgctcgggtctctgcagctaaacacgctggtggtgcctgctttacatgcacgcgcgcaccgacgggcgaccggtggtgctgatcagaaatgtacacgcctttcagcctgtgaggcaggcaggcagagagagagagagagagagagagagagagagagagatattcacacacgcacgcacgcacccgctgattctgattgggggtggggagctagggacgatgaggttatatattaggcgtggatggacgtgggctggatgatgatggagtccaggtcggacgtcgtcgacctcaccacgctcacggccggcaccggcagcttgtcggaggagcgttcagcggcctcgccccagatctccgggatggcccgccggagcgcgccgatgctctccaccgcgtagtccgcttccttgctcctcgccctcttgccaacctgggcggtgcggaggccgagcgctttccccgcggcgatgttcctctcgctgtcgtccaggaacagctgacagaccaaacaatgtcagtaatatacgacggatataataataataataataataataataataataataataataataataataataataataacaacaacaacaacaacaacaataatagtaatattaataataatagtagtagtaataataataataataataataataataataataataataataataataataataataataataataataataataataat

SEQ ID NO: 22878 - DNA, 1021 bp, Zea Mays
ttaaaaaggttcgaatgagatggtttgatgtgaaagacaacaataatatgagacgagagttcttgcgaggaacattacaagcccctcagctgcagttagtaccccatgttggctatgtcagcctcttcccattcatgatggggactattccacctattatggccttcgatcactttctagaacaagttcaatatatatgaagcgtaatacagagcatgaccccccttattggagaggtgccatttggataaacatgaactacatggttctttcggcactacatcactatgcacataaggatggtccatatagcggcagggcaaaggaattgtatgacaagctaagatcaaaccttatccggaatatagtgcagaattacgatgcaacaggtttcttctgggaaaactatgaccagaaggacaaaggaaagggaaagggtgcacggtcatttactggatggacttcactcattgttctgatcatggcggagtcctacccaacattgcacaggtgagatatagatcgcgaacaaccacagcagaagatagctatggcaattggaatggaggggctggcagctggcgcttgtttagcccggtttgcaaccagaacactgggatagtttgattcgtagcatctgctgccttaatcatgaaaattttgacaacacctcctggtcaatctgttcagcatcatttatagagtgttagtggtcatccctgttcactctcatactgtaaactagctcctcgaagaactgattttggggggccaaaaccaccccaggaaagcatgagcatatggaaaacatgttcttgaaagctgacactacgtggagctgttacttgctattgagtgtaatctactgctactcttactatgcttggccatttgcacccccaatgatccccgaagaaacctgctggtccgagcatgtgacctatacctttgcatttacttgctagagaatcagttcaacacaatgcaagttgcaaggcacgtgttttgaaatggaaagcgg

SEQ ID NO: 22879 - DNA, 3259 bp, Zea Mays
acttttgcccttcgaactaaaagcgcctgcatctcaaacccgacggcgctctcttctctatcctctgtgtcccctccaccaaaaccgacgacgacgtcgctctcctccaccggtgctcggcgctctccctccaccagcggtggtccacagacgctcggcgagctccaccggcgggcgctggcggctggtcagatccgctcggcagtcatccatctggcacatcgggtagctcgcgcctccgttggcagtcccaccgccgcccggccctcccccagcgcccccggtgatccggaccgcacccgcttactcggcctaacgaccggctcctgccccgacgcagccgaagctcccagcgtcctcctgcaggccgagctgaaggttcagcgcgccggtggagttagacgacgaaactccgtcacgtcatacctctccgcctcccgtcttccagacgtctctaatcggggtcccagcgtctcggagaagaggagcagcacggcacggcagctgtggcgaggaaggctcctgtcccatcccaacccagttagcagccgcccaaggaggaggagatccaatcggcgtgcgggcgtccgcggtccatccatcgatccaattccaatctgcaggcatctcgagtgcaccgtcggccgcaccagcaggcagcatcccgacaccgccgttccccagcagacagcagcaggtcgccgtcgttccccagcaggcagcaacaggtcgccagctcgcccccgcgtttgcttccggtcagctgatgtcgcatgcttttcggcagcgctagtcctcgacggacgacgaccagcatcagccgccgccccagtcgaccagcatccacggcggcacgagcccacgaccagcagatcaacgcggtggcagatcaacgagcccacgactagtcagaaaatttttacagcagcatatccaccggatacccgatacccgacgggtacccggtgggcacgggtatgggtccatttttttacccgattggcttggtgcgtatggatatttgtaaagggtcgagtatgatatcgggtcgggtattatacccgaacacaacccgacccgctgccatccctaaacgcagctattctgtcaattccttaaatagagcagcactgagcatatccggcggagaatttagttcagtgccggtttccatttcacttcatatctgggcttaatcttgtgtcagcttacctacacattgcaattgttgtcacatagcttatgaatgaagcacggaaatgatcgagttatattagaactatctacaccgacgtattgtgttgaatttaagatgccatcgatgccttttaaatgtgtatagtgctttcgacagccttgtgtttgcatgccgaatttcttacaagtatcatacatgtataccgaactgtgaatttaggttatactcaaactgcacacagtagcatccttctggtacaggtgtatgtaattttgaagtaacaaaggatttggaacccagccctctgttctccaccaccgcttcgaagatgccgcaggtaatggtggtggcacggaacttcatggatatggtggctgctcttcctgcgggcaagcttgatatgctctatgactcagcctttatctgtgaggcagtactcaggtcacttcccccactggcaaagaagtatgcactgcagatgttgtatgtgctggcaccagtgaccgctgcagcaatggaagagtgggtgcttgatgaatatgctgccaagcataaggttgccattgataagcttctacagctcagggtctttgttgaagtgcgcgacagacgacgggacgtgagctacaagatgaatcagaagttccagggaaacatgcagaagtatttggttgatggtggaagtttaccaagggaacctttaccattaagtgtcactggtcgattgcccacaccagcagatctggaagcctatgctcttgatcaatgggagtgcttcttgttgcaattgatcaattcatctcaagtcgaaaaagggtcaagttttagctcctccatgatgaagacgtttcagcgtggtcttctgagttcaagggatggtgaagcttcaaagttgactgaaaatggcttccaatttcttctgatggaaacaaatgcacaactttggtacataatgagagaatacatttcatctgctgaggaacgtggagtggaccctacggagctgatatcatttctcttggaacttagctttcataaattgggagcggcttatagcttgaacactctgactgatgtccagaggattgccatcagggatcttgcagaattaggactagtcaaacagcagcagggtcgaaaggatagctggttcattcctacccaattggctactaatctttcagcaagcttgtcagattcgtcatctaacaaagagggatttgtggttgtggagacaaactttcgaatgtatgcatactctacttccaagttgcactgtgaaattctacgcctttttgcaagggtggagtatcaacttccaaacctcatcgtaggagctgttacaaaagaaagtatctatggtgcttttgaaaatgggataactgctgagcagataatttcatttcttaggcaaaatgctcaccctcgtgttgctgacaagatacccgctgtcccggagaatgtcacagatcagattaggttgtgggaaactgacctcaacagggttgagatgattccatcgcatttgtacgaagattttcctagcaaggaatggtttgaacaatgctgtgattatgcaagggataatgggtacttgctgtgggaggaccccaagagaatgagactaattgtacgaggggagttccaccccgaaatgagggagttccttcgcaggcaaagatgaggaacgaccttgtacttgacggaccatgctatgcttctttgtagtgcatagaaacactgtatcgggtaatagttctcctttaaatatcaggaaagggtctagaaaagggctcagtttttgaattattttggtgacctgtgagctgtggaagcatatgaataatgtggtgttcaatggagcaaggcccaacatccttgatctgcttctaaatgttactagtgactgtaccctatgctggtgtatggctggtggccaggtcctgttggaactcttaggtaggtagtatggtgggatggagttggtatgctcttaatttgttgttatttggattgattctatataggacggagtgattttaaaaatgaaaaaaactcaaa

SEQ ID NO: 22880 - DNA, 2438 bp, Zea Mays
agccggtccagcccacagtccacgaggacacgatccccgacctcatatcaggttcccctccccatcccggagagcaaaagcgcttctctcgctagcgagttcggcagtagaaaccctaaaaaaagacaccgccctccccttcgctagcggaaccgccctcccctcgccggggtaggggtttcgggggtagacgcccgccatggacgcgttccggaaacagctggacgtgctcatgggcgccaaccgcaacggcgacgtcgaggaggtgagccgcaactactacgaccgcgacgtctgccgcctcttcctcgccggtctctgcccacacgacctctttcagctcacgaaaatggatctcggtccttgttctaagattcactctcttcaactgcggaaagattatgaagaagcgaaagcaaagggaacagaaaattttgatagagaactcgaggatatgatagaaaggctcattgtggagtgtgacaggaaaattcagagggccctaaaacggcttgcagatgatgatgccaatgctgctattgcgatatcggtctctgagacggatgacatactgcagctgtcaaaacagataaaggagaaaatggcagaagttgatgcctttgattttgaagggagaactgatgacaaaataaaggcccaggaagtagtggaagagctaagagctaaaagagctgatatgcaggctaccctcttgcttgatgcttttaacaaggacagagcttcattaactcagcctgctccacctcaagtggcagcagttccaccaccagctccacctgatgctcgtactcaagaaattatcaacgaaaagcttaagaaagctgaagagcttggtgaacaaggcatggttgatgaagctcaaaaagctttggaagaggcagaagctctgaaaaagctggcgccacgttcagagccaccttcagacccttcgaaatatactgctgctgatgttcgaattactgatcaaaaattacgcctctgtgacatatgtggagcatttctgagtgtatatgacaatgatcgacgtcttgctgaccattttggtgggaaattacacctaggctacatgctgattcgtgagaaacagaaagaacttcaggtgctgaatgtaatgtaccattttctgctttaaagagttactctgttttggcccttttggcatatgtgagttttcttatctcaagagcctcaaggttctcaccttccctgtatattatttgatttctcacattgccgggcactatggttattacgatagtcattacaggaattagtccatgttgcgtgattggaatctcatgcgatcatcttcatacccatggatacaacagtcactgtctgttggcaaatgtaagcataggagggtgcagaccatggtatgaaaaaaaacatgtttacttaattgtgacgaactgctcatgtgtctgcttagtattatgttgggcagaagccggaggtttcttttctactgcctgagccatattatgtagaccaggtgataaataatactggttaagttatcctgaaagctttgccaacatttgctgtaagtgacaacttgttctattttttatctgctacctccataagtttgcaagttaaactttgctgaagcagccttgcctgtaaagtatgactcccctttctcttggaacgttgtcgctgacttcatgtatggcaaaatatcatcatttctactgtcaataaataaaatacactatgccaccttgcaggagcagagaaataaaaggagaccgggcaaagctgaagatgatagacgatcaagagagcacagcaaggatcgcaacggccggtcgtccagggatagagaaccagaaaggagagacagggttgagtctcgagatggtagaagagattatgaaagggatcgtgatagacgtcatgatagggacaggcgccatgaccgtgatcgggatagggattatgaccgctcccgtggacatgattcaaggaggagagagcgttcacgctccagggagcgcagcaggcgccacgagagatactaaatgttacaccatgcctgacagatttaggagtactggcggcgtctgttcaagatatggtttgagcttgtgcttcgtatcttctgaagaccggtctacttgacgctaaattcgcatggagtgttaagcatttattaaacgcatctggaatcaaatgaagttgtacttgcgaacggcttcacttaaaattcgcgccatttctaatattgtaataagctgtgcttgaaccttagctgtctctgtgtactcgacgtaccactcgctcccacaaatagcttcgaacatcctgtacctgaaacatgacgctgtttggtggaggtggagctgtaagtgttcttttgcacaattcattataaaaatcccaaatctgagtactaggaaatttttagtgag

SEQ ID NO: 22881 - DNA, 1201 bp, Zea Mays
ctcaggtttgaaccagcctcgatgcaatattggcaagggagctgtctataaaccttctccaaaccctacctttgtgtgaactttcatcactcgcttatcaggaagcgagtcaaaagctgttcaggagcttgatgcagctacttccaaagaagatgggccagtagcatcatcccttaatcgaaccaagcgttggcttctctctcactcccaacatctcaacttcttctctatcttgattcttgcttcggttccaaatccactctttgaccttgctggtattatgtgtgggcaatttggtgtgcctttctgggagttcttgtttgctactttgattgggaaagccatcatcaagactcatattcagacactatttatcgtgtccctgtgcaacaatcagctcttgtatcttattgaaaaggagttaatctggatatttggtcacgttcctgggttttctgccacccttccgtctgtgattgccagactccatgctgccaaggacaagtatctatcaccaccagccccagtctcaccgtcatcacaaatgggggagaaacagtggaatttctcttttacatctgtctggaactctatagtgtggcttgtgcttttgaacttcttcattaagatagtcacgtcaacagcacaggattatctcaaaaagcagcaggatacggagatggaacttatttcggattccccgatccaggaccattctaaaactaactagtggcgcagctagtggtgtttatacacagctgctagcagcaaagattctcctctgtagcttaagcccctgcagatgatttcaagttccaacaattagtattagtagttattcatctgcgcagtggacaaaaacatggacacatggtcttggttaacttgtcagttgacgaccttttgtcattgagcctgtacctgtactggcagctcctgttggagtcattctgtttattttcggacatctacacggataaacagtaggaattgtttatggagcacggttggctttttttgaagtgaagagcacggttggctttgtgagatgtatcattcatacctgttcctatgtattctgggaacttgaaatgcaatagaaacctgggaggatttaacaaggatacatcattgtgtcattactatgtgcatgtggtttgcaatttgcacctcttccggaacaggtggtgaatagtctctg

SEQ ID NO: 22882 - DNA, 5871 bp, Zea Mays
ccggaattcacccctgccttctgttctgctgttcaccccgcgtgcgcgttcttcctctcgtgcgacaactgggcgaccgccgccgtcctacggcaggtggtcacttcttcgtcggttccttcgctggcgacgagcacccaccaagccctggaagaagcaaggattcaccctcaagctcgaaactgaacgcaactcccgaagacccggtgaagccatgtctgcggggagaggcgatccaaacacccctgccaacaggcctctgttcctgagtgctggggtgcccaacttaggctgtcacaatgttgcagctccagctgcagcaggcaacagcggctcgatcgcctcgcaagtcttattctccccatgctccacgtctgtcctgaatactattcaggaggttcctgctccacaatctgctctgttgagtccgataaaccgtgcaactgaacaaggtgatgtgccctgcatccagccatcctggaatatgcctgggggttgcacgcaggtgcctattaatatcatagtgttccatagggaactcactagaaggggttcgaggccgcagttgtcgccgtcggccactgccttacctgatgtttcagagggagcttccattcggcttgctgggagtaatttcttgtcacatggaagaacacctagcatcgttgcaggtgatatgacaacgaattcttcacagctagccactgcagataaatacaattcagagcatcggatgaattgtttacatgatgaagcatccaagactgaaaatggaaaaggaagtacccaacttccacaattagcaacagcaattttccgtgacagctacaatgatttggaatcagtggttcctgcagctacctgggaaacacgagtgcaacattctcaagaatcaaccacctgtcttgcagaaagtaccactgatgacaacattcatatgtaccaatctatgcaaaaaaggctcaagacacaaatcaacaagagtgaacacacaccattgtcagcaccaactgtacccaaggagaaaacactgactcaaattgagacgcagctagcaagtgccgagaaaaccgaaatgttcaggaatgaggaaaccccagcgctgaaaatgaaggctcggaagaaaaaacacagaccaaaggtaatcagagagaataagccagccaaagtgcagaaacctgattcaacaccagatggaaaatctccgaaccaaaaggtcaagagaagttatgtccggaagaaaagaaacctcagctctctggagaattgctctggtcctgttagcgatcaatcaatctctggagcaacaggagttgcagctagaagcagaacatcatcagttcgacgaagtctgcaatttgaatccaaagaacaaggattgcagggcggccattcgtcaatggccaacatacaccatcacaactatgagaaacctggccatgctcaaagttctttctactcagagtcagaagtgcagactgggcgtgtgatgcaagaaggtatggagaattcaccaggagaattagctttcgacatgagtcgcagactgaacaaatttttagatgagtacatacatttgccagatatgctaaaacctacacaagaagtttcggctgcaacttctgcatcatttagtacggaactggcaagggaagaagataatgtgggaagaacttgcaaacctgatggcaaaagtaagtgcagtttgtttgctgatgaaagggtggtaaaccccacaatagaagggaacaaaaaggacttggaattaaactattctgatgctgatggtcttgtttcctcagctaggtctttacctcaaatggatcccacaagaagtcagatgggtaaggtgtcggaagtggaaaaccccacacaccatagcaatggttcgctacctggcacacgggactctgttgtcttgagggctgcagctgagatgttcgcatttttccaagcgggtgcaataaaaaagaagcgatctgcccgactccgcagaaattcccccttttatactatggatcttaagaataatactctacaagcatcaacaagactgccacagccatgcatggatgcgctgcatagaagttcttgcattaagtttttgaccaaaaaacgttcagaaaaggcaagaccgcactgttccagtgtaattcaaccaaatgatgagctgaaggacaggctttcagctggaagcactttttatggcgcaactaatggatgcaaaatatcagaagagagttctccaaacttttcatctcagaccctggacaataaaagaatcaacgttgatactcattgtgaagtagcagaagggagatcaaccaacacatcaacaggaccctatatggattacgttcaaggagttgcatcaaagttgaagcatcttgatttgaatactgaacaggtgcagagaactgagatgcatttatctctgaccacaccagctgttatttcttttgagggaacaagtggtccttcaaatgctcttgtcccatatggtggtgtggtgatggttcccaatgagaggcccttgcagttagtcaaaaagcagcggcctcgtgctaaggttgacttggattttgagacgacgagggtttggaaccttttgatggggaaatcagccgagtcttatgggactgatgttgaaaaggagagatggtggcagcaagaaagagaagtgtttcaaagccgtgctaattcgtttatagcacgcatgcgacttgttcaaggggacaggcgcttttctccttggaaaggatctgtagtcgattctgtagtaggagtgttcctcactcagaatgtagctgatcatctttcaagctctgcctatatggcccttgccgcaagttttccttcacggccagtcaacaataattgtaaggatgatggtaccacagaagacaataaacaaaccaccaggatgagtgagctagtaggagagaaaagtgtgtttgaccttttctacaatggtgttagacctgatctagaagtgggatgtgaggaggtatcaatgacttgcaagaagacacacatggaaccaacagacaatactagggatagtgaatttattgaaggtgaaacctattcctttgattacaaatcaacagatgaaagcgtttgcaatcacaaagggataggtatagaacataaagaacaacaattaccagatttctcctcagcagaattaactgtgtctacagaactcgtgcagcagatacaaatccagaagatctcatcctctcaaattttaacttcagaaaccatacaatcaagattatctttgagttctgagatacctagaaattttgtttgtggtggttctgctgcagcttatcagcagctgggaagcaatttcgaccagggaagctcattaacagaaaatgatgccacagccagtgaaattgaatgtcacagactccaaatggctgcaataaatgattatggatttggtaaacctgagattccttctagttcctcaatgccatttttcttggctgttgatcctcaacaactgaaattgagaaatgagacaaatgtttcttcaacatcttccaacattccttcagattctgcatcaccaaacttgaaaaatggcacggatcctcttttgatgccatttaattcctacatggcagattggagcagcgataagataacttacaccactctgaacactccaaaaataagcacagaacttccagtcaagttacaccatgacaaaagtagtagctttgaagcaccaaacctgaaggagcatgaatcagtctttgcaacacatgaaatgacggtagaagcaacaagaaaagaagacgaacacacatcaaaatctagttttacttcctacaatggagtaccagatacagctgcacaagcatcaaagccaaagaaaacaagaaccacaactgcaaagaacacagagaattttgactgggaaaaattacgaaggcaggcttgtagtgaagggcagatgaaacaaagaagttttgaaagaagagactctatagattgggaagcagtacggtgtgcagatgtacgaagaatatctcatgccattcgggagagggggatgaataatgttttagcagagcgaatccagaattttctgaatcgtttggttagagatcatgggagcattgaccttgagtggctaagatatattcccccagactcagcgaagttgacaccaatgttggtcgtatatgtgtaagactgggatgggtgcccattcaacctcttcctgaatctctacagctacatctcttggagctatatcctatcttggaaactatacaaaagtatctttggcctcgcctttgtaaactcgatcagcagacactgtatgagctgcattatcagatgattacatttggaaaggtcttttgtaccaaaagacagccaaattgcaatgcatgcccaatgaggagtgagtgcaagcattttgcaagtgcatttgcaagtgcaaggcttgcacttcctgctccccaggaggaaagcttagtgaagttgagcaatccatttgctttccagaatagcagcatgcatgctatgaattcgactcacctacctcgccttgaggggagtatccattcaagggagtttcttcctaagaattcagagccaataatcgaggagcctgcaagtccaagagaggaaagacctccagaaaccatggaaaatgatattgaagatttttatgaagatggtgaaatcccaacaataaagcttaacatggaagcttttgcacaaaacttggagaattgcattaaagaaagcaataacgaactccagtctgatgatattgcaaaagcattggttgctattagcactgaagcagcttcgattcctgtaccgaaactaaagaatgtgcttaggcttcgaacagaacactatgtgtatgagcttccagatgcacatccacttttacaacagctaggacttgaccaacgggaacatgatgatcctaccccatacttattggccatatggacaccagatggaataaaggaaataactaagacaccaaaaccatgctgtgaccctcaaatgggaggcgatttatgcaataatgaaatgtgccacaattgtactgcagagaaagaaaaccaatctagatatgtcagaggcacaattctggttccttgtcgaacagctatgaggggtagtttcccacttaatggcacttactttcaagtcaatgaggtatttgctgaccacagatctagccacaacccaatccatgtggaaagggagatgctatggaacttgcaaaggcgcatggtctttttcgggacttcagtacccaccatattcaaaggtctaagaacagaagaaatacaacaatgcttctggaggggatttgtctgtgtgcgaggattcgacatggagactagagcaccaaggcctctgtgcccccatttgcacattatagcaaggccgaaggcccgcaagacagcagcaactgagcaagtactctaatcagcaaagatatcagttttatgaacatcatgtttattgtgatatgacatcaatagctctcgacctatgcatggaatcatattacttcctgcctggcgatggccattgtttaggaaatttaagccatggatggggtccgagactgttagttctgagacgagaggactaatgaagcatcaggaagcaccaataattttcacttttttgtttcagatctactgtatgtaaattagcatctagctgttagtccatgtaagatgccattgctatcctttctgagacaaactaccttatcaacatttcatttggttaacatttgttctgagtattgggaagcctgccagaattttgttttcgtacctgtatattcctgttatctgtacaacggtttag

SEQ ID NO: 22883 - DNA, 187 bp, Zea Mays
cgcatgccgaccttggtttctcccgcaactgaccctctcagctcagactcgccccctctgacgcatatataggtcaccgtgaacccctgtgccaatccagtagccatggcgtgcagagatggaagggagagagaggaattggcctgccactcaaatcgttcgctgccggtgtgtcttcggcctcgag

SEQ ID NO: 22884 - DNA, 3018 bp, Zea Mays
cttcaactgctgttatactttacagcaagcatttcagacggcgaatgctcaaagaacttatcttgcatcaaggtcggcgggatgtttctgagagacaccttttctcgccctccatgcacattgatacagccgtctatgcaagcagtttcacaagaacctccacctgtgcctgacttcggtcaaaatttttgccctcctatatatccatttggcaatcaactattagactttgctgctggagttcctttgttttccctctattgtcttcagaccaccccttctccatcacctccgaagtttgcttcaaaaacagtcatcacatgccagtctatcatggtaaccctccaggagcaatcgtgcttaagaattgcttcattcttggctgatggagttgtacccaatcgtggtgccatattgccagagtcttcaatcaacagcctgacattttcacttaaagagtttgatctctctgttccattagatactgatgaaatcgcaaggtgcagtggaaccaagaatactaacccccaatcatcattttcgggtgcaagactgcatgtggaagacctatacttctgccagtcaccatcaactaagtgtccattgctaaaccttgacagagatccagcttgcttccttctgtgggaatatcaacctgttgatgcgagtcagatgaagtgggctacttggtcttctcacctaagtctctcacttgaaacttctagcacttcaaatggacagagagcagtcagtgattctaatttgtggaaatgtattgaactagatgatatccgatttgaggtagctatggttacagcagatggtgggcctttgttggatgtaccacctccagagggtgttgtaagaattggtgttgctttccaacagttcaagtccaacacctcagttgagcaattgttttttgtgttaggtttttatacttactttggtcaagtagcagaacgtatctcaaaggtcagcaacgctaacaagtctgagtcagtgaagtcatcggctgacaagtcggagaataaactgccaagtgatacagctgtgagtttaactatgaataatctccagctcaatttcttagaatctttgtcagcaagtgatgtacatatgcccttggttcagtttggcggaggggatctgttcctgaaagtttctcaccgcactctaggtggtgcctttgcagtcacgactaatttgatgtggacaactgtttcggtgaactgtttagaaggagaaagtgctattgtttgtgagcatggcactgcagtgactggtgaacacagcattttagtgcatggaaatgggcaccccaagatgagagctgtcttttgggttgatcataggagcaaacaccaggttaaagaacctcagttccttgatataaacatcactcatgtaatgccttacgatatccaggatatggagtgccatagcttgaatgtatcagctaaggtatctggtgttcgtcttgggggtggaatttcttacactgagtctttactgcatcgatttggtatcctgggtcctgatggcggtccaggggaaggtctcttgaggggtttgaaggatttatcttcaggcccacttgcgaagctgtttaaatcctctcacctcactgaaaaggaagatgaaaggtccaaaattgatgatcacaattcaaagtttgatctcggggtgccagatgatcttgatgtatcaattgaacttagaaattggctatttgcacttgaaggaactgaagaagtaggataccttttttctcctcgtggaggtgatggtatcagtagagaagaaaaatgctggcattcaaccttcaggaatctacatatctctggcaagagcagtgaccgacttaaattgggaggcagaagaaaggtgtcacccgaaaaggcatttccagtggaacgctttacggctggaattgaaggtttgcaggcaataaaacctcgtctgagagatcagtgcactaaaaaaggaccatcaaacaatcatgagatgggcagagattttaatagttcaagttctgttggtgaccatggagttgatgtcgaagctaccatggtcattggcgaagacgagattgagggtgccaaatggacaatggataatgtcaaattttctgtcaaagaaccaatcgaggcggttgcaacaaaagaagaactagagcaccttgtgatgctttgcagatctgaggctgatgcaatggggaggatcactgctggaattcttcgtctccttaaacttgacaaatctcttgggcaaggaactatagaacaactacgtaacctaggaagtggaggcatggacaatatcttttcacccaggaggctcagcaggcagaacagttttggtagcataggcactcctcggactccaactatgcaagccattgcagacgtcatgggttcgaaaaccacactggaagcaactatttcctcattacaaggcgagatttccgaatccaaggccaaatgtatggcactgatttctcaggcaagcagcactgaggatcaaaaccgtgccgaggacatcaggcagcttagcgaaaagctcgagagcatgcaatcgttggtgacacgattgagaactttgatcatttgatctgactatctgagttgtgcatggttttttttgtgtacagtacacaaggtcgttctgttcaaactcggaagtggcaaatgctgcttcctggtggctggttgagttattcttttgtgtacatttatatatcttgggaggcggtgtgtaaagattaaggggggtggaataatcggttgataggcagctggaggaaattttgtaggcagctggtactggcaaatatgctttgtagcacggcatcatatgatcaaacgggtcactaagaagagtgcagtgccatttatatcattgtatgtataaaatgtgcacagaacgtgcttttcgcgcacaaaaactttgttcctcctaagtcactgaagtgtttatatgccacttgtgtcaactatcgaagtgtttcttgccgtg

SEQ ID NO: 22885 - DNA, 737 bp, Zea Mays
aggtgtatggtttctatgatgagtgtcagagaaagtatggcaacgccaatgcatggaggtactgcactgatgtttttgattaccttacgctatcagcaatcattaatggccaagtcctctgtgttcatggtggtctttctcctgatgtacgcactattgaccagatacgaacgattgatcgcaattgtgaaattccccatgaaggccctttctgcgatcttatgtggagtgaccctgaggagatagagacatgggctgttagtccccgtggagcaggttggctgtttggatcgcgagtaacagcagagttcaactttgttaatggtatcgagctagtttgccgggctcaccagctggtccaggaaggcttaaagtacatgttccaggagaagggccttgtaactgtgtggtctgcacccaattattgctacagatgtggcaatgtagcttctatattaagcttcgatgagaagatggaaagagatgtcaagttcttcacagagacagaggaaaacaaccagatgcgaggcccaaggactgcagtcccatatttcctctgacttcaattgtacattttagaagtcaacatttaaatctaccatccggagtctcatgctcctgtattcgttcagtgacactgtcaaagttttgttgccgatttagttcgcgtgctatccattttgtaccgcgcttttgttatgcagcagatgagtcacgcatggtatgtcatttatctc

SEQ ID NO: 22886 - DNA, 2302 bp, Zea Mays
cccgtgcagtgcatgcctctcctcgctccctccgcctcgtctctctctgagtcccttcgtctctctgccagctgcttcaccttctgccgctttgatcgtccacttcacttcagcacagtcacgtcgtttattgtcgccttcatcgtctgctccagtgtttggtgatatccatcgctttcttcgtcagctccacttcctcgtcgagttgctgcttgtttcattggggtttctaagttcctcttgcttccttatatatttacacattttaatcttccctgcacttcaatgtgagatgtggaaaggcttgccacagctagatttgtgcatttttatctagtcagctttatttggaaaatacacgccaaaaatgaccactcttttttgggggtcaattcaacattccgcttccctcccactgtttctctctgctcttgaatctacgatgtgtagactttgttattttagtgttttgcaatttcattttcccttgaaaatatagggaacctcattgcattctttttggatcgatggattccgtggcccataaatccctgctcttcaatttacaccctccgtcttcatctgcaacctgcttcgtctaccgttgtttttgtcaggctatgaaaaaggtttgttttctttgtccctgatgctttgtgcttctaccagatctagttccttcagctagatttgccagtcgcttagatttttggatttgttcatcgccttaaactacaaccgcttttcgtctccgtcttctagtgtcttcggcgtaaaaggtcaatcgccccgcctccagcaaaatgacttcatttttccccgacttttgttacggttagtgctctttgctgctgactcccttgtgtctgttatccaagctacgatttctcccccaaatttaaggtttagggtttatgttacaaaggaaaaaggaaggataccaatgaaaaaaaccctcactgttacttgttgttcgatttaatccctggttcttgtacttcaagccttgaatttgtttggtttctcccccaaatttgaagttcgggactaatgttatagcaaagggaaaaagtaaggaaagcaagacaaaaaatcctccctgttacttggggctagtttggaaactcaaatcccctccaatcccgaaggggattcgaggttcccaaagtagtgtttgatttaatccctggttcttgtagttcaaaccttgaatatgttcgtcttattttgtgtagtccttttccttttttggtccccggcacatgcttcacatgatctgttacaaatttgtggttggtcaatccgttgttccccacgtatattttttaaaacttctttaccttgaagagttcttttctgtcctattttgtttggttttacccacactggtttcggttccctgcttttcctctgttcctgttttcaatcccactcgattatgcccaacttagtttgaattcacagttattttcaatatggtaaggaaatgtttgctacttatatattagatcgcagccacattttcatccacatgctctcacttcgagattttgaccctttttccacgattttcaatacggtaaggaaatgtttgctacttattccctgttgtccattatccaaagtatggtttttaggccaaatttaaggattactgtttatattacagaaaaggacataggaaagaaacgagtaaaaaagaaggaaacaaattctttcagctacttgctgttcgatttacttccacatctaggattagttgttctttttttccacagcaccccccccggggcatgtctcactggaacttttacaaatttgggtttagggtacataaaagcacgtggagtgatacctctgcacctcagtggctttatcggcgaggcttggttgctgagtcatctacaaagacatggatcagctgaccaagctcgagctaccatcgcctccaaaaaaatgaagcatacccaacttaacaaagagctaccatattctatgggttcaaaaaatgaagacgactagcccaccacgaagcactcgaaggtattggttttttgcaagcattagaagagctccatcactttttaatataaaagccttttgtgtacatatgaaccaactgttggagcatttctaaaactgtattgacttatgcaacctctagaaacacactgttactgcatattggagtacactgcttaaatgctacttgatatatattgtaatttcatttgatattacaaatgcggttagcaaccaaattcagctataaatttcgtaagcatgtggcgccttatccgac

SEQ ID NO: 22887 - DNA, 2881 bp, Zea Mays
gcgctccactaatcctcatctctcggtcgctaatggcgtgctgatctttccaccgtcgcatacaggcagcaggatgctctttattcccctgtgtcagcttcagcgaagctaatcccattccagtgcccgtaccgcgccgtccctatcgtgccggatcgccacccgctcgctgcgcccccacctccccccctcgccggttcgccacttcgccccacctccgcgcctcagatccatccccaatccggcaaccctagcgccgggttcctcctcctcgtctccgcccgccgccgcctccattgccagaggtgatcgagggggagagatagagcttgggtggtcggattagggagagagagagggaggggaggatgtccagaaggtcggtgaacccgagccggcgggtggcggacgggggcttgccgtccttcggcggcccgttccaccctaagtcacgctcgcctcccgtgctcaccattgccctcgtcgtcctgggtgtcatttttctcattgcctacttcaacagcagcccaggtgtaactgttacgagcaaagagaccgtgaccaggtctgaaggttcttgcacatcagaagttatgcgggcgcttccatatcttaagaaggcatatggcaatgccatgcaaaaggttctccatgtaggccctgatagttgtacagtagtttctaacttgttgaaggaaggaaaggttgaagcatggggagtggagccttatgatttggaggatactgacagtacttgcaaaagactcgtgcgcaagggctttgtccgtatgtctgatattaagttcccccttccataccgtccagattcttttaatcttgttatcgtgtcagatgctttagattatctgaccccaaggtatctgaacaaaacacttcccggtttagcaagggtttccacagatggccttgtgatttttgctggtatgtgttttttcttgaaatatttatcgccttctctttttatgggaaaccctcattggacctacagataccaatagttgtacctttgtgtggtaaaatatattttatataagtgaccatgtgcacttttttgctatcaccaaatggtgaaatactactgattgtttatattcttttggttgctgttatattctaaacaaaccaccttgtacttgaaatattcctgtagaataatcttagatcttgctgttgtttttccacgtgtctttctttaactttattaagaactcctaaaaaactcgacccttgtattaataactccatcttagctgtgtgtcttgaactaaatggattttcttcccaagtggaaacaaaaagggatcttatggatggaccttaaagaagtatgtgtttctatcttaagataacagatgatgcatggatgatccttaaatatgtgctaatgcaatatcagatgatacaaggaagaaccttgaaagtagtatgtgtttctatcttaagatgacagatttatatctggggtactgcaacatcagatgatactattcggtcaaaaaaaaacacaccagatgatactaacgtcttggagaccaaagtgttatcaacttttaaggtgtgttctctgaagtaggtaggtacattgattgaactcttgtggtgggtactggagctgaaacttttctgctcaaacagatctatattcttttttgagtagtcattcaaagttggcaatatgctagtaatgtccacctaggccctgaataatgctttactcctgttctttttataccattatcaaatgtttaaacataactttttgtggtatacgtggatggcttagatcatctgagaaatgtttgtttcatttcttctttacaggcaatcctggtcaacagaaagctaaggtctcagaactaccaaaatttggaagaccggcaaaactgcggagttcctcgtggtggacaagatactttgtccagactggcttaacagagaacgaagggccactgaagaaatttgaagaggctacatcccagaacaaataccaaccagattgtcagatcttccacttaagttcgccaaggaacctgttccagacaacttcccatttgaattaatcgacgaagagggcatgagcgtggttattttgagaagggactacaaggacgagaaggtcgaggttactgtcagcatgcctaatttagaaggaggccccgagtttggtgatgaggatggcgagggcgatggtgagagcgctgtcaaggacgacggagaagcagaagaagatgacgagagtgccggggatagcagcatctctcttaaggtggtagtttccaaagactctggcccaaagctcgagttcacatgcacagccttccgcgaggagatcaccatcgatgatatgctgatagttgagaaaacagacgacgacgacggagaagagaagttcccctacgagggccccgagttcaccgagctccctgtgaatgttcagaaaggcctgttcaagtacctggagcaaagaggggtaacgctgtcggctaccaactatatgcacgattacatggtgactaagcaggctcaggagtacatccggtggatgactaagctgaaggatttcgtgacgcagtgaggaacagcgtcgtgattcggcagcattgtttggttagcctagccttagcatgtgttacagccttacaggaacactacgactacaccgaattggccacactccccaaaaaacaaaaaagggggagcattgtatctgcttcaatgtatctgtatcagctggcaaaacagtagcaagtagatttccagtaatgtttagtggtgggcattaggtattacgatacgtatctggatgaatgttttggaattctggtggctgttagaaataaatgcgacacaaaataggatc

SEQ ID NO: 22888 - DNA, 236 bp, Zea Mays
ctcgccatatttttaaatgtcgtcaaaagttcgcctgtaactgcggtctcgccgtcgaccatgttcaagtggttgctcggctactcgcatccagcctattcgataaaacacccaaatccatagactgtcgacgtactgctgccatacgcggctgtctctgtcacttgcatcagctcgctagacctacagctctatatatgtcaccctcccgtgtcgtcgtcgagcttgccgaacct

SEQ ID NO: 22889 - DNA, 4325 bp, Zea Mays
tctggatcttcagttccacggccccacccagccgcgtctgcctgcctactgcctcctccaggctctccagctgtccgtgtccagcatcccgcactccgcagcaccactcgcccgccccacaccaccacacggcctccgcccacgcgcacggcgcacccgtcctgtgctcacatcaccacgccacacgacgcgctcgtcagtcgtcacgcaccccacgacgccccaaccgtcccaaacccagatccttccccgcctcgccaccgccaccgccaccgccaatccaccaccatgcccatggacaccgacgagcgccccctcgtcgagctcgcctccgctgcggccgccactactctcgccgcctcctccacctcctccgcccccttccccgcccctgccacgcctgggttctcccgcgcggtccgctgcaacgcccccgcttcctcgctcccggccgatggcggggccggcgcgcagccggcctacccggagaacgcgatctcgacaaccaagtacacgcccgcgagcttcgtgcccaagtcgctcttcgagcagttccgccgcgccgcgaactgtttcttcctcgtcgtcgcctgcgtctccttcagccctcttgcgccctaccgcgccgtctccgtcctgctcccgctcgtcgtcgtcgtcagcgccgccatggccaaggaggccgtcgaggactggcgccggaagcagcaggacatagaagtgaacaataggaaggttgaggtgtatgatgggatccaatcatttcatgagacagaatggaagaagcttcgagttggcgatataattaaagttaaaaaggatgagttcttccctgctgatcttattttcctttcgtctagctcttgtgatggattatgctatgtggagacgatgaatcttgatggtgagacaaacttgaagcggaaacaggcattagaggtgactatgggcttgaatgatgaccatttccatagtttcaaggctttcattcggtgtgaggatccgaatgagaaattgtattctttcttaggaacactatactacaatgggcaacaatattctctgtctccggaacaggtcctgctaagggattcaaaacttcgtaatacaatgtatatatatggcaccataatatttacgggacatgatacaaaggtgatgcaaaatgcaatggagccaccatcaaagaggagttcagttgaacgaagaatggataaaataatatatctcctttttgtgattctctttgttattgcaacgtttgggtcaattgtgtttggaatgagaacaaagcatgagataagtccaggaagctatgcatggtacctcaggccggatcaagcaaatatattctttgatccaaacaatgcatcgtttgcagcattctgccattttcttacaagcctgatgctgtatgtgtgcttggtgcctatttcattgtatatatcgatagaaattgtcaaggttttacagagcacatttataaatcaagaccagaatatgtattgcgccgagtctgataaacctgcaagagctcgcacttcaaatttgaatgaagaacttggtcaagtccatactatactgtctgacaaaacagggacattaacatgcaattcaatggagttcttgaaatgttccattgctggtgttgcttatggaagtaggcctacagaagttgaaacgtgttatggagaaatagttgaaactaatggcagttttgggcgcaaggacactactgaattcaagagatcagtcaagggatttaatttcactgatagtcatttgatgaatggaagatgggccaaagaatgttctagggatgctatagaaatgtttttccgagtcttagctgtttgccatactgcgattcctgtggcagatggaaattctgctggtatgccttatgaagctgagtctcctgatgaagcagctcttgttacagctgcaagagagtttggctttgaattttatcataggacacaaacaactatatcagtgcatgagtacgatcctgtcgttggtggaaaggttgatagaacatataaactactcaacatcttagaattcagcagtgctcgtaagcgtatgtctgttattgtgaggacagaagagggtcggctatttctgttctgcaaaggagctgacagtgtaatattcgaaaggctctccaaggataatggaacagctcatctgaccaaaacaaagtgtcacattgatgagtattctgaggcaggtctccggaccctggcacttgcatattgtgaacttactgaagaacaatatgttgtatggaatcaggattactcgtctgccaagaattctgtacatactgatcatgttgcagctgttgagaaggtgtcagaagacattgagaaggatttggttcttttgggtgctactgctgtagaggatagattgcaaaatggggtccctgagtgtatttataaacttgcacaagctggaattaagatctggattttaactggagacaagttggagacagctgtaaacataggttacgcttgtaacctactgaggaaagagatggaggaaatttttatcacactggagaactcaagtacaagtgcttcagaggggtccagtggagaaggaaacaaaattgccacatttgaggaaattgatagaaaattaaaagatgctagaggaaagatttcccaaaaaggaacttcaacttcatttgctcttatcattgacggcaatgctctgacacatgctctcacgggcagccttaagaactcatttctggatctagcagtcaactgtgcatctgttttatgttgtcgggtttcaccaaaacaaaaggcactggtcaccagattggttaaaattaggacaagtaaaactactttagctattggtgatggagcaaatgatgttggtatgctacaagaggctgacattggggttggaataagtggtgctgaaggaatgcaggctgttatggcgagtgactttgcaatagcacagtttcgttttttagagcgattacttcttgtgcatggtcattggtgttatcgtcggattgcagctatgatatgctattttttcttcaagaacatcacatttggctttacgcttttctggtttgaggctcatgctatgttctcagcacaacctgcgtacaatgattggttcatatctttctataatgttgccttcacatctcttcctgtcatcgccctcggtgtttttgacaaggatgtctcttcccatgtttgtcttgaggtcccttcattacatcaagatggcgttaataatgtattcttcagttggtcccgaatactcagttggatgttaaatgggatgtgctgttcaataattatttactttggttccctcaacgctattctggttcaggctgtccgacaggatggtcgcgttgctgggtttgatatccttggggtgaccatgtacacttgtgtagtgtggactgtgaactgccagcttgctctctacatcagctacttcacctggatacaacattttgtcatctggggcagcatactgatttggtacactttccttgtcatatatggtctattttccccagcaatatcaaccactgcatatcatgtttttgtggaagcttgtgcacctagccctttgtactggctatccactctaatgattgtggtgacagccttgatcccattctttgtctacaaaatatcgagaacactctattatccacagtatcatgatcaagttcagagggctaactcaaagaattggtagtgcctgttgtataagatgctactgaatgaggggatgtacagtcagtaatttggtttaacataccacatgctttgctttgtagatcatgatgcagaggtagtgtatataaacaaagttggctgtttaacagatcttgtatttacggtctatgcccacaaagttacagtttcaggttgtggcagtgcgtctgtcaaatatcagaacacaatggtgacttcgcagtcacgcgaaggaactgcaagcggcaaattgattctttggacctattaccccactaggacacgtttttcttcggggtgccatcatggaagcagattgcaattaggatttatatagaatgatgtatagcatgtcgataactcgaacatgacttcctcgatatatgtagtactgtcttccaaaaaatagcattcttgtagcatcaaacggccaaacctatgttcgtggaagcatagttaataccctttattgctccaatggtttgtacatagttgtatgaatatatgagatggatcttgatgttgtttaacatttgatatgaaatgaataaatgatatgatgttatctct

SEQ ID NO: 22890 - DNA, 2849 bp, Zea Mays
caaagactcaacacaagcgcccccctcgtcgcagtcccgccgttacatggcccgctctgttcccctttccggcgcccgcgacggactgcgacgagcggatagatagatctgtgccccgtccctgtctcgccatcctcctttctcctcctccactccctatcgactatcgagcagagcgaatccttagcggggaagtctttccgagctcagggagtggggtttaaaacgcggctcgacgaaaggaaggccgcactcgctgctgctgctggtcgcttgctttcggtggcgagcgtctcggtaaagcggcgtcggcgtcggaggcggcggcagagactggacttgcttgctccttgctgcgcagtgtagtgctgtgctaccttggagacaggatcctgccgcagggactcataattgatcagtgtgccccaacataagagcgaaacgtgactgagtttgccagctcccccttcatccactgtggtcgctcgtctgctaatgcccgcatcggaggattgctcacggatatgcttctggtgatgggcaacccggggcgctcgcggcagttgtcagcgctggttgcttccgccgccatcttgctgtcactgtccgcgttgccaatttgtcggccctacacctacgagcaagatgtgtttgcgataaacggcttgtacacggcacttggagcaccacagctgcctaattggacttcaaatggtggtgacccctgcaatgaaggctggcaaggtgtttcatgtgtagcgtcaaatataacctccataattctcagcggtgcaaatttaggtggacagctgggcaacactttggggaattttacatcattaatcaccttggatctcagcaacaacaatattggagggaccataccagatggtctaccactcacaatgcagagatttttcctttcagctaaccaactaagtggtagccttccaagtacattgtcatcccttacacttttgacaagcatgtcactcaatagcaatcatttgactggagcgataccagatgtattttcagcactcactggacttgcaaatttagatttttctgataacaatttgaccggtccgttgccaccttcaatgggaaatttgacatcattgactagcctacatattcagaacaatcaaatatctggaactcttaatgtgttgcaagatctccctttccaagatttgaacgttgaaaacaaccttttctctggtcccgtgcctgtgaaattactgaacttgccaaacttcaagaaggatgggaacccattcaatacaagcatagctccatctgcgcagcctcccatcgcgccaacaccattaccgtctatcccaccttcgtcagggcatgtcccctcaaaagaacctgcacattcttctagtgttccagaaaaaaggtcgagagatgatatttatatgaaaaacaagataggaagggtacctcagaagcttggagagcctaaaatcaaggagccaccattaaaactcaagaatgatgctgagaaagctccgaatgttgtttctgatggaagagaggagcataagttaaaagtgccaacatcagaaacttcaaatgtggtttatgatccaagtccaagggatggggcagaacttagattcatcaccgacagtttcagtgaggaaaatatcataagagacagcaggtttggtaaggtgtatctggcaaagcttcctgatggagagctactggaaattttgaagattgactcttctaactcaaaagtgccagtagatgcctttcttgagctagttgtgaggatttctgaactgaggcatcctaacatacttggtcttgttggatactgtgcggagtttgagcagcgattacttgtctatgagtactgtagcaagatgaccctacatgatgaacttcgtcatgtggatgactcaagcaagccattatcgtggaatgctcgcctccaagttgcttcagaggcagcaaaagcattgcaacatcttcatgacggttgccaaccaccagttgtacaccagaattttgaaccctctgttgttctgctcaacagcaccttagttgtgcatatttctgaatgtggccttgcatcactagcatcaaaatcagtttctcagttgtctggacacaccttattccattatgaagcacctgaagtgcatgaatctggatcagtaagcgatcgaagtgatgtttacagcttcggtgtagttatgttggagcttctaacaggacgtaaaccttatgacagttcgtatccacgagctgaacaacatctagtacgatgggccacttctcaactctatgatattgatgccataacgaagatggttgatccttccattcgaggacaatgttctgataaggcattatcccgttttgctgacattattagccgctgcattcagcatgaaccagaattcaggccaccaatgtctgaagttgtccaagacttaactcgcatgatgcctttgacgaccattgatgcggtagtaggatattttggccaatgcaaaatgggtggaacacagtggcaggatgcagagactgcaccacgttttgtccactgccagtaatgctcctctgaatctctggtcaatttatagttcaaagctattgttgtaattctgtagtctgcactctgcacaatatatttcttagtgcccagttccagatcacgtggtgtgattatgcgtggttatctagaccatatgtaaataccaagaagttaaacaaatgtattatagcgtgcttgtttgaggaatgagaaagtacatcttcttactcctcactttattatttgatttgttaaatgaaatgagttggtccatcatatttcattcttt

SEQ ID NO: 22891 - DNA, 986 bp, Zea Mays
gcagagcgacgagcgacgagctaaaccccgaccgagtcgctgcttgggtgcccaagatagccctaccgcctcgcctctctcgttccccctcatcgccacgccagtcgcctccactcccagtcatctcccatcaccgacgacgtgtcgaggcgagagaagagggcgagtccaagtctagggttcccgccgcatcgacacgggcatcgcaccgcaccgcgaggggcgggcacggaggaagatggcaccgcgcgggcgcgtggagctgcggcggatcgaggacaaggcgagccggcaggtgcgcttctccaagcgccgcgcggggctgttcaagaaggccttcgagctggccctgctctgcgacgccgaggtcgcgctcctcgtcttttcccccggcggcaagctctatgagtactcctcctccagcatagaagatacatatgaccgctatcatcaatttgcgggagcaggaagaaaagtgaacggacataacaacgataaccgggatgtagctgcttcagatttacagtcgagacttaaggagatcgcaacatggtctaaacaaaacaacgctgaggagtcggatgccaatgaacttgagaaacttgaggaactcctgacaaatgctttgaggaatacgaaagccaaaaagatgttggcaaaagaaaacaatggtggtgccggtgcaagtacaagcagccagatgttgctttactcggcagagcgtgcaaccgacaaatgaaactgtgccgctccttgccgaacttaagccccgttacgttgtcgcacaaagtttatttcctagcactgtgcttgctgcttatgtttgtttggatgtgccaacctgcagtgaccctcgtggagcctgggtctcacgctcctcttacctagtgtgatgtgcagaaaaagtgtgatgctgtaaaattatgtgattgcctagcagatgtcaaattttcaatcagtagctaactccttttaatggtaaaata

SEQ ID NO: 22892 - DNA, 1224 bp, Zea Mays
cgcacaacaagttacctagttccagccaaacatcttcttccagtgccaagaccagaccctgaggttgttgcaatgttgacatcaggactgactgcatcaattagtcttgaaaaggcaggacaaatgacatctgggcaagttgttttagttacagcagctgctggtggaacaggacagttcgcagttcagttcttagggacatactttggtagcttgtatttttactggattgagcaatgggcaagatattctagccttctaggacatggctggcgaaattagcaggcaacaaggttgttgccacatgtggaggtgaaagtaaagctgaacttctggcttccttaggagttgatcgtgttatcaattacagaaatgaacgagtcaaagatgttctgaagaaagagtttccaagaggtgtagatatcatatatgaatctgtaggtggggaaatgtttgacttgtgcttgaatgcacttgcagtccatgggcatctcattgtaattggtatgatctcccagtatcaaggagaggatggctggaagccaaagaactacactggactatgtgagaagattctagctaaaagtcaaactgtggctggatttttccttgttcagtatgctcacttgtggcaagatcatcttaacaaactttttgacctgtatgcctctggaaagctaaaggtttccctagaccccaagcaattcttgggtgttgcttcagtcgtagatgcggtcgaatatcttcattctggcaagagtgttggcaaggtcgttgtgtgtattgatccatcatacggtcagatcgttgcaaaattataatccatggacatgatgcgcattgtcttccatggtcacgtaggttattgtcttatagttacacatatacatcaagaccgtattttcccagcgggtgacaaatgaataagggaacatgttggtgtatagtttagtttcatttttccaaagtgtaagatgcacaactatactgaaggacaagcatgggcatggaaatcgattaagtttctaatcccgtgcagtaggatatgcattcgtgtggcctcgttccacgttgtatgtatacagtatatattatataacttgtctcagtgccacatgcttcaattcgaaccggtaacaataattcaaacagctcatgcagatgcattctcaaatacacagcttggaacatcgatattttcttttgaagaaaatttgtttgtgc

SEQ ID NO: 22893 - DNA, 2758 bp, Zea Mays
ttcctgttctgttcgcaccgcctccgcctccctccctccctctccccttccggactctctgctctcctctgctgctagtccatccattaatctcctctcctcgccatcgccgcactcacgctacgcttccctcctcaagcccgagggcttctccgggaaggaatcgccgcgccgggttcctgcaacgccccgccctttgcgcacccggagcaactgagtcgtggctatcgaggatgatgccgcgtttcagataacagagactgtgagagtgcacgacacacttgacatgcagagatgaagatcagtgcgcttctcacctccgcgggcatcaacattggcctctgtgttctcttcctgtcactctactccgttctcagaaagcagccggccaatgtcagggtctacttcggccgcaggatcgctgaggaacacgatcggctccgaggggcatttatcttggagaggtttgtcccatccactggatggatagtcaaagccctgcagtgtactgaggaagagatcctggctgctgctgggttggatgctgttgttttcaatagaattctagtattcaggagtacaagcacattgccaggttgaagctccttcatcttacaagcgcaacaccaaaaccaaaccattttacagttcttgttcgtggaataccaaaggcagataaagaatcatgcagtgatgttgttgataatttcttcacaaagtatcactcatctagttatctcttccatcaagtagtttacaaagtcgggaaagttcagaagataatgactggcgcaaagaaggcatataagaagttcaaacatttcacagatgaaactgtcgatcaaggttgcaggacagttacctaccgctgttgtctgtgtggagcttcttcaaattctttcaagttgttgaacactgagtgtgagcagaacaaggggaaagcggacaataaatccatcttggacttagacgatgaggaatgcacaactgcttttgtatttttcaaaactcggtatgcagcacttattgcgtcagaaatacttcaaacatctaaccctatgaaatgggttgctaatcttgctccagaaccagaagacgtgtattggtccaatctttggctaccctataagcaactttgggctcgccgtattgctacactcctaggctctatctttttcatgttcatatttctgataccggtgacatttatacaaggactatctcagctagagcagttgcagcagaggcttcctttcctaagaggaatattgaagaagaaatactacatgactcagctagtaactgggtaccttcccagtgtcatactgcaaatcttcctgtacattgttgctccaattatgatgctgttttctacattggagggccctacatctcacagtgaaaggaagagaagtgcttgctgtaaagtgctgtactttacagtttggaacatattctttgctaatgtattatctggtactgtcattagtcaattgaatgtgttatcaagcccaaaggacatacctgtccagcttgctaaagctgtacctggacaggccactttcttcatcacctatgtcctgacctcaggatgggctagtttgtcatctgaagttatgcaactctttggtctgatatggaactttataatcaaatacgttctgagaatgagagaagatacagaattcgttccctcgtttccttaccacacagaagtaccaaaagttctgttgtttggactattgggcttcacattttctgtgctggctcctctgatcttaccttttctgctggtgtacttttgtcttggttatgttgtataccgcaatcagttgctcaatgtgtatcgaacaaggtatgacacaggtggtttgtattggccaattgcatacaacacagtcatattctcacttgtgctcacccagatcatctgccttggtgtatttggccttaaagaatcgccggtagctgcaggcttcactgtacctcttatcatccttactcttttgtttaaccagtactgcagaaaccggcttcttccattattcaagacttttccagcacaggatttaatcgacatggacagggaagatgaacgatcaggaagaatggatgaaattcaccacggacttcattctgcttattgccagttcgctgacactgtagatgtgcccttggataaaattgaaatcgttggtggggatgaggagcaaggctctagctcgggtcagtccagtgttaaagaaacgtgcgaggatcccaagaagcacctggctcaccctacactaaaaggactccctgttaaccgcctccggcatgccgtgaggtcggttactttcctgatcagattgcagagaagaggtttatcagaacagaaaatcggataattagttagccgccaaccccctttgcttgttggctatataaatgtacagaggcatacatgcatatacgatcgttcccttagaagagagaagggctaatgtagaagtctgtgggagaacatcatcatgagtgttgaggtgcaattttgttttgtcgcatggatgagtttgttggttctgcgggttatctggcagattcagctacccaaaccttagccttgcacgttgatgaaattaatgctcatggttttgttgtaagagattaatgtggccaaagtgatctagatgtataatgtcctcctctccattggtttgtgtttgagcctcgcaactttagcaggtctgttagtcttcatgcgccaatcatattgagg

SEQ ID NO: 22894 - DNA, 1201 bp, Zea Mays
agattgaaaagtctgaccgaatctctgctttctgatatggaaaaagggaatcttgtttgtcgctattgatcagaaacgcccattgtctgatcaaggtccatttgacattgttcttcataagttgactggaagggggtggcagcaattgctggaggaatatagggaggcacacccagaagttactgttcttgatccacctggcgcaatagcaaacttgcttgatcgccagtctatgcttcaagaagtatctgaattggacctcacagattgtcatgttctcttctgcaggtaaagtacgtgtgcctaagcagctattcgttaatactgatccctcatcaataccagctgcagttaggagggcaggtctctctctcccattggtggcaaaacccttggtggcgaagtcccatgagctatcccttgcttatgatccaacttcactgaccaaacttgagccccccttggttcttcaggaatttgttaaccatggtggcgtcatgtttaaggtgtacattgttggggatgcaataagggttgtacgtcgattttcactcccaaatgttgatgaaggcgatctatcgaacaatgctggggtatttcggtttccaagggtctcttgtgctgcagccagtgcagatgatgcagatcttgaccctcgtgttgctgaacttcctccgagaccattgcttgagatcttggcacgagagctgcgccgacgactgggtcttagactattcaacatcgatatgattagggagcatgggacgcgagatcggttttatgtcatagacatgaactactttcctgggtacggcaaaatgcctggatacgagcacgtgttcaccgacttcctgctgagccttgccaagaaagagtacaagagacgacaaagctatagctcgctaagctcaggcgaatggtgataagcgaggagactactcggcggggcatgtatatgtctatcatccacgatgcgtgcgtacagatgtacttgtgcatgacgagagataatgggtcgtagaagcggagggctgttgtcaggctataactaactgttgctttacatgtgctaactgttgatgcttcagaataaattttgtttgggtggatgatggctctgctgaaatcgagctacttgtagaacttatgactggaacctcgaaataaacggagaatttggattacgtaccgtactacttgc

SEQ ID NO: 22895 - DNA, 154 bp, Zea Mays
tttattttcaggttgcaaagtagacatcccctatttctatagttcatgcttcatggatatgatggtcacacttcatgatctccggtgctgagggaacagtgatagattgatatgaggtttgcaggtcagagccttgcttcctagctgtagctag

SEQ ID NO: 22896 - DNA, 1358 bp, Zea Mays
ggtaaataaacgctcctgggaaaaaaaacaaaaacacgaagaactccaccgtttcatcctctttccccaatccgttcaacgacggcttcagaaacccttcctccggcggccgccacaacgagcctcgggcaccgcaaagcaaatcctatcctatcagtcgaatcgtgcgtctcgtcgagcctcgatcctatccccgccacgccgatccctcgtcggtcgtccgaatctggtggactatctccatcgccgggcgtccatttttggccgggtgagccgggggtggggggtgggtgggtatttggtgccgtgagttgctgctcccgcccgtcgatgcttggttagcagaagagacggcggcggtaccatgttgcagtgcctggatggagtgaagcagctccttgccgtgctcctcaagtgctgccacatcgacctcaagcagcccaacggcctagatgatccggagttagcgtgagcgaggtcgaggcattgtatgaactgttcaagaagatcagcagtgctgtgattgatgatgggctgatcaacaaggaggagtttcagctggcgctgttcaagactaataagaaggaaagtttgtttgctgatcgggtatttgacttatttgatacaaaacacaatgggattcttggatttgaagaatttgctcgggcgctctcagtatttcatcccaatgctcccttggatgagaagatcgagttttcattccaactttatgacctcaagcaacaaggcttcattgaaagacaggagacttttgaggaggcagacacaaagcatgatgggaaaattgacaaagaagaatggcgcaatttagtagtgaggcatccctctttattgaagaacatgacactacaatatctcaaggacatcaccactacatttccgagctttgtcttccattctcaggtcgatgatacctgaatttctgaaaactaatgaatgtcagaaggtggactgcttgctttgctaagcaaactttcagtgcctgtttgatggttcaaaaatctcatcgtcctgaaggcatcaaatcatcgtttgttgttaataatctttttccttgttttttatttggaattcttgctggatcctgtgtgaatcctcttctattttccctctcaattgttcctttattctatttcggttttgatggccagtacttgagtcagttaatgtgtacaaagttgcgtctgatgctgcccgtcattgaattgtatggcatgtgaggaagatttaaattgtatattcaacttttgtggtcatgatagttgcacatatttttaccatcctttctaatttatatttgttatttttttcaatatagtaaagttcttgaactgaaa

SEQ ID NO: 22897 - DNA, 1788 bp, Zea Mays
gggatcagcccgtgctcagtgctgacgtcgtcactcaaatgctgtttcgtccccgtccgcccatgtccatctagaattcgatccagtccaaactacctttcccggcttggtcaatcctgtcgccttcggtccatctcacacagactccggccggcggctccactccactgccccgccgctcggtgccgtacgtcgtcgtgctccaccgcctcgatcctcggtttattgctttcctgcatagcttccttagctagctaggtctcgtttcatcagtctcgatctgctgctcgttggccgccggcggctacgagcatggaaacgtacactacggacgacgcgctgacggccatggggtttggcaagttccaggcgcttgttcttgtgtacgcagggacgggctggctggcggactccatggagctcatgctgctctccttcgtcggaccgctggttcggcagcagtggaacgtctctgcccagcacgagagcctgctctccagcgtcgtcttcactggcatgctcctgggagcctgttcctggggctatatttccgacaaatacggaaggaggaccgctctattgttctccgttactcttaccgctggagcagggttgacaagtgctctatctcctaactacatatccctgctggcacttcggtttcttgtgggtgtaggagttggtggcacgcatgtattttcgtcttggtttctggaatttgtccctaccaagaaccgtggtgcctggatgcttgtgttctctgctttctggaccatcggaaccatcttcgaggcttcgcttgcgtgggtcgtgttgtcaagactgagctggcggtggctgctggcgttcacctccctcccatgcttcgccttgctcgtgtttttcgtcgtcgcaccggagtcgccacggtacctctgcgcgcagaacagaatatccgacgcgacccttgttcttgagaggatgtccaggacgaacaaggccgctcttcctcccggagctctggcataccaccacacggaaacgcagctgggactgggagagagtacaacagacgacgcctccaaatccggttccggtggcatggctgccctgcgcaggctgttctcgcgcaaactgctgagatccacgcttctcatctggttcgtttggtttgcaaactcctttgcctattacggcctagtgttgctgacgtcgcagctgagtgacgcgaaccggaggtgcgcatcgtcgtctgctcacaaatctcaagcgcacgaaggaaacccgaatctctataaagatgtcttcataactagcttagcagagtttccggggctggttatttctgccattatcgttgattggcttggccggaaagctacaatgtggatcttgctgtttggatgctgtggcttcctcggacctctggctgttcatcagaaggagtcggtgacaaccgctcttctgttcggtgctcgcgcctgtggcatggggagctctacggtcttgtgcttatacgcaccagaggtgtacccaacatcagcgcgctccacaggtgttggcattgccaccgccatcggaaaaattggcggcatcgtttgccccctcatcgctgtcggcatgctgcggagctgccaccaaatgcaagccgtcctggtctttgagcttgtcctaggcctcgcgggagtagcctgcatcctcttccctgtggagaccaagggccgcgagatgaaatgacagacccttcacagcacccaaagcgaccactactttcagcggcgttgtctttattgcaaccaatgctcagga

SEQ ID NO: 22898 - DNA, 2651 bp, Zea Mays
cgcgcgtgagcgatgaaagctctcgcctcgcccgccgcctccttcctcccgggtatcccgagccctagccatctcgcgcgcgcgcttccccgatccgcggcggccgcgctctcgcggcccccttccgggcgctccatcgccgccgcggccgcggccgccacaggggaccactggggcgccgaccaccagcactaccacggaggacgcgcgggcgcgtcggaggccgggcctaccgcgtcggcgcgcggcgtcaagtgcgacgtggacgtggtgtcgtggcgggagcggcgggtgctcgcgtccgtgcctgtggccgccgacgtcgacacgctgtggcaggtcatcaccgactacgagcgcctcgctgacttcatccccaacctcgtccagagtgtgacgattccgtgtccgcatgaagggcggatatggctggagcagagaggcctgcagcgcgcgttgtactggcacattgaggcgcgcgtcgtgttggatctccaggaaatccctgactccgataagtgggatgggaggtcctctagtgcagttttgctgtatgaagttaatgtgataccaagatttaacttcccggctatatttcttgaaaggattataaggtcagatcttcctgtaaatcttcgtgccttggcttgtagagctgaaaagatttatctggaaaatcaaggatgtggttcaagaaaattttttgttgaggacttgaagccatcatatacttctcagcttaataacttccatagtacgacagttgagacttctaagtttaaacaagcacctcccaggtctggtgttagcagtgtgcttccttcaccttcttctgaattgattagcaaatggggtgtatatggaaacatatgcagaattgataagccttgtgtggtagatgagatccatcttcgaagatttgatggcatgaacatgagggggctcataggtgtgtttttgctagtatcactgtgaaagcaccggttcgagaggtatggaatgttctcacagcatatgagaatttgcctgaattcgtaccaaacctggctatcagtaggattgttcttcgtgataataacaaggttcggataatgcaggagggttgcaaaggcctgctttatatggtccttcacgcccgtgttgttatggatcttcgcgaaaaacatgagcaagagatcagctttgaacaagtcgagggtgatttttacacatttaaagggaaatggcgcttagaacaacttggggatcagcacaccctgttgaagtacatggttgaaactaagatgcatagggacacctttctctctgaatctatccttgaagaggtcatatatgaagatcttccatcaaacttgtgtgcaatccgtgattatattgaaaaggctggagccaagagtagcaattccacaggtcattctaatgtgcccacagatccagatccagatgttgatcatgatgaaagcaggcaatctgagcaaacgtgtgtgtcttgctcatccagtaccatgaagcagagaccaaaagtcccaggattgcaaaaggacatcgaggtcctaaaatcagagcttgataatttcattgcagagtatggtcagtatggtttcatgcctaagagaaagcatctccggtctcatggaagagtggatattgagaaggctataacaagaatgggtgggttccggaagattgccagcataatgaacctttctctttcttacaaaaatcgaaaaccaagaggctattgggataatctggagaacttgcaagaagagatcagccggttccagaaaatttgggggttggatccttcttatatgcccagtagaaaatcttttgagagggcaggtcgttatgacattgctcgggcattggaaaaatggggtggggtgcaggaggtttcacgccttctttctcttgaactaagatatcctagaagacaagcagacccggacgatgagagacagtctgaatccccgtctgggatgatgaagaagcacggagtgaaacctgatgaaggcaatgtttccccaaatgcgcagaaatggctcctgaagctgaaggacttggatgtcaattgggtggaatactaggtttagctttggaaaaagatatggtctctcatcatgaactcagctctttcctttcttcggaggtgttctggatgcattccgacaaagacgccgcagattgtgtacagaacagcgcggtgcacgggccaaccccattctgaaggcgagctaccagcaggcaacatgttttcttgccagtaatcacgactcttggctactactgcgtatctagaactgctgacaatactactcagcttcttttgcggtcaaaccgatccatggttttgacaaagtcaggccataaaatgcagaaaagggtgtcgatttcgtgcgcctgttcaaagctgttttgagtcagccacgcctttgaaaaatctgaggtgttcacaggttggtcgcctactttgttattactggtgatataagttgacctggtccttttgaaagagaaggtttacccgtctagtaatagtttcagtcggcacgtttgcattacattggtctcgatcaggaggcacagctacatactttacgtctttacctattgctgcttcaattcttcatgggatgaatgaaaccgac

SEQ ID NO: 22899 - DNA, 1636 bp, Zea Mays
cacgctagggtttcgctatccccattcccaccgcgccagtccccgaaccgacccttggatcggcgccgcgcttgctcgctccgtccatgccgagctcctgacccccatgtcacgttcattcttcccgacctgctcctcccagaaagcggaaattgaagagatgggcaaggagctggacgacctccgggccaaggtggaggcgctcaccgcccagctccgcgccaactccgacctcgccgatggtctcaagcgcgccggcgcggaccaggccgcgtggctgcgggatgcccgggcggaggcggagcggaatgcggtggaggccgcggccagctcggaggaggccgccgccaccggggatcggtgcggggtgctggagtccaggctggccaagaatgggcaggcgctgaggcacctctacgcggcgcacgaggcgctcaagggcacgctccgggagaagatcgagggcctcgagggcgacaagaggggcctcctcacggcgctcgaggacgctgaggggaggcgcgtggagcacgaggctgcccttcgtgcgtgtgacaacgagatcgcgcggcttagggggctcctgtcagagaaggactggaggggaagcgaggctgagaagagggtgttgacaccgagggaggtggtgatgagggacgacatgctggtgaagccggaggaggagaaggccaccgtcgagggtaagctcaactggaaggctgagcagttcaggcacctcgaggaggctctcaataagctccacgatggcttcagggctgtcaagaaggagtggggcttagatagatcaacttccgttgatcgaattggcactcttgaggatgatttggattccaagaccagggtcacggaggatttcccgtcgaggttggatatgtgcagccaggcgttggcccatgaggaaggctgcaggaagcgagtcgaagcagagttgtctgagttgcgcctcatgtatggctatgtggtctctgaatatgaaggggccaaatcaatgatggagtcgttgagctccaagacggatggggggattgcatatttgagaagagcactggctgagaaggttacattgctcaaggaaataggatacagtaaggcacatcttgaacaagaaaatgaggatttgcgctcaagtctcaaggagtatcaggaggcacagattggtggcacatatgctgttgtgtcattgaaaagtttatgggagaagttccgagccctggagcagacacatagaagttgcactaagaagctaagagataaggaagaagaatggagaatacagatgacaaagcttgtgaatgacttggttgaatgcatatcagatttagaatccaaagatattcttatcgggcaactgcagaatgagttacgcggtagttataggtcccttgagctacaaacagtggagagttgggaagctttgatatttcttactgttgtactaggaaaatttcatgagtcctgctcatttgttgatactgctaaactgaatatgcagcatcattgtcaagaaattgaaaaggaaattggttttgccaagagacagttagaagaacaatcttgcattattgtccagtctcaagctgaacagaaacaacaatctaaggttatagcaaaattg

SEQ ID NO: 22900 - DNA, 2021 bp, Zea Mays
gccactaccaccgaaaccaaatggctctctccctatcaaaaaaattgctagggtgccccggtccttgtctcgcggttcacagtagagcggtggcaccacgtttttcctaatcctcttcctgttctacttctacccatttgttccgtcgcttcaacggcacggaagagaatcgctacccagccaatcgaagtcttctcttgccctgctgtatctcatatcctgttgcgcgagattcttggcgattctgctactgctcaaggatccgctactctgctgttttgggagattcgccatgggcggcggggccgttaacgaccacttcccgggggccagcgacccgctgctccccacgaagcgggatggggacggggacgaggacgacgcaggtgcctccgcgttccacgagttcgacggcgcctccttcgccggcgcggtgttcaacctctccaccaccatcgtcggcgcgggcatcatggcgctaccggccaccatgaaggtgctcggtctcgtccctgggctcgtcatgatagtgctcgccgcgctcctcaccgacgcctccatcgagctgctcgtgcggttcagccgggccgcgggcgcgcgctcctacagcgcggccatggccgacgccttcggatggtggggtaggaggctgctccaggtctgcgtcgtcatcaacaacgtcggcgtcatgattgtgtacatgatcattataggcgatgtgctttctggatccacttctggtggtgagcatcactatggtgtgttagaaggatggtttggaatacactggtggaatgggcgtttatttgttctccttgtcacaaccctttgtgtgttcactccactagcatgcttgaagcgtattgattcactaagctatacatccacaatatctgttgctttggcggttgtattcgttattattactgcaggaattgctgtcatcaagttgataggtggacaaattccaatgcccaagttgtttcccactgtttctgatttggcatctgtttgggaactttttacagcagtgccggttcttgtcactgcttacgtttgccattacaatgttcacccaattcataatgagctaaaggactctacccagattaagccaatagtacacacatcattgacactatgctcgaccatctacatcacaacaagtttctttggatatctcctctttggtgaatctacactctctgatgtgctctccaactttgattcaaatcttgggatcccatacagttcagtcctcaatgatgctgtcagagtgagctatgctgttcacctgatgcttgtgttccccatgatattccatgcattgaggcttaatttggatgggctcctcttcgcctctgcaaggcctctgtcttctgacaacagaagattcggcataattacagcatcgctcctcctagtgatttttgggtctgcaatcttcattcctagtatttgggatgcctttcagtttactggggcaactgctgctgtctgtatcgcctttattttcccagctgcgatcactttaagggattcacaaggtattgccaagaagtgggacaaaattctggcgatcttcatgattgttcttgctgttgtatcaaatgtagtagcggtctacagcgatgcctacaaaatattcaacaaggaaagtgctccttctaatgcctggatcggggagtcaactgaaaatagatcttcgtggtggcttgtacgttagttggccaataaaatattcatagttcatttaggctttgtttttggtgatttgttccacgggccatggtctgctcaaatctcattgagttttgtgtgtatatctacgataggtatgaaaatttgcacaaaccgaagtgctccggtaccataaaaataattgtgtcaaatctgaaattacagagttacgatcatgatgactctttttgaaaaaaattgtatcggatgtgaagtaaccatcgatatctcttgtacgtgctctatgctttagtgcatttgttagaagattaagtgggaag

SEQ ID NO: 22901 - DNA, 1274 bp, Zea Mays
tcgatcgcaaatcgggaggagaagcacactctgagccccagcatcgcgaccccggcggccggctgcgcctgcggggcaggaatccgcggcaccgcgtgggcgcgatctggcggccgttggatgtggatggaacggacgggccaggttcaacgtgggggcgttgatgggagcgatccgaggcgaggccgtgtggaccaatcagcgcgctgcgtgggactctgctcgtcttcgtgccgtcgccactatttaagcaccgcttcgtctactccggcctactcacccagcaccgcagagctctcatcctctctctctctctctttctcgcgctcgctttgcttcctcgtcgaggtccaagttcctgcattgatggcgaccgaggtggctgagactcccgcgccgttggcggaggcggtccccgagacccccgcggaggcaccggcggcgcccgccgccgaggcgaagcctaccaaggccaagaaggcctctgcgcccaagaagcgtgccaacccgacccacccgccgtacgccgagatgatctcggaggctgtcacgtcgctcaaggagcggacggggtccagccagtacgcgatcgccaagttcgtcgaggacaagcacaaggacaagctcccgcccaacttccgcaagctcctgctcggccagctcaagaagctcgtcgccggcggcaagctcaccaaggtgaagaactcctacaagctgcccgcacgcgccccggccgccgccaagccgaagcccaagtccaagaccgctgtgaagaagcccaaggccggtgccaagaagcccaaggccgccaccaagcccaagccgaagcccaaggccaagtcccccgccaaggccgccaagacgtcagccaaggacacgcccgggaagaaagcggcgcccgccaagaagcccgccgctgcggccaagaaggcccctgccaagaaggccgccccagccaagaaggctgcgaccccgtcgcggaaggcgccggcgacgatgacgaaccagtgtgtgttattattattagaagacaacgttgtatttctgtagctgaattgttgagttgcggatatcattgtgctgctaaggttaatgtgacgataaagttaatgtcaagagttaccttccttcgcgtgtatgtactctgattattcaggctgtttttggctgggattaatctggtcttatctgaattccctatctgaaatagagaattgttcggtgtgcattttgtgaccaacctgctcatgcaaacatgttgctttcgttgtacg

SEQ ID NO: 22902 - DNA, 3681 bp, Zea Mays
gtcagctatgtcgtctcgttttccccacgtcggcggcggcgaccgccgcagggacgacgcgggtgacgccgccctcgcccgcgacatcgtcacgctccacaaggcgctctccctcgacccctccgcccgccgccgccgctccctgccgctcccatccccgtcccccgccgccaccgagcagcagcgccacaagccccggctcaagccctccttctcctcctcctcgtcgcgcaagctcctgccgcccaccgccagctcctccgcttccacttcctcgtcctcatcctcatcttcgtcttccttctggaagaagtccctgaccgccatctcgcacctgggccgccgccgcgtcgactgcgcgttcgcgctgcacgtgcactccgtcgacggcctccccgccgcgctcgatgggtccgcggtctccgtccacttccgccggatgtccgtgtccgcctccacccgccccgtcgcggccgccctcggcgccgccgcgttcgaggaggcgctcacgctgcgctccccggtctacttctcccgcggcgccaaggccgtcgtcaagtacgagccccgcgcctttgctgtctccgtcgccgcctccactctcgacctcgcgagcagcacatgggcggggaagtggcggggctgcggcgcgggtcgatggcgcggccagtgtcagtgcaagcgccgacgcctttgcccgcgcggagcagggacgtgagggttctccacgaggtgctgcccagcttgaggtctgccaggccggtgccttcttctgttgctgacggggttcctgatgcgaggaaggaggagctggcagcaccggactgcacggaagaggggtctccggaggcaaagcactgcacatcggtagaggttaaaaagggggactcggtgcatccagatggcgattggggcacggtggagttcaatgttgtggagcatggagttgaggttgcttcagatgacccgcaaaggctcaaacatgtggaaaccagcaatgcggctggccaggaggaggattcagggttcaaaattgacgaagagggatcgttcaagcctttgcaagtaagtggtgatgtcgctgaagatcagactgttggagtgaaaactgaggtggtggccgtcagtgacgttgctgttcaaagggagaacatggaagacaaacaggatggaatagtcaaagctgcttcactgcctaccgctgctcttgaagcagagggtcagtttggagcagatgccgaactggaggacctggaatgtattttgaacgagctctcagttgctgagccggaggaatttgaatcaccagttgtagaagataagcattctcggcgattgagctgcacaggggtgactgatagttacatgtctgccagtaggaagggcagatcacgcagcatggatgcttcaacagattctgttgctaatgaattcctggatatgcttggaatagagcatagcccagttgggcaaccctcagatagtgattccgagtcgccaagagaacggctttggaagcagtttgaaaaggaagccctagcatctggcaatgctattcttggcttggactttgacgatggaattgaaggacctatttgtggtaatgttgtggaggattttgatctctctgcaatgatacatgaggctgagctcgagcttcagaatggaagccaacccattgataccaaatttcgagctaagtcgctggaagacgaagaaactgaggccttaatgcgtcaatttggtctaaacgagaagtccttccaatcttctccacctgaaagtagaagtggatttggtagcccaattagcctcccacctgagcagcccctggagctaccgccattggctgaaggtttaggcccatttattcagaccaaagatggaggatttctgcgatcaatgaacccagccctgttcaaaaatgcaaagaacaactgcagcttggttatgcaggcttcttctccgattgtactgccagcggagatgggatctgggattatggatgtattgcatggtctggcatcagttggaattgagaagttatcaatgcaggcaaacaagcttatgcccttggaagatgttaatggtaaaatgatgcagcagattgcctgggaggctgctccagctctggagtctgctgaaagatatgatgcattggactatcatggcatcgatgctttggtaggagggggtggaaatgctccttctggtaagaagacaggtagatgtgctgatctttcatccttgggtggggagaatgcttcggaatatgtttcacttgaggaccttgcaccattagctatggaaaagattgaagccctgtccattgagggtttgaggatacagtctggcatgtcagaagaagatgcaccctccaatatcagtgcgaagcctattggggaattttcatctctgcaaggaaagtgtgcagagaatacctggtcccttggtttagagggaactgcaggtttgcagcttatggatgttaagcaaagcggagaagttgatggattaatgggcttgtcaatcactctagatgaatggatgaggcttgattctggggtagtggacgaagaagaacagtacagtgaccggacatcgaagatacttgctgctcaccatgcaaaatccatggggttagttgctgaaaaccggaatggagatagaaagagcaggagatctggtagatggggcttgttagggaataacttcacggtcgctctcatggttcaactgcgtgacccactacgtaactacgagccagtgggcacaccaatgttcgcgttaattcaagttgaaagggtttttgtacccccgaagcccaaaatctacagtaccgtctcagacaaaggcaacagcgagcaggatgacgaggaacccaaggccgaagaggttccagacaaggcattggtcacggaagagaaggctgaggaattagaggatcccgttccccaattcaaggttacagaagtgcatgtcgccggtttcaagagcgagcctgagaagacgaaaccatggggcaatcaaacgcagcagcagtccggctctagatggttgctcgcagctggcatgggcaagggaaacaagcatcctctgatgaaatccaaagctgtcgtgaagccaaccaaagaggcagctggccaggcaggagacaccctctggagcatctcttcacgtgttcatggagccgggaccaggtggtccgagctagcaggaaacaagagccattcacggaacccaaatatcatgcttcaaaaggacaagaggtttcggtgatggcttggtgtttcggtagttagcacggggaaggttggtctatctcgttagaagggtacttatctgcaattggacctcactgggaatgttcagcggatttgtgaaatcatgtacattgagttctcttgcctaggatcagtagttttttatacgctgcatagtttgtgttcggtgttccttccgaattctagtgagaaactggtgtccctccctcttgtcaccattattggcttagagcggcttctgcctctgaaggtgcagcactgtcttcttttgcaggctgccatagctatcatacatatcttgttatcttgctaatcattcgtccatagtttttagtgccatcttattatatatcagtttctgatctcagtgctcagagttaccttgtcactgtttttc

SEQ ID NO: 22903 - DNA, 3532 bp, Zea Mays
ccgcgttctctcccctcatctatctctttctctctcttctctcggcgctagctggttcggcttctctctcccgtcttcgcttcctccccagtccgcaccccccacagacacagagagagagagagagcgtgcgtaccaaacaaaatcccatcgcgagacaacaaaaccaggccaacggattcttttggctgcggtggcggtgctgtggctggtgccccccttgctgcatcgccggctcgccgccgacatcggctcgcgcgtaccctagccggagccggagtcgctccccgcagcccccctcgtttgtctcggccaggtgtggcgcctgaccgcgcagctcgattcgccggattcgagctcctttgcgacggggaacctgcgggcgccgcggaggggatgctcgcacgtccctgctagattcccgcggatctcgcgggcttgctggtggtgaaacgatggctaggtgagtacaagccgcgcgtgatctcctagtggttggtgcgagcggtggacggccaagatgatgccgtcgggcccgccgaacccgatggggcccggtcagccagtgagcggtgcggcagcgtcgctactacggacgagctccagcttgctcagtggcggtggccagcctgggatggctggaggtggtggtggcggcatgctttcttcacagtcgcccttctcctcgcttgtctccccgctcacacagtttggcggcaatggtcttcttggaggcgcctcgaatgtctcctccctgctgaaccggacgacgttcaggaatggtggccctatgccaggtccggggtcgatgcagggtggtgggatgcagatgagtacactccagcagagagctgggttggatggtgccagcgatttcattagcacgggagggtcagaccctctctcattcccgtcttcctcacaggttaatttggtcaatcagatgggatcagataatctgcaagtgacttcacagcagcaacagcagatggatgcagtgcaggatatgcagcagcagcagcagctaccaatgtcttacagccagcaacagttgccggcacaacactcgcagcagctccagcagccacaggctacagtgaagttggagaatggaggaagcatggttagcatcaaatcagagcagcagatgggacagcctgaacagaatggtcctgcccagatgatgcgaagtgctggttgtgtgaaacttgagccacagcagttgcaagcccagatgatgaggagtttaagttcagtcaagatggagcaacagagttcagattcatcagccttcttgcagcagcagcagcagcaacaacaacatcatttgttgcagctgacaaagcagattcgaaattgtccagaccttgtatcaatgggtggaccaaacacaactgcaaaccctcaagctgctgctgctgctgctgctcaactgaccctcttgcagcagcaacggctcctgcatatgcaacagcagcaccaacagcaacagattctaaagaacttgcctttgcaaagaaaccagttgcaacagcaacagcagcatcaacaacagcagcaacaacagcagttacttcgtcaacagagtctaaacatgagaactccaggaaagtcatctccttatgagccaggaacttgtgcaaagagattgactcattacatgtatcatcaacaaaacagaccacaagataacaacattgagtactggagaaactttgtcaatgagtattttgctccaaatgctaaaaagagatggtgtgtgtcactttatggaagcggtcgtcaaactactggagttttccctcaggatgtatggcactgtgagatttgtaatcggaaacctggccgtggttttgaaacaacggttgaggtgctaccacgactatgccaaattaaatatgccagtggtaccctggaagaacttttgtacattgacatgccacatgagtcccagaatacgtcaggccagattattttggactacacgaaagcaatccaagaaagtgtttttgagcaattgcgtgtcgtacgagagggacatctacggatagttttcaatccagaccttaagatcgcatcttgggagttctgtgctaggcgtcatgaagaacttattccacggagatctataataccacaggttagtaatcttggcgcagttgtacaaaagtatcaggctgccgcacagaactcaacgagtttgtctcctcaggacatgcagaataattgtaactcgtttgttgcatgtgcccgacaattggcgaaagcactggaggttcctttagtaaatgatttaggatacacaaaacgatatgttcgctgccttcagattgccgaggtcgtaaactgtatgaaggatttaattgatcacagcaggcagactggatctggacccattgatagcctgcataactttccgcggaggactccaggggttagcactcttcaaccgcagcagcaaactgaggagaagcaggccattccccagagttcaaaccagagtggccaaaattctgctcctatggctggtgtgcagccttctgcctctgccaatggtgacgtgacatcaaataattctctcagttgtgcaccttctacatctgcgccttcaccatcagttgttggactcctgcaaaattcaatgaattcgagacaagatcatccaatgagcggcactaatggtggcccatataatggaggcaatgtggctattccgaaggtgaactctacaagctcactgcagtcaaatccgtctacctctttcccttccccagcaccgacaacatccaataacagcatgatgcatgctcctcaaaacacaaatcagctgagctccccaactacatcatcaagcatacctcccatgcagccacttgatactcaacctcaggaggctgagccaagcgactcgcaaagctcggttcagaagatcttgcaagatctgatgtcatcctgtgttggccactcaggtaatgatacgaagacaccaaatggactaacccatggtgttaatggggttaattgcttagttggcaatgctgtcacgaataactcgggaatgggaggaatgggatttggcgccatgaatgggttcggtcatgggatgagaacggcaatgacaaacaatccgatggcaatgggtgcaaggatgggaatgaaccacagtgcacatgacctatcgcaattgggtcagttacaccagcagcagcagcagcatcaacagcagcatgacataggaaaccagctgttgggtggatttaggtcagcgagcagcttcaataacattcaatatgactggaaaccctcacaatagagcagccagaaaccatagagtttcagtgtgatgatgcatctggcttcgctggcaatgcgtgtggagcatccacatttatggtgccataacctccccttggcccaatagcatttgggcctttgcattaatgccgccatcaaagggtaccataagcgatagcaagcatcccggctggtacatatgataataaacctgcgaggcaatcatcaagatcaagag

SEQ ID NO: 22904 - DNA, 2029 bp, Zea Mays
ttgatgatgatgttgagataccaccaggagcattaacttcaacagatgcaatcaatttcttctgagcttgaggtacttggcaggcatgatcacccacgtctaactgttccatttctgaaggcagtttctgagatttccaaggcatgtagacatgaatccacttgtttgccagatgaggcacaatcattttatgagaaggtcagttctgagggtcaagaagtaaaaattatgattgagaagagaatggaatccagtgcaatatctgaaagaaagaatgttgatgctcgatcttactttatgaccttggaatactgggaagatttattttgtaagctaaatgagatgagaagatataggagaatagttgggtctcttgcgggctcttgtttatcagctgccatcccacttctctcttccaataaggaaacagcatgccttgtggcccttgacattgtggagagtgctgctatatctattgccaatgttgaggaggcttataagtgtgaatgtcaaagcaaaggagtcattgaggaggccatccagttttgttcatttgacgagcttcttgatggtacagatgccaccgaagatgttgatgaaaataggctactcccagcaatgaacaaactgtggccttacttggttatctgtctaaggaacaagatctcagtgccggttgttaggaagtgcaccgaaatgttgaggcgagcaatttgcatatctggcggcgatttttatgtacgcaggtttcataaggatggacctattgtttggaggttgctggctttatctccattccgacgtctgtcaaagatggatgaaaaagcaatcattttaccatatagggatacctcacttaactcagaggaacctatggctgagatctccagccaaaagattcagattgcagtcctggacatgatcgctgcaatatcttcgaacaagagaagtgctgttgcactagaaagcgtactaaagaaggtctgtggccttgtggtaggcattgcctacagtagtttgacaggtttgcaggaagctgctataagggcattggcaggccttgcctgcatggatgctgatcttgtctggcttctccttgcggatgtgtactactcactaaaccaaagggaatctttacttcccaaccaagatctagccctggtatcagatcttttgccccctccagtgtcttcgagagaatacctctttgtacagtatggaggtgagggtgtcaggtgtgatgtagatccctcatctgttcattatgtgttcagaaggatgcagggtgtgtgatcttgtgtgacctgaaaatcaggttcctgatactgtgtatttgtaatcttgctgagtttctttggtcatgctagcaccctatgtcacacattgaacataatatcacctgctacagagaatggtaaactttttcatacgtgttctcgcactgaaaatcatcaagcaaacatcaggactcatgatgacaatgaaggatgtgatgggtttgtatctgttagccatataaggttgcacgttaagcatgcccctgacttgccggacgagcagcaagacttcgggacctagattggctaaggcactaagaatagaatagcttatctaccgatatgtaaagtcttatttccacctttcgaattcttttcctcggtagctaagcttatttagttgcctaatggtcgatgtaatctttttattgtgtgattcattccactttcatggtatttccgctcttgttacctccctctaccgcttcttcatctacatctaacctcatgcctggcgacctctaataagtaactgttgatccggccacataattggaatgccttcgcgtgaggttgccggcctttgtgtcagtcactcaacatgctctcaacatgctgaggaaggtcgttgttgtgccgtagccgagcgacgcaacaagtggctgttcagaacacggacaaggtgatgttgaacgtgtagaaacaacggcagcgtgatgcggaacgtctgaaacaacgacagcgtgatgccg

SEQ ID NO: 22905 - DNA, 2179 bp, Zea Mays
gggctgccacaacccacaaggaggccagggaccaatcacagacagtcatcttctcccgttcacgtaacgtgcactagggtttatggtttagggcgaccgccgccgtcctacgtccagcggccaggttttcttctggccctctgcgctgactacaacccaccacctccgggttaggttttggatttggagacatggcggaagtggtggacaagctcaaggactacgatatcaagaaggagggagaagcagagatcctcctgcacaagaagaactccgtcttctttaatcccgtgcaggttcacaacagagacatgtccattgctgttttaaggacctttgttgccaagcgtaaggaagaacatgaagcgctggtggacaagaggaatacatcacataaaaaaaataaacaaagtgaaacatccagtcaaaatggagaggatgcgtcaactggccagcaagatgaaatggatgttgtttgtgaaaaggagctgaataaagctgaagatcaaattgatgatctgtcgaaagaagcaacagaaccttcttggaaagtaaccagagagcttaagccaccacttgttcttgaggctttggctgctactgggttgcggtctctccggtatgcccgtgaagttgagggcttaggaaaggtagttgctctggacaatgataaagcttctattgaagattgcaaacgaaacataaagttcaatggtgcttccgctactagtaaggtggaagcttacttggttgatgctcgaattcacatgctgacgcatccaaaagaatttgatgtgctgtacaggctgttgctgatggtggtctattgatgtgcactgccactgatttggcagttctttgtggtaccaatggagaagtttgttacgcgaagtatggttcattcccaaccaagggcaagtattgccatgaaatggctttgagaattctccttgccagtattgagagccatgctaatcggtacaagcgatatattgtgcctgttctctctgttttcatggatttttatatccgtgtttttgttcgagtattcacttctgcaagtgaaataaagaatacacctcttaaactttcttacatatatcagtgtgttggctgtgattctttccatcttcaatgtcttgcaaggactgttcagaagaagaataatggtgtgaagcatgcacctgctattggacctgttgttcctcaggagtgcagtgactgtggaaagaaatttaatgtaggtggaccaatatggtcagctcctattcatgaccaagactgggtactttctactttgacaggtgttaagtcaatgaaggatagataccctgcatatgataaaataacttcagttctaaatactatgtcagaggagttacatgacgttccattgtttttcagtctccataacatagcaggcactgttaagtgcacatctccatctttggttatgtttcggtctgcagttctaaatgcagggtatcggatctcaagcacccatgttaacccacttgggattaaatctgatgccccttgggatgttatttgggacatcatgcggtgctgggtgaagaatcatcctattaaggaacagccacgtgactcacctggcacggtgatcctttcaaaatcgccaaagctagaagcaaatttttcaagagcagttgctgccctcagcaaggctcagacaaataagattaaacgattccttccaaaccccgaacggcactggggtccgaaggtcagagcagggcggaagatcacgagcaaacatgtctctctgttgggccctgacgctatcaagggtgctgtgaacggtggtgactgccagaaagaaggaaacggtgctgagccagatagtacagcctcagaacccgaggggatcaaagacgttgaggatgagccctcaaacaaacgccaaaaaaccagcgacggcgaaccagcaagcgaaccttgatttgtttgtcaatctttcgcgtctccattgtgttgtgcctgtgcttttcttgtttgtaggtggtcgatggttatttataccacctgttggattttgaacgaacaaattgtggcaggtttttattaaacttttgttgcatgtgtgatgctcctcctagtcacagagggaaaagacctattaaagcataatatatagtatagctttctgcaatgtcgagac

SEQ ID NO: 22906 - DNA, 2188 bp, Zea Mays
gttttcgtttcagtgctgctgcctgcaagccagcaattgcttctccttcctctccctccctctctcttcccgaccgtttgcgccaccggaaggtcctggaagctggaacattgtgagatgaggagcaatagacgacgccttggaggaagaggaggaggatggggtggccagggcggtggtgtaagtgtggccgcttccttcgccgcgctgttgggctgtgtcgtggccctcgtcggcggcgccgccgggcagggcccccggcccccctccgactacaaaaccctcagcggcgccgctccacttgtggtggccaaaggtggattttcaggagtgtttccagattctagccaaggcgcctattctttcgcgatgatcaccagcgcaccggacacggccatgtggtgcgacgtccaactaacaaaggatggtgttggagtctgccttcgggatataaatatgaaaaactgcaccagtgttgatcaagcctaccccgagagaaagcggacctatgtcatcgatggtgtgcggaaaactggatggtttgtttcagacttcaccattgctgagcttcagtctgtttctctaacacaagcaatttggcctcgcactaggagattcgatggcatctatcctatcatcagtattactgactttcggtcccttgtcatgccatctcctgtttggttgaatgtacaggttgttttactaaactgaattcaaataagactgatcatggagaacccttagttatctcacataatggtgctagtggagactacccggactgtacagacttggcctaccatagtgcaattgatgatggtgcagacatcattgactgtcctattcaagtgacaaatgatggagttcttatgtgcatgagttccactaacctgcttgacactacgaatgttcagagaacaacttacaactctctggtttctgtcgttccagatattcagcctcaaccaggaatcttcacattcaacctcacttggtccgacattaacagtaatgttttaaaacctaaaatatcttctccagtgagtggttatttccttgtaaggaacccaagatacacaaatcaagggaagtttttgaagttatctgactttctagcaatcgcaatggataaagacttgtctggtgtcatgatcattattgagaatgctgcatttttagtaaattcattgggaattgacattgttgattctttaaccactgccttaagtgctgctggcttcgataatcatcctaccaaggaagttctgatcaagtcaaaagatagtgatgttcttgtcaaactgaagcagcagaaaacaaaatgcaagcttgtttacactctaccctctggcatcggggatgcttctaattcctcgttgaaagacattaagaagtttgctgaatatgtagctgtggacagcaaatctgtttttactctaagctctgacttcatcataagacagaacagtcttgtgcaagatctgcagtcagcggggctagctttgtatgcagaggtgttccagaatgagtttgtagcacaaccattggatttcttcggagatgaaactgtggaaatcaattactatattcaatcatttaatttatcaggcatcataactgatttcccgaagacagtcagaagatataaaagaaacacctgtacagttctgggaaaggatatgcccagctacatgcagcctcctcaggctggttcccttgcacagtttctacaaaccttcaaaacccagcctccatctctgccaccaatgtcgacgctgaattcttcaagcgtggaggagccacctcttcctactgttgcgttaagaagtgtatctgatggtagtgcctcgggggcgaccaagactcctggcacaccttctgatgctccaacggctacagtaaatgctggcatgctacttgtgatggttttcacagctttgctaatctgagaagccacatgagattgtatagtagacgactgaagctaatctgatctcccttggattcaggtaagctttgactagtgatctggtactaccacacacttgttttcttatttccacctttacaaatttgtcagtagaaaatgttagagtatccatttagggtttggggtttaccccgtgtaattacccgcttacccctgtgtaataggccagaccgagctaacttagtctattaatac

SEQ ID NO: 22907 - DNA, 2476 bp, Zea Mays
aaagaaacctagtctcatgataccatgaaagcaatgtaattgcacaagaaattagtagatttattaggaggcaatagacactggtacatatattggcaaggaggacccaagagagtgaccgattgggtatctcagtgcaaggaatttcttgagagaagaacatctcctgaagcaacaaaagccttagaattgatctccaatgcattgcacatatgtccacattcggacagcgtcaaggagatgaaagcagaggcattgttgatgctacgaagatatgaagaagtgattcaactatgccaagagtctgtgaatctgactgaaagaaattcagttttattcaaagacaatggagaaccaaagaattccagagtctctgaacggatgcagttttctggaaggtattggcggccctacctcatttgcaagtcttatttcctttcaggcaagcttgatgaggctcttgaattgttaaagaaacatgagcaagtcacacctgtcaaagaaagtgaagtgaacacatatgaagaaaaattctcatcattgtcagcgactataagagaactactttctcttaaggctgctggaaatgaatcatttcaagctggtagatattcagatgctgtcaaacagtattcagcagctttggcatggaatagtgaatcacgcccattttcagctgtatgtttttgcaatcgtgcagcggcttatcaagcactcggtcaagttactgatgcaatatcagattgttcacttgccatggttcttgatacaaattatccaaaggcaatttcaagacgagccaccttatacaagatgataagggattatgaccaagctgctaatgatgtaaggaagctaatctctcttcttgaaaagaaagtcaatgtgtctggagtatcaccaaaagcttttaacaagcacaatgatctcaagcaagcacatgtgaggctttcatccatagaggatgaagcaaaaaatgacacccccctgaatttgtatttaatcttgggagtggagccatcctgctcttcagaagatattaagaaggcataccggaaagcagcattgagacatcacccagacaaggctactcaattattaataaggaacgagaacgcagaagatggattttggagggatgttgtcaaggaagtctatgcagacgctgatcatctgttcaaaacaattggggaggcatataatgttctttctgacccggccaagcgtgaagagtacaactttgaagaggatctaagaaatgccaggaggagagtatctagttctaggagcatgcataggtcacctgaacagaactacagcaacagaggctttaatccacgccagcggcagtcaagcagagcatcacgttcacgttggtacagcaattcagacgattactggtaaagaagccattacatatggagtgggcatgtggtgcgaagcaacttttgcatgtgtggagcaaaaggcctccttgcaccaagatggcacctgcctttctggggttttttaggtgccggtgctgacgcaccagccttcgcagtctcagctttcgtgtctgtttgctgtgtttcttttccagagggtcagccttcgcagtctcagctttcgtgtctgtttgctgtgtttcttttccagagggtgaaaatattaggattgatcaactggggatctgggatgattggttgacacttgattagcacagaaaatacgtgggattaggaagtggtacatcaaattatcttttgttggcctggtgatttctgaacactgactgcttgggagtggctggcatgatggtatccactcttgaggagttgaacactgagaacaacttcgaaggttaggagcaaggataaagatgttggttcctcgaatatctgcaggcactcttttgctggatgcatggctactgtttagcacgggcagtttgcagcagatcaactggaaggagacatgctcagatgctcctgtttggcgcgtgcagttctgttctgttgcttctgtttaatccaaacgacgtagcgctggaaacagagtggctacatattacaactggctaactgctcaatgtcggaactcggaatcacgattttttatttattcattgttattagaggttttagctagcccaatgttgagagtattttattcagatcaaggttccttcgaagaaaaaagaggctcgggttacggtgacattggccaattgcaggttctgtcatgttgcttatgatgaaatatttggaacgacttaaacccttggactgctgcatatgtttttttttgcgtgaacgtttcgttgataaacgggatatatacacatattcgaaggccttaaggcacaaagaaaaggagactaattaagggtgtgtttggttggagagtcaactaaaatgagcgaaatgagcggctgtattacagtttttgagaatgaatctattctattttatgtttggcaaacagaatttagccg

SEQ ID NO: 22908 - DNA, 4022 bp, Zea Mays
ctgtgtactcacggttgtttgattggcttgtgaataaaatcaacaactctattggccaagaccccaactcgaaatgcttaattggagtgctggatatatatgggtttgaaagcttcaagacaaacagttttgagcagttttgtatcaacctgacaaacgaaaagctccagcaacacttcaatcagcatgtgtttaagatggaacaagaagagtacaccaaagaagaaattaattggagttacattgagttcattgataaccaggatgttcttgatctcattgagaagaaacctggtggaattattgcccttctggatgaagcttgtatgttgccgagatcgacacatgaaacatttgctcagaaattgtatcaaacttacaaaaatcacaagcgctttgctaagccaaaattatctcggtcagacttcaccatatgccattacgctggagatgtcacctatcaaacggaattatttctggacaagaacaaagattatgttgttgctgagcatcaggctttgttgagtgcttcaaaatgtgcatttgtttcaggccttttcccttttctatctgaggattcctcaaaatcttcaaagttttcatccattggttctaggttcaagcaacaattgcaatctctgttggaaactctgagtgcaactgagccacactacatccgctgtgtaaaacccaataatttgttgaagcctgcaatttttgagaaccagaacgttcttcagcaactcagatgtggaggagttatggaggcgattaggatcagttgtgctggatatccgaccagaagaacattctatgaatttatagaccgttttggtattcttgcgcctgatgttttgagtggaagttctgatgaggtcagtgctgtaaggaggttgttggacaagatagatcttcaaggttaccagattggcaagacaaaagtattccttcgtgctggtcagatggctgaacttgatgctcgtagaaatgaagtgctagggcgttcagctagcatgattcagaggaaagtgcgttcattcttggcacagaagaatttcattgcattgcgaagatcagctttacaaatccagacagtttgtcgcggtgaacttgcaagaagagtttatcacaacctccagagagaagctgcttcactcaagatccagactttgtaccgtatgtatactgccagaaaagcgtacaacgaactttctgcttcagcagttaccattcaatcaggattgcgcggcatgtgcgcgcgtaaagagctccacttcagaagacaaacaagagctgcaatcatcatccagagtcgctgccgtcaattcttggcgagattgcattattcaagaacaaagaaagctgcaattactacacagtgtgcgtggagagggaaggctgctagaaaggagctccgcaagctcaaaatggctgcccgggaaactggtgcattgcaagctgccaaaaataaacttgagaaacaagttgaggagctcacgtggcggctacagttggagaagcgcatgcgagctgatctcgaggaaactaaatcacaagaaaatgcaaagttgcaagctgcattgcaggaggtgcaacaacagtacaaagaaacaaaagaaatactagtacaggagagggaagcagccaaaaaggctgcagagatagctccagttattaaagaggtccctgttatagatacagagctaatgaataagcttagagatgaaaatgacaaactgaagactatggtcagttcgcttgaaaagaagatcgatgatactgaaaagaaatatcaagaaacaagcaaaatcagtgaggataggctcaaacaggcaatggatgctgagactaaaatcgttgacttgaacatggcaatgctaaggcttcaagagaaaatatccaccatggaatctgaggagaaagtgcaaagacaagcgcttctaagcacgccagtcaagagcatgtctgaacatttgtcaattccaattgctccaaaggcacatcatttggagaacggctttcatgaggttgaaggacttaaggaaccccaaagtgcacctcctgctattaaggaatatgggaacggtgatcctaagatgaaaaaatctattgttgacagacaacttgaaaacgtggatgcactcattgagtgtgtagggacaaaccttggatactgtgcagggaagccagttgctgctattaccatatacaaatgtcttcttcattggaaatcattcgaggcagataagactagtgtttttgaccgtctcattcagttaataggatctgctatcgaggtaatctggcactggagattttagtcatgacactgaaacttgaaagtaccaaaattgaccattaagaaaataaacaagccatccttttgccctttccgcctttgttgatgaagataagatttactctccgcatggaacaatgcagatgtgtgaaaaatgggcatattataatgtagagatatttttttcccacaccggtaaaaaactaattttcgttacggtagtaacgaatttacagagttcaaaacataacattcagaccaaatgaagcaaagctgatcaccctgatactgaacacccagggaacagtcatcaggggataaattatactgtagatatttaaatcacctatattgtttctccaacctaacacattcatgttactgaagagataagccatgacacgcttaaactgttgaacgaggatgacaatgacaaccttgcttactggctctccaatacatctagcttattgttcctactgcagagaagtctcaaggctgctggtgctcctggtagcgtttcacgaaagaaacctcctcaaccaacatcattatttggaagaatggcccaaggcttgcgttctgcatcttttgccaacatgcatgttgaagcgacagatgttgtgcgccaagttgaggccaaatatcctgccttgcttttcaagcagcagctaactgcttatgtggagaagatatatggaatcgtccgagacaatattaaaaaggaattatcatctttgatttcgctatgtatccaggctccaagaacaatgaaagctagcatgctgcgagtttctggacgattatccagtcaatctcagagtcagagcaaccactggcagaaaatcattgagagcttggataagctcttgaagatactgcaagataaccatgtgcctccggttttagctcagaaaatatttacccagatattttcatacattaatgtccagctattcaacagtctattgcttcgtcgtgagtgttgctccttcagcaacggagagtatgttaaggctggtctagctgagttggagctgtggtgtgcaaaggcaacaactgagtatgcagcatcttcatgggatgagctcaagcatatcaggcaggctgttggatttttggttatattccagaagttcagaatatcttatgatgagatagtcaatgacctatgtccgatcttgagtgttcaacaactgtacagaatatgtacacaatactgggatgacaagtataatacccaaagtgtttcatcagacgttcttagtaacatgcgggtgctaatgacagaggattctaacagtgatgaaagcggttcgttcttgttagatgataattcgagcatcccgttctccgtggatgatatcttgtcagatcatttattgatttgttgtatattttttggatcctttctaccacatgtgcctttttttagttatcttatccttttgagctagcttttgtaaaaattcatataggtatttgttagggttgggatgggattccgcccttacagttagaaaaggccttatcttttaaagcggggcaaatgattctttgtagggcaacatgaaatcaatctttttacccaagggtgtggtgagaaggggtagatgcaatgtttgtagcctcccagttatagattgtgtaaattatatactgtaaatcaacagtgcaatggaaaagaaaggaaagctatatagcaagtgcagttatgttgtca

SEQ ID NO: 22909 - DNA, 946 bp, Zea Mays
ggaattcttccaaagcagtggtccagtagaagggtgcaagctcatcagaaaagaaaaggtggatctttctttattttaattaaaaaatgtctatagatagcttgtaaccgataaatccataccccacctgtccctagcacctactcgcccactcacctgtaaaattgtggctgccttttcagattgctctttgcatctgatttttggctttgctttccccgtatgtctcaagtctagttaccatttatggctttcgcacctgtaaacatttatggttgcttttgttgattcatactagcatctatgctaatttttaatgcacgaccttaatgctacttttaggtgtatttatgatcaatcaccatgtattttacgctcttcggttctttatgtcaaaaaatgggtttttacgctgatttatatgtgtgcctatgctgcaacacatacaattctaactaaatatgcataaagcagcgcgccagcacctcatattttattctcattgtttctacttcgttaattcattgacccatgtctctgtcttagtatattctggagacagatccccacgtctagagttacaagaagaccaagcttggctgtggctgctgctgtgttgcctcctcttgttggaccgaagagagggaggggagaagcagctggcgtgcagacttctactcaggtggtcttttattctctatggggattctaggatacatcttctccagaagcaccataagtcttgtcttgggcattacaccagggctagccactctgctacttggcactctcagtctgaagttctggaggagcggcagatccatcttcctgcttatcttggctcagaggtgatgctgatgtgcaagcatcttcaccttgagttctgccttgccagaatgaatcaagtttattttcccatcctgctccatttgaggtagcccaatcg

SEQ ID NO: 22910 - DNA, 4076 bp, Zea Mays
ggagactccaaattaagcaaagtgaaactgtcttacgttttttactgaacggagtagattactgatggggatgggcaagatggctggagcccactaatgtctatcgttggtgatattcaatcattgctcttgacaatcatgtgtgctgctgtcaagataatactatcgagaaaactctcatgctctggaacctcctatcaggttgaccacttggaatgttcctgtctcatagatgcagccattgcattttgcaagctccagcaccttgatcctacaatatccatcaaaactcaggttgacttaattgttgcagtccatgatttgcttgctgagtatgggctctgttgtgctggaagagatggtgaaggggaggaagggatgttcctaaagttcgcaatcaaacatctcatggctctagatgtgaaactaaaatctcaactcaattcaaatgggatggaagaagatgcagttccaaaagacgtcagagcagaagacagtgtggccgatgaaccatcggttagtgacaataagcagaactccgatgatgaggaagaatcggagttagatgagattcagtcatgtcttgatagtgccttggaccaggcttttttctgcctgtatggtttgaagatcaacccagattcttgcagtgaagatgatctcgctgtacataaaaatacaagccgcggtgattatcaaaccaaagaacagtgtgctgatgtgtttcaatatgtcctgccatatgcaaaagctctatctaaaactggcttggttaaattacggagagtgctgcgggctatacgtaaacactttccgcagccaccttatgacttatttgttaacaaccctattgataatttcttggatggacctgactcatgtgaaaaaatactctctgaaatttgtgaaagcaatgaatctagggaagctatcctgaatgtattgttcccaggtgaaagaggctatgaagcattcaaaaaactctccactgccagctctgagccttattcagatgtttatgagaacttatattatttcatagctcaagccgaagatattagtgccaccgacaagcatacaggttttgttttgaaaaaggaaggagaagaattcgttgaacagagtgccaatattttcaagtatgatttgttgtacaatccattgcggtttgaaagctggcagaagctttccaatctttatgatgaggtggaagttgatctgttgctcaatgatggtagtaaacatataagcatcttggattggcgaacaaacacggatttaatcagaagggttgagatgggccgtcgacatagtcgacgctgcctattgatgagttcactactggccaaaactgcccctgagcagagcgaggcacatgaactgttggctcttgtgtactacgatagccttcaaaatgtggtgcctttttatgatcaaagagctactttgccagtgaaggattcatcatgggagacattttgtaaaaattctatgaagcactttgagaaggcttttgaaatcaaggagcagtggcttcatgcgttttaccttgggaaactgtgtgagaaactggggcattctttttctaaggcattatcatactacaacaaagccatgatgctgaatccaactgcagtcgaccctgtttacaggattcatgcatcacgcttgaagttactttacactcaaggcaaacagaatcttgaagctatacaggttgttgctgactacacatataaccagtcaacaaaagaaaatgtcttgagcatgctggggtcaatgactaaggttttgcagtcatcttctgataaaacatctttagacactaaagaggaaaataagttttttgagtccgatatactggataaagtgtggcacatcctttatgatgattgtctgtatgctcttggtacttgtgtggaaggggaactcaagcatttccacaaggcgagatacaagcttgcgcaaggatattatagaagaggtgaagcaggggacctggaacgggctaaggaagagctctcgttctgtttcaaatcttctcggtcttcctttacagtaaacatgtgggagattgatggcactgttagaaaaggaaggaggaaaaatccaaatgtgggtggatccagaaagaatctggaggtcagtttgtcagaaagttcacggaaattcattacgtgcattagaaaatatatgatactctatttaaacctgctggagaagaacacggacctgtggactcttgagaaggcttatacttatctgcgaacagataagaggtttgcattgtgtttaggtgatattgttcctgttggtcttgggaagtatattctagttctaacggcagcaattcataatcctgagattcgtcgagcttctggtgatgcttctgttgagcaattacttgagaaaatgttcactgtattcatggatcatgcgaacatgtgggctgatataagcaatataccagaggtgaacagtccagaattatcagaaagcaatctttacagctatatccaccagtacatccatttgctcgagagtgatgtacgactagatgttctagaaggactaaacgagaagataagaaagcgtttcaagacaccgaagttatcaaatagtaacttcgctaagatatgcaagcatgcttctctggcatggtgccggtgtattctcatcaaactggcctcaatcactccactgcctgaatccgcagatgcaaccaatcagcctgcaccattatccaatgggcttctactctatgttgacttgcaacctgatgagcttcttatctcatcccctgatgggcctgctcaattcaaagggcttgacatgaactggtttgagacacttaacagaattaaaaacatcccggtcaagcaaacatccgaagataacttggagactgctgttacgttaatgaagagcacttataacttttatcgggagagcccttgtggaacatttccttcaggtatcaatctctacacggttacaccatcacaagctcctattgaagggctaccgccaaccgctgctgtagttgagacgctcgacttaagtattccaagaaaactccttctgtgggtatacactctggttcatggtcgttactcaaatatatcctccgttgtaaagtattgcgacgagatgaagttaagaagtaaaagaggaaccccagctgcgtctgcttcgtcacaagttgtgcagccagtgtcgcatagtaccgtttcttcccaagttgtatctaaagaaaagagctcccaagttgaacccgctgaagcagcacaaaatccttctgatctagctgccacttgcgttcctgcataccaagaagttggtggtgctagtgcctcgcaaagtgccattgaggcccagaaagctactgctgcggcatctcagctcactcgcagtggttcatcaagggcaatggaaaatgcacaggacggcggggagaggaagtaacgagatagagttcgattttttttatcctctatgctacatcgtatggatgcatatgatcctgcctgacgattctcaggtctcagctctccgtggctccgtgtgcaaatctctgccacgggcgtgttttaacgcctgattggatggttgcccgctggcgcgcccggccagcctcgtacggccacttcggacgcatctgcatcttcggaggtacccgcagatgtagatgaatggccgtaaaatggtttggtctgcgtctctttacatataaccaaataaaaactcagataaagttaactcatgtggtggtctatgttgagatgatgcgggtaaccaatcgaacggttaacaaattcaggtcgtatgtatatcctggtttacagttagtgtttcctaagtgcatttgtagattatagagctgtcaagattgaacgatacatctgtaaggtgttacaaatgctaaatgctaatcctgattttgtggctgatgctaaaaacctgtggactcttaattaccacagactgaactttccctcattttggcccaacaaatacaatagcagaggaagagtttcagttggatttggtggaacggtaggagcgtaaaatatcac

SEQ ID NO: 22911 - DNA, 3136 bp, Zea Mays
aaaacatcactgtgcatgaatgggatgaggactctccatcaaagcagccccttaccccagaaacttctttgcctgtgactgttgaatgtactggaaatgttaatgtgtcaaagttcagtgatgtttcaactgaggacaatgctaaaactgcggatgcaactgaggacaatgctaaaactgcgcatgcaactgaggacggtgggagcacattccaactgatacaaggttatggctccgatgacagtgcaaatgaggctgatgctggtcctggcagtgctaatacccttgtgacattgcctgaagataacctgcatggtcatttaagtgatagtaatactgagtttgattatcagaaacatgttaatgcaaaaggaaatgtgaatacccctcatggcactgagcaaaatggtaaggctgaaaattatcatctcaaggttgagagcaacccagtgaagcatggcacagatgtacttgggcatctggccaaagaagatacaagtggcagtgaaattgagggaggtcaaagtagtaaaaggcatgggaggatacaaaagaaacgaacccggagcatctcacctcagggtagaagtggtagtccagtgggggcaaacaagagcagtccatcccaaagttcttcacctggaaagcagagcaggccaccatttgctaagcgtctccattctgctgatgatggtaatgattcagaaggtagagttgttcagcaagagggcctgtcattgacatcaaaattggatagttcttctaatgatttaattggtaaagtgggagatgctgctgcggttggtgttgcccttgggcagcattgtcacagtgacaatttaatttctgagcattcacaactaatggctgctggtgctactcataagatgcaaatgccatgccccccatctgagtctctatcagacttaaatgtgtcttcatcagcaggtggcccaattcttacgaaccaacctgctgcaggtgtcccatatgtgtctgtagaaactaccaagagctccatgacatctaaacatctccagtctcatcctcagagtttgagtcctcctgaacacatgccatcctcaaatatgattcagctaccaggacagccatcatttgcaacatcagaattccctcaaatgcagttccaccataaagttgttgcaccagcaaatgaattcttgcagaaccagatgagaagctaccctccacaagatgtgtctcatcctagaccattcgatttccatcatcatactctcccaccagcagttccttctaaccagcagccttctaccattcctgttgagaatgctccagtacctcatcataacagatggccagagtattctggtggtgttggtctatcctattcatctcatcggcctccatatggtcagcatcaacctcctgggaatcttgattcaggaagtaacttggtttatccctctttccagagatatccatcaaatctaccagtcagtaacaatattggtcccttatctgatgccgatttgactaaatcgtctatcaaaccccactacaatccatttgcatctacctttgataaaacagatccaagtctagatattgggcctcctgtaagccctaatgcagttggttctgtttccacaacagcagaacacatgaatacactgtctccttttggtcgatccagagcacatgcccatggaaattctgcagaacctgtgcccaatagacaaaagttactccatcaggagtttgcttctggtgctccgtatgatccattagttgacagtattgaaccatcaagcagttcaatcaacaaggtagatcttcgtaaagagaagaactggagtgctgctgataggcgtgatgcatcgaaatttatgaacctagaagtggacagtgaaaatatgcatggactgggggttgttgctgagtcagaagttgagggacttggagaggtggcagcagatactgagacaggtgtggtggagaatgcaagtcctgagttcttgggtggtaaagattggaactcagatatccctgttgattttgacaatgaccaaacattggacaaaaataagaagggtaaagattccagatcaatgaagctttttaagagtgctattgcagattttgttaaggaagttcttaaaccatcatggaggcagggtaacatgagcaaagaggctttcaaaactattgtcaggaaaacagttgataaggtttccggttcagttcctagcagtcatattccaaaaacacctgccaagattaaacattatgtacaatcctcccaaaggaaggtgaccaaattagtaatggggtatgtcgacaagtatgtgaagccatagagtaatgtggcattgtgctgaatcagaactgtcatggttccagagtctgtgctgcattctactaaatgaggctgcaaatttggtaatctttctgatgaaacggttgttccacagtaaggtagtttgctctagttctgcaggaaatgctgtattttattggagtgacatgtctagatgtgcttccagtattgataatttgctgcctgatttcttgtaccctgtaagggtgcgatatttgtgcgaacatgctgctgaaagaactttgtttcttaatggtgattatgcatactgagagctgtaaggcttactgctgaatgaactttgtttctgaatggtgaatatgcatactgagagctaataatatcctgctctgctatcgttgaacgttgcctatgctaggagcttgtcgaaagctagtagacgcaacaagaaaaaggacagtattaccatcaaattgcctatggagtaatgaagactaccatcctttcgacgctggggcttagtatagacacttgtatccctgaaagaatatgttgtgccccagctcaaatttactagtatggtttcgaatctagtagtcagtatggtgtttttcagtagtttagccgttatatttagagtctgattccacaaattgacatagattttagcaaaactcacaaagtgcacgtacattgctgtcgtttctatttatgcttaagtatagaatataaaacataaagacatgtgtgttatgttggctaggtgagtgaatttgagtttggagctaagaactatggttctaatttctatttgcg

SEQ ID NO: 22912 - DNA, 1540 bp, Zea Mays
atggagggcggtaacatactgttcaagggtgaacactttcccccgggtgaacgattccctacctgggacgggatttctactcgttggcttctgtacacggaacaagcaccttctgcatggctgaattttgcattgtgtggcttggtggggatcgtcacagcatatgcttttgtttggatttcgaagtattacacggattataaacacgagccagtccggcttttagctctttcgagttccacaggacatggaactaatattattgctggaacctctggcttggtggacgagtctggcaacccaactggtggtctttttgggacagctgtagcaacaatggggatgcttagcactgcagggtatgttctcaccatggacatgtttggtcctatagctgacaacgctggtggtattgttgagatgagccagcagcctgaaagtgtgagggaaatcacagatgttctagatgctgtgggcaacacaactaaagctactacgaaaggatttgccatagggtcagcagctctggcttccttcctcctgtttagtgcatatatggatgaagtagcttcttttgctcaattgccattcaaggaggttgatatagcagtcccagagatttttgttggtggtttattaggctcgatgcttatattcctgttcagtgcatgggcttgctcagcagttggcaaaactgcacaggaagttgttaaagaggtcaggagacaatttattgagaggcctggtatcatggactacaaagagaagccggattatggacgctgtgttgcaattgtggcatctgcatccttgagagaaatgataaagcctggagctctagcaattatatcacccatggccgttggcgttgtcttccggattttgggccactacactggtcagcctcttcttggagctaaagttgtagcctccatgctgatgtttgcgacggtcgctgggattctcatggcactcttcttgaacactgctggcggcgcctgggataatgcaaagaagtacattgagactggcgctcttggtggcaagggcagcgagtcccacaaggctgcggttactggcgacacggttggagacccattcaaagacactgctggaccgtcgctgcatgttcttatcaagatgctcgccacaatcacgctggtcatggctccgatattcttgtgattaaccaaccactcatcaagcttgctattaaccctgcggagatgtacctatgcgaccaggtagatgaggtgtgtgtgtgtgtgtgttacctgcatgtgatgatgtaacggtccaatcggtttgtgtcacgacatgctgtacccagagaaagaagcggcgatctatacccatgtctcacggtagatattatactgatgatgcaaatgccgtgttttgttactgaattagtggcctgaaagttgcgcttgttgattgatgaaacattatggtagcgtacttgtatgctgcatcccacaatggattttatgatgtggaccccgaatgttttgcttatacaatgtttgctatgcataca

SEQ ID NO: 22913 - DNA, 1171 bp, Zea Mays
acgagaaggccacgtcagatatcctcagcttcgaatcgcccctcgcgttacgtgtccgcgagcagatccagcacctcatacgctcttctccctcccccttcttgaccacgttcctccactcccccccatagctctgggatctggccatggctccctctcctggtgtcgtgtcacccaggaggcggcgctcgatgacttcgtcgacgatggcgttgacgacctggtggtctcgctctaccagatggacctcgatctcacgctcttcctcctccgctcctaactcctcccggagaagatcaagaagtacacgatgcatatctctagggccacggccgaggcgactggtgaagttgcggcaatctgatgcgggaggtggccgacctcatccttagcttccctgacgagacgcccgtcgtcgtcctctctgccatggggaagaccaccaataacctcctcctggccggagagaatgcggtgagctgcggtgcccccaaggcgtccgaaatccctaagctcgctgtcatcaaggacctgcatcttaggacggttgatgagcttggtttagataagtcgattgtttcagagaaatttttgaagtacttctggtggtgctggaacaagttgaaggagaagactgatgatgatattcccatgccagcctatttcaggttcctcgcgctgctcgcattcaagatattttctgctgagcaggtagatgttgctgttctcgaggttggcctaggagggaagtttgatgcaactaatgtggttaaagcacctgtagtttgtggcatatcttcccttggatatgatcatatggaaattcttggtgaccaaatcctgttcttggtgataaacttggtgtcgataaacgggttaattctgttggcaaaattaggatgacacaggtgacatgaagatgccaagtcggtgcatccatactaattgcgactttggtctgtttggacctctggtaaacgacgtagtaggtttggagacctggaactacaaatcaatagtattgggacttaagtgacaacctgaacaagtttaggaacaacttgctagaaaatttttatgctttctaccaatcttacaacgataatttgaaagttgatatttatggtacttatttggtccaggaactagattttttgtacattctttcgga

SEQ ID NO: 22914 - DNA, 905 bp, Zea Mays
agcgtaccgaactacctatcctatcccctcgcgtcgcatctttcctctcgtaacgcgtatcagtgccaaccaggcagccatcgccgcggccctcgtgcctctgcatcgcggcgcgccttggtgctccatccacgtaatccctgaggtgcggcacaggcgtggaggtatctcggcagtcggcagggcggctggagttcggtcccagaagagatggcggggggccctgatgtcgcgggcttgatcgaggatgatgcggtctccgtcatcacggagggcttagtggtgtgtgacatatgtggcagtggtagtgcccctcatcttattgcaaactgcgctcggtgcaatgcgcgtgagcacggatgccaacgcaacgccaacagggcacccagatcctaaccaagcctgcaggttctggagatggtgttgggcgccaaattcccttgaggaaggtagcagctagtgtcgtgtgagaaatgttggcttgtttttgtggttgtgtgtattggcaatcgctggagcctggagctgtgtgtattggcatcgctggagcaaaatgtccatgtggcttggcactgatgctggctggcctcagaacatacgtcggatattctttcaccgcgagtgagcaattgaaattgggcaggtaataccatgttgtgggcgtaaatgcgatggacactgtcagtttcgtgggttttcttttcttctttttcgggccaagagtttcgtggattctcagcctcggttgcatgcgcaagatcttgagtgcagcatagaacacgcttgttcttaccagtacgtgtgcaagaaaaatggatctcggtatatttaattaatatattttcttgtttgatggtgaacataattatttgaactaatatatttactagtgtttatgtttatag

SEQ ID NO: 22915 - DNA, 2404 bp, Zea Mays
gtctatccgcgtcagtttcgactttcgattcccctcgccctcgccgacggccagacgccgaacgtctcgccctctcccgacgctccccgcctcccccttgatccgccgagcgcggcggccgccgccgccgccgaacccgatctccccccctcccgcgtgacaggcacggcctcccctcggttggaagggtttgctgtatcatgcattttttgtggataatcttcattttctcttgagtcaccgattcttttgttgtcttcaaaatgtcgggcttgctgaactcaaaccttaatagttcggcatcaaatctttcagactcagctggaaggccatttacagcatccttttcgggtcaatctggatcaattccaggttttcatcattctggcttgcataacactcatggaagttacaatcttccgagtatgcctggatcacttgcacaaaggaatgctgccatgagtggccttccgtcctctggggttcaacaacctggaggtagcattcctgggagattcccttcaaacaaccttccagttggcatgcctcagattcctcatgcacattcaggtgtcagtggtagagggatgaattttggcgcaggtccggcatttagtagcagcatgaatattggtggtaacatccaaggcttatcctcgggcttgggctccggtggtaatcgcaattctgttcatgggatgccagtatcttcatctataggaaactcgggtcaacggataagttctgtaggaaatatggtaagtgcaagcaatattggaagaaatataggcactggtggtttgtccgtgccaagtattgcatcacgaatcaatttgaatggtagtggtgggagtggtagtctgaatgtgcaaggatccagtcgaatgatgaatggattgcttcatcaacaaggatgaaacagagcacctcttagggaaggaggatgagatcagacatatatggtgagagtattttggcaaattgttcaacggggagaatggggatacaatctttcacttagacgactcttttgatgacaccaatatacacttagtgcgtaggacccaagaatttgaggttagaggcattgaaaaggatgaaagggagtaaggcgaggggccctgatggtttcttaattgagacatggagacacctcaaggacacatttatagtagggctaaccaagttattcaaccatatctgccgattaaacaagatgactaacgaatggagaagtatattggtatcgatctacgaaagtaagggagatattcaaagttgtactaattattggagaaattatttgattagccatactatgaagctatgggggagagttaccgaacattgtctgaaaggaatgatgaggatatctatgaaccaatttggtttcatgcccgaaaggtcaaccatgaaaaccattttcttaataagacaagtgatagggcattatagggagcagaaggacatgcacatgtttttcattgacttggaggatgcttacaacagaatactatggaaataatggaatattatttggtgggctttagagaaatataaaattccaatgaagtatgtttgactcattaaggacatgtacaacaatgttgtgactagtgttcaaacaagtgatggagacatagatgacttttcgattagaataagattacatcaagtatcagttttgacttttgagcccttacttttttccttagtgatggataatgtcacaagggacatacaagggggtatcacttcgtgtatgttttttgcggatgatgtagtgctagttgatgaaagttgggtaggagtaaatatgaaactacaaaactagagttgtggtgggagactctagagtcaaaggttttcgactcggtagaactgaaactgaatatacaagatgtgacttcaacgttactactcacgaggaaggatatgttagtttggaagatcaagtagtgccaaggatggatacctttcagtatttaggatcaatgctatagaaagatatggatatttatgatattagacgtagaatcaaagcagggtggatgaagtggtatcaaatggcgttctatatgactagaggccaagtgggtaccacagaagctaaaaagacaagttttataggacaatgattagacctgctatgctgtatgatacggaatatcggtctacaaaaagatgacatattcaatagagaagttttgttgaaatgcttatgttgtgttggatctatggccatacaagaagggatcaagtccaaaacgatgctatacatggtaggctagaggttgcaccaattgaatttttttttgtccaacatcgattgagatggtttgaacatgcccaatggagacctccaagaggcaccattgtgtagttgaaatttaagacatgatag

SEQ ID NO: 22916 - DNA, 4286 bp, Zea Mays
ctcgtcatcggcaggacatccacaccaacccgtgctcaaggaaaaaaaaccggggcggcgaaaaccctcgaaccctaatccttacgcccctcatggcggacgctgatgcggcgctgccaacgccgcctccggaggtagtagcccccgaggagcatcccgtgggcgccgaatccaccgtcgccgcgccggccgaagtcgataacaagcggaagctagaggaggtcagcgccgacgcggaggtgaaaggcaccagcgaggacgccaagcgcccgcgcgtggacggcgagcccgacgccgcaacaggggttgagcagcaaatcgatgggtcctccgtgaatgcggatcccgcagctccggaggataaggctgctcttaacgttggcgcagcaatggatggtgataatgacacgcctgctcccgctcccgctccagactcgcaggcggtttctgacgagaagccgcttgaagcagcagctgaagctccacagcaggaaggtgatgcagcaactgctgtacaggagatttctcgtaagatcgaagtgcccaacagcaaggttggtgtcgttattggaaaagctggtgagacaatcaggaacttgcaaatcagctcgggtgcaaagatccaaatcaccaaggacatcgaagcggactcaaatgccctgactcggccggttgaactagttggaacacctggcagcgttgataaagctgagcagcttattaagagtgtcatagctgaggctgaggctggtggttcccctgccttaatagctagaggatttggaagtggacagcctggatcagagcaatttgagatgacagttcctgataacaaggtcggtctcattatcggaaaaggtggtgagacaattaaaggcatgcagaccaaatctggtgctcgtattcagttaataccccaacatcctccagagggtgttacattgactgaaagaattgtacgtgttactgggaataagaagcagattgaagctgcaaaggatttgatcaagcaagctatgaatcaggtgatgtgatcttcctttgtgattttttggtagtcgatttgtgtttcaattgttaagtcatggtagatgctggtatgatactatatgcttttaattgttcatgctttatgtgattttactctgatggttgctgatgatgtcatcacatttcatgattcattgttcatgatatggttacttttgtgatcgtagataccgaattcaatgttgtcttcatggtattttttgaccaaggcaaattcaacctatcgagaacattgccttattacaatgctatgatggaccaattgattttttagctttgggtttcataatatgcctgtttttatcattgcatacattttgtacaattttcctgatcaagccaaacttgagaatccatgataagctttgtagcttgcatatatttgggttccataatatgcctgttttatcattgcacgcaattcatagtttcatactgtctttctgttcaaactaagcttgagaattccctgatgagctttgtagcttatataggtgtcccaagtgtactgatatttttgttatgaacaaaacatgatttgattttgtacttcattcatactgtgaatatattactatttctcttgtatcggacccttgaattttaagtgttgttttaaactaatcaatcttctctacacttggccttgtatgaagtatccatgatatatagcagagcctaattgggctggaaggtaagtttcttttaatgtttgagttctcatctttagatgaaagacaaatgggacaccgttgcgttttcaagattataaggatgtaaaacttttaaatccgatttactagctcaatgaatatttcactttctttcccttgtcaaaatctcttatcctgggtgttaagcactgcgaactttggcttattttgccttcttgtttttactggatcatacacgcttccattttgtacctgttcgttggagcatagttcttgatttatgcattaatgacatatgatatatgaattatggaagagtaaaaaatgagtgcatgatcatacgattcagaaatgaacttttgagctgtaatacatagcatatgatttgtctggaaatctgggtactgattgaattcttgatcccattagcttgactattcttcgtaggatatacactatgagtaggacttctcatcttcatctatcagccttaacagtaaacatgggcatgctttggatcaatgtccatgactatagctttggaagtgttgtataccagcggatcatccagttgctagatgagatatgattctgtttcctacataagcagtctgaactgacacatcaagttccctcgcttctagttttcgtcaattatttttgttgaaggtgccgatttggagttggtcaggtatcctaatgcagatacagctagctttcttcatggggggtcatcgctcttcatcgtttacttgcaccgaagagggacattgaccattatcccttagccttgcatggtgtatgtagttggtaactggtaaggctgcctattgccgaaaggaaacataaactgtttggcattggaagactgcaacaagtgtatcattgccatgacaaggcttctacatcaccatacattttcaaagcatacaaatcagtctggcggatatggtccacaaggttaccgacctcagggtcatggtgccgcttctcagttggggccacgctctcagaatcatggctatggatacccacctagaggtatgcctccacctcaaaactacaacgcaccctacggtggctacccaccgcagggaccgtcaagaggtggcatgggctgggaccagaggccgggcccaccaacccatccttcgtaccagggtggtggttctgactactacaagcagggatctcagccatatgatagccagccacccagctaccctcctgggccagggaattacaacagttatgggcaatcccagggccctaactatggccaacctcagtatccgcaacatgcacctcaacagaactacagccatggctatggtgatcctagatacaatgccccccctccgaaccagcagtactatggtcagccaccgatggccccgcagcaaggctatcctcaacagccagatccctatgctaggcctccatacagtggacctggtcaatggacccccaggggtgctcccgccgcagatggctcctaccaggcgccaccttcatcttatgggccaccgtctcagcaacctcctgcttatgggcaaacatatggtgcagcaacgggacctgatgggtatggtcaacagggttacccacagcagggtggccaggtaccagcttcatatggtcagagtgcaccagcagctccaggatatcctcagcaaggcacgcagcaaggtggctatgcacagtacccgcagacccaaccagcatatggtgatcaagcagctcaagccaatgcgaactatgggtaccagggagctccagcagatcccaactacggaagtgcgtacccacagcagccagggtatggtcctcctggtcaggcaactggtcaggctggttatgcatcctctgcgccagcggccagccagcctgtgtatggccaggctggatatacccagccacctacaaatcctccaagttatgatcagtctgcagcaccagcggcgactcagagcggttatgctgcgccccctgcaaatccacaacagcctgctgcagcaaaaggggtctcgccacagcctgctgctgctgctgctgctggatatggtgctagcgggcagtggacggcatgagcctcgtcttccgaacttcgatgacagcaaggtcaggttggatatccgcttttggcgcgtgtttgaatgtttgcatcttttggatgtctgtggacgcatcatgtagggcttgaccccgttatcgaaagagattgtaaccccttgagttgtgatactggacatcttctgtagtatctacgagtagttgcttaatgtgacttttaaacattctattcagtttggatgttccttgtcttgctacttcacagcttgccaagccagtaatctttggattcatgtttggttgctctttggtctttgctgtcgttcctgtaaataaatattggcgtttggccttctcttacgtcgttcatgggatgacggggtgccctttcgagttggcaatagatctgctgttcatccaaactcagttggttttgtttgtatttgttccgaatcatgttggtacagttagcatgtgaatggacaagcc

SEQ ID NO: 22917 - DNA, 3470 bp, Zea Mays
gctcaaagaagaagaattcagcccaatcttcagatgatgctgacaatggaaatgtgaaataccttgaagtactggagtgtattccacaggcatctgcaagaaaacatggagctagtactactgataagtcagaaaccagtaagattgcagatgtacatagcaaaccagtttatggcaatcatgataggattcagacagggccaagtccctcaaatctgaacacttctattagagatgatggcaaggaggcaaagtaccgacacattcgttattgcgagaatggtgaaatggggcaatcattgagagtaagagacatgtccccgaagtctccaatcaatcacatttcagacaataatcggagtgagtaccacttgaagcagaggtacagctattctactaaggaatgccctggtgaaagaaacttggatggtccaagcaaagtcaggggacttgagaaagaccgcgctgagatcttgaggatgcttgatgagttgagagaccaggtacagcaatcttgcaatgcgactaatggggcaagtggaattgccccatctactgcagcagcagattccaacagttcacatggtacttctgaccggttgagtcaattgaggcaggttgcaccacaattgcatcagaatggttcacatcactccccatccttgaatgttggaagtcctagcgtttctcgtgtttatgctccgctgcctgcacaacaagattgtgtcagatatgcagagcctatttcacatgctcgagcctctagctatcctgccagcctctatccatggagaaattttgataattatttctttggacagcatgatcccgatcctcttctctcttgccgccatgatggcttctatcaccaagctgcctgttcttgcttgcactgttgccaccaagaattcttgcctatacagggaaatcacataggcttccatgatcaaagggcaccatatcttctgaacaattatggggcttatcctgtggacagtcccttacttggtcagcaaagatacagtgcaagagttaccaatactaccttgcagcagaatcacatgagggtcaacgttagcaagaaggctgcacagacttgtgagccagtcgcaggtggtgctccattcaccatatgctgcaattgctacgaagttctacagataccaaggaaacagtccctgtcagggaacgagtataaattgcgttgtggatcatgctcacatgcaattatagtcaagcttgatggaaacaggctcaatgtatcagaatttgcactatgtacacgtttatctgatggacaggaaaatgacatgggaaccgatgggcaaactcaagacaataggtccattccagcttaccatttatctgttggaagtcctgcatctcaagaacgagatctgcactcaaatttgagcgagtcagagaacaatcatacccctctaggaactgactcagagggcacttccctgtccagggatcttcctgctgaagacagtgcagtttcccatgtaccaaatttaccacatcacagtcattctggatcatctccaactgaacattttggagtgggaagtagaagtacccattctgaacctgaaaaagttatactattaactgaaagttccaagcagacctcagttagaggtatatgtgtaacaaacaagatgcaatctccaaacaatgagtttgatgttcctgaatacacagatgatacattaaatgaccaacaagatactgaccaccctagaacaacaaaggccagtgattcctttctcactaatctgataaaaaggagcttcaaaattaataatggattgcgcaacagaagagcaagggtttatgtaaatggctttcctatctctgatcatgtggtccgaaaggctgagaagctagcaggatcaatctgccctggcaattattggtatgactaccatgctggcttctggggcgttatgggacatccctgccttggcatgataccgccttatattcctgagttcaatttccccatgcccaagaactgtgctggtggaaacaccagcatatttgttaatggaagagagcttcaccagaaggatttggatttacttgtcactagaggactctctgattcccctggtagatcttatgtagttgaaaattctggaaaggtttcagatgaagtatctggtgaagagctttatggccttggaaagcttgcaccaacagttgagaaaatggggcggggatttggcatgcgcatcccaaggttcatcaagcgacaggccaacttggtacagctagacttctaaaccttgaaggcaaatcgatggggcgtggatttggcatgcgcatcccaaggttcatcaagcgacaggccaattcgatctaccgtggttacttcaattgtgaagaaagttccattccatgtatctttctttttttattatattccgattaacatgaggcctagtttagtcaatcaagtttattgtaatttcccatgcatttgtttttactgaaaaattccctttttcatttacatgtgcaagaacaatgaagcaattacctagttgaatggcatgaattgtatcaaataagggtcggtttgctttatattaaagccagctattcggactgttgcaactgcaatctatagagacaaaacattgtagaagtagaagtccgtatagattaaaaccaaacgaacatgctgtaagctaaaagggaagtaatagctatgttatcccatgttgagttagttaggtcatcattattaatatccttggtagctattgtcaataaaatttagggatggtagaaacaagatcaaaagattctttgaactttcacatcactatactccatttcccacacaacaagccaacataatcataagaattacttgttagatactcgtgccttgcgagggtaggacactgttggggcctgctctgttgaatgtcctcataatgcctttatttcgcgtgaacaaatgtgtttcaggtacatagctgatggcggacgaagctggccttcggctgaagtgctaccaagaaaaacccctggaagtgctgcctataaaagctgaagtagtgtgaagagaagcttcgtctaacacatacaaacggcaagggtgtaactcgaagccacaagcctcggcatgaagaggctttcaggtgtaaagtgacgaagtagacgaagtctgagacttgtgcagcaagaaagaaagagaaaagatagcaatgtccctgcatcgttcgtaaacatgtgtgtaaactttatggatatgtttgtaattttccacgaagctatttatcttcgctataaataggtgaacaatgctctacataaattcacctttttgaggaccttaccttcgttttgcttagccttcgaagtatctttgagccatcttgtgtggagaagccgaacgtatgtttgtaaactcgtttaatacgaagagaaagggaatgaaaatgctaaggcat

SEQ ID NO: 22918 - DNA, 248 bp, Zea Mays
ggaaaacccccagccgtcacctgccccagcgttcgctctccatgtttcttagccccggcatccaccctatacttgctcgtttccaagttgtgctccagcgagcttctctgtagttcttccccaaccactcgctctcagcctgagtgtcctgcttcctcacgccaaagtagctcggccctctgcacccgccgtcgattctgcttatgtcctatcgtcttcaacctccggtctctgctcgttcttgccta

SEQ ID NO: 22919 - DNA, 2244 bp, Zea Mays
tctcgtcgtctcgcctcgtccgtcccctccccatacgacagccaccctcacaaaaccctaaaccctagccgccgccgccgccgccgccgacgccgaagcggtacagccatgtacgccgtcctccgccgcgcggcgcccctcaggcggcgtgccgtgtccgcgctcgccgccgcgctgctccagcagcagccggcggcgctgggagctgtagccccgcgggcgccgacgccgctcccggcggccgcgtggttccactcctcgccggcgtggcttggtttccgggataccacagagttggcggcgcgcgcggagttcgctgcggaggaaggtttgttctatgaggacgacagtagggcgccggccggcggcccggcggctgaggggctcgagattgccaagctcgggatctcgtccaagatcgtcgaaaggctcgccagcaagggcatcaccaagctgttccctatccagagggctgtccttgagccagtaatgcaaggaagggacatggttggtcgtgccaaaacggggactggtaaaactttggcatttggaatccccataatggatgcaattattcgtcacaacgagaagtacaagcctggtaagtttccattggctattgtcttggcgccaacaagagaacttgcaaaacaggttgagagggagttccttgattcctcccctttggaaacgctgtgtgtatatggagggactccaattatgcagcaaataaaacaacttaattatggtgttgatgtggtcattgggacacctggacgtgtgattgatctgctaaaaaggggtgctcttagtttggcagagatccggtttgttgttctcgatgaagcagatcagatgttgtccgtcgggttcgataaagacgttgaaacaattttggagagagtgcccccgcaacatcaaacattgatgttctctgcgacaatgccaacatggatacggaagctcacacagaagttcctcaacagtcctgttacagtggaccttgttggtgaggatgaccaaaagctggctgaaggaattagtctgctctctgtctcttcggaaaaccgtgaaaaaccagctgttcttgggaaattgattaaggaacatgcaaaaggtggcaagtgcattgtttttacacaaacaaaaagggatgcagatagattgtcacacaatatgagtcgaagtttccaatgtgaggcgcttcatggggatatctctcaatctgaaagagagaggacactggcaggatttcgggatgggcggtttaatatattgattgctactgatgtcgcttctcgtggattggatatcccaaatgtagatctgatctggccgaactggccgtgctgggaagaagggcactgcaattgtgatgtacaactatgaacaaagtagagctgtgcgggtcattgaacgtgacgtaggatgcaagtttacggagcttccaaaaattaatgttgagggatccgacttgctgggtggtggatttgactccttcgggggtggaggtggtgggtatggtggctcaaactatgggcgctcacgagggggctttggtggacgtggcggtggtggtggttttggccgatcaggcggtggaggatttggcaattctgggtttggccgctcaagtggtggatttggtgactcgggatttggccgctccgggggtggagggtttggtgactcaggatttggcaggtcaggtggtggcggaggattcagtgactcaggatttggccggtctggtggcagcggtggaggattcagtgattctggttcaggtcgtttcggtggcggttttggtagttctcgctcaggtagttttggtggctttggcgacaaggactcacgatagacctataactaataacagctatagaattatggacatcctgagccagattcagcttggtcatgcggtatatcacaaaggagatcgagattgttgcggaccctatccatgaacacctcggagagggcataaggctgggtgaggcgggtccttcgataggcaaaaataatcacgtgccttgtttattagtgttcttttctgttcgttttttcatttgcttctgcaagttctagctctagatcatacctgtaaaatatgcagaggtcttttgcggatgatattcttatatcgtttttggtagtcgcgctgtactgtaccgtgtgatgattatggagctgctttgtaggccgtttttaacctgatatgatgatcttgattattggcca

SEQ ID NO: 22920 - DNA, 5653 bp, Zea Mays
cgaggatcgaaactaacctttccaatctattcggcaggatctgctttgcgacgctgtcaaaggaactcgctcgaccaccgaaccccccttgccctagcgctccccgcctccgcctctcgccgccggcgagatgatccctgtcagcgccgatatccctgtggagctgcgcttccttctcgaatgcgccaccggctccaacttcgactccattcggctcgagctctgccagttagttgacagtggcttggatggatgcattttggtgctccgagtatgtctgaatcaaatgttgctaaatgctggggaggtcaagaacctccagttgcaacaaaagcttctatctgatgttttcagatattgtttacataagacctgcttcacaactagtttttgtgaggcgctggcaacgatagccttgacggatgattttcttgaaagcttgacaaatctgctggagctctcagttgctgagaaaattggtgttggacttgcgctgtcagattctgaggactcagagatgaagcaaaaaggtagtcatttctgtatggtcattgatatcgcctcttctgttccagggcaatggttttcaattgctcaaattgaaaagctgtgtacgagtcatatccaatctctatcaaatggtcaaattcatgaaattgtcatgtttctgcatcagtctgatggcctgtcaaagcatatggacacttttaataatattatatctctactaaaagtcacggagaggccattttttgtacctgttacgaatggagattttgatagccaagcaaatccttcaagacatttggagatgtactttggtagcacaaatgatgattttgagtcacttctgtctgaaattgggaaagagataagcatggctgacattgtagccgagttaggttacggatttactgttgacagcactcactgtaaggaaatactttccattgtggagcctcttgatgatatcgccatatctaagttgcttggggctgttgtcggcactcatattggtcttggagaggcccataacacatatgcaacatttgtatctgctattcgtaatagccacacgaatgactcacctcagccgactaaatggaacacagatgtccttgtggactcaatcaatgaacttgccccaagtacaaactgggtgcgtgtaattgaatatcttgatcatgagggtttcaatatacctgatgaagcgagcttttatctattgatgtctatatacgagtgtgcttgcaaggatccatttccacttcatgctgtttgtgggtcattgtgggaaaacacagaaggccagatatcgttcttaaagcatgcagtttgtgctccatctgataaatttacatttgcacattcttctagacacctggcatttcaggacttggcaggccctagtcaaggcaatcatgcttggttctgccttgaccttctagaagttttatgccaactagctgaagttgggtacactgcatctgtacgatcaatgcttgagtatccactgggacattgccctgagctcttacttgttggtgttagccatatcagtaccgtgtataatcttctccaaaatgaagtactgtcctgcgtatttcctgctttactgaaggatccaacaaagcgcaatgtagtgaattatctctggcatacaaactcatatctcacacttcaaggttttgttgatgctcataatgatccagattgtttgctaagaattgttgatgtttgtcatgacttgaagattctgtcgactgtccttgattctactccatttgcattttccattaaattggctgctgcttccttgaggaaagactatagtaatcttgagaaatggctgactgaaaagctatctctttatggaaaaggttttgttgaggaatgtgtgaattttctgaaagcaactatgagcaacacagattacgtcttagagggcacgacacaacctcaatctattgtcagaaacatatattgggagtcttcttatgccttcataaaggttctccagtctcactcggggcagctcttgtcagatgcaatattggatgaaataaggaaactgtgtgtttcgtttgaatcgaggaatcctagctctgctgtaagagagcttgctaattcagacggagggtcagatgacattgaagtagaggctaatgcatattttcaacacatgttctctggacagataagtgttgattccatgatacaaatgcttgggcgcttcaaagaatctacagataagagggaggtatcaattttcaactgtatgatctcaaatctttttaaagaatatacattcttccccaagtatcctgataagcagcttaagatagcagctgttctgtttggatctcttattaaacatcaacttgtggctcactccgaacttggaattgctctgcgtggtgttcgtgatgccttacgcaaacctgttgattcaaagatgtttatgtttggtacatcagcactggaacagtttatggaccgtgtcatagagtggccacgatactgtaattacatattgcagatctcacatcttcgtggaacacatttagaaatggtttctgttattgagagagccctagccaaaatctcctcaagtcaaaatgagccaaatgttggcaacctgctttctgcagagcagcatgtttctggttcatcatccatggaaggcatagaggcatctgaatcatcatggttgatgggtaccatcccaagtcaactaggaaggcctctttcttctcctttgcaacataggcagcagggtcttctctcggagaggtctgaggtttctatgaattcactgaataagagcaatttatccagtcagcctccccttgcttcatcgtctgctgatttgactattaattcaaagacaactgctccaccctctttactagcttcacctcatcagtctatcagtgtgtcaacgagtgtgcatgttggatttctgcgttctcgaagtaccccaggattaccgaggcagccttcatatactactggatttgggactgctttgaatatagagacgcttgttgcagcagcggaacaaagagatataccaattgagacacctccacctgaagttcaggacaagattctttttatgatcaacaatatatccatctcaaacatggaagctaaggcaaaggaatttaatgaggtcatacaggaacaacattatccttggtttgcacaatacatggtcatgaaaagggcaagcattgaaccaaatttccatgatctgtatttgaagttctttgataaattaaactcaaaatccttgaacaaggaaatgctgaaggctacgtatgagaactgcaaggtcttgttaagatcagaccttatcaaatctagttctgaggagcgttccttgctaaaaaacttaggcagctggttgggcaagttcaccattggtaggaaccaggcactaagggctaaggagattgacccaaaatctcttattgtggaggcgtacgagaaaggattgatgattgcggtcataccattcacttcaaagattcttgaaccttgccagtcaagtatcgcatatcgtcctccaaatccctggaccattggaattctaagtctacttgctgaaatttataatcttccaaacctgaagatgaatctgaaatttgatatcgaggttctgtttaagaatcttacagttgacatgaaggatgtgaaaccaacttccctgcttaaagatcgtctgcgcgaggtcgaaggaaatccggatttttcaaataaagatgttactacctctcaaacccctgtggttccagaagttcttccagggactattccttcatcaactcatgttgaactgcagcctgagatcaatattacatcccgagctatgagtcttccaaatatactcaatcagtatgtggctcctgtccgtctacccacaaacagcacggtagaagctgacaaagttgctctgatgatgcctgagcaagtgtcctccttgacccaggttttgccagcacaaacacaatcaccatcaccatctccattctctgttaatcagcttatggcagctattccacgtgatgagatatgcttcaaaataaacccaaagcttggctcaattggtccacaattgcagtatagcaaaattatggatttggctttggataaggctaacagggagataatactccctgttattcaaagaagtgtgacaatagcaagccgaactacaaaagaacttatcctgaaggattatgcactggagtctgataacaatatgataactcgatctgcacatttgatggttggaacattagccggaagtcttgcccatgttacttgcaaggaacctcttcgtgtcgcactatattccaatcttcggaatctcattcaaaaccttatgagtggcagtgaaactatcgagcaaattattcacatgctagtcaacgataatctggatcttggctgtgccatcattgaggctgtggcaacacgtcaggctgttgaattgattgatgcagaaatagcccagtcattttcacaacaaaggaaacaaagagagggcggtggtcctacatatcatgaaacttttgcttatgctcaagggccgtttgctcgtgtacctgaagcattaagttctaagcctgggcatttatctgcttcccaacagagagtgtacgaggactttgttcatgtatggcatccccacaatcaaaatgtgggagctacaggttctggtctgtctggtgttgctactgtctcgagtactcttggtgtacttcgagcttacagtccaaattcgacatcagcatcctccagtaatttgtcaactgtccatatgggtggactaacatgtataactcagccgacagaactggggtctgaggatactgttatcgcacaatttttgagtaatcctgcccaagttggaccaagcgagtctcctgtcctatttagtggaacagttggtgctgcatctacattttctccattggcatctaatgaccttcctgaaataagtgctatggtgccccctccatcaacatctgctgatcgtctgggatctattttacctgaacctttgaatactggggatgctttggagagatacaaacaggttgctcagaagctggaagccttgattgctaatgatggtaaacatgtggaaattcagtctgttattgcagaagttcctgatatgttacgccggtgtgttagccgtgatgaggctgcattagtagtagcgcaaaaggttttcaaaagtttgtacgataatgcatcaaatagtgcttatgtctcctggcttctagcaaccttaattgcaatacgagatgtctgcaagcttgttgtcaaagagttaacaagttgggtaatatattcagatgaagagaagaagtttaacattgaaatcatttttggccttattcattccaagttgctgaatcttggggagtacaacgttcatttgacaaagctaattgatgggggaagaaataaggttgcaacggagtttgcaatgtctcttgtccaaacattgattacacaagatcctgttagcatatcagagcttcacaatgttgttgatgcaatatcgaaagttctagctgcccaggtaaacaaagaggaaagcattgctaatgaaactacactaattgatccaaat

SEQ ID NO: 22921 - DNA, 225 bp, Zea Mays
taaaatttaaagtgcacaaatgatataaagcacaattgctacttgtttaggtgacacactgtttgcatttctcatcagaatgtcacaccagtcacttatgttgtgacccacaagactcatccaccatccaatcaagactgtgaactagaggcatcaagagtttttttcatttgcttgtggttcatcgtacctcccgttttgtgcatgctgtaccacaggtatcta

SEQ ID NO: 22922 - DNA, 1691 bp, Zea Mays
ctatcacctaaaatctaggatatattattccccccaaaacaaaccctaaccggccggcccaattctcacgcgctcgccgcctaggagcattcacgttggcggcgggcggcggctcggttcctctcctccaccgcacctccaagaatccacctccacgactgagctgacggctcggtagcgccatggcagttcaccggctccaaccttccccatccggcctacagtgctccaccgcccggtcgccagtgctcctccatgggccacggctgacgggtgcacgcaccgggcgacgagcacccaccaccggttatgtgcaccctctctccttcggtccttcctccctttcttccgtgctaagccaccgagcacccaagcggtttggcctgatgccacatctctgatggttggtgcaggtaggagaggtggatttggtggacctagattcgatgtgcagagagcgacttggaggtggctgacatcttcaagcactgcatcatgcagttacaactactgttggccatacagggaaatgctgggcctattataccaattgttcaaagcatggaccttgtataattacatgtttttatcatagatagattaatttctgaaatgcccatagattggtatatttgtggaaatttgtggtataagatttttctgttgatgtttgcaggttatttttccagcacttgacattcgagtgaaaaatgtcgcagggacatattctcttgaacataaaggagaaaatgatctcttcgcacatcagacaaggcttctactctttcagaagaaagtcatttttaggagaatcgtgaacaaaatgaccagatgtttaggcctggttggaaggacatttttcgaatgaatcagagtgagctcgaggctgagatttgaaaaggtctctcgagattctactcttgatccaaggaggaaggcctatctgatccaaaatctcatgaccagccgttggatagttgctcagcaataatcaccacaaccaagcgtcgaaggacataatggatgtacacgatgacctggatgtgttccttcgtaccgagacccagggaaacaaatatttgggctgtgagcattacaaaagaaactgcaagcttgttgctgcatgctgcaataagctattcacttgcagattctgtcacgataaagttagtgaccatacaatggacaagtaactcaagaggtccacttattgactcttatgaccatgtaattggtgttaatacaactacattaacatgtaaaggttggtagatctggaaggtcttgatggtctaatacctatctatgagtacggaagaaaaggcgggagaagtcggtctctgcagcatcgcgcgtgaaaaaaaatcagccaattccacgagcattgatgttgtcatgacttcaaaagaggagagaccatgctaagaataatgcattatgacatttgtcaggcttacatatcgactgtttgatatggatagatgtataggtttatgaccaatccagttcaaagcaattggagtatagaagaaataaggagaaacaggaaagctctgtacatcttgcattttgctgttgtttgtcgaagtttcaatgtctgtcgcgtgacaaaatatagttgtaatttatattttggcatgcacgaaacaggtgtatttattcatttttgaacgaaattttatgtcaaatcc

SEQ ID NO: 22923 - DNA, 973 bp, Zea Mays
gcttctctcgcattcggcctccccttcccaccctcaacagcgaagagcacacatggataccgccgtcttctcccccgccgatctcttccacggagtcgacgacagcgacgacgaccgagatgagatgcaaatctgctccgatggggagaagccggtggcgttggagtatcaggagagagtccacgacttccctgacatggtatgacttccacgattcggccgtcttggctcgcatatgtaggaacggtgctcctctggaatccggaaaggcccgggtcttgaagcacagtattatctaggtttcttgccttctcgggtttcagtttggattttcctaatattagagaatggatgaacaagtaatacctagatgggcagaaacgagtaaagaatattttggtatttcgacgtgctgtgttctttttccactgaggcacttacattatgttatgcaaaacgcagcagctatggttcagtttagtaatcctccaattgttaaactacggacagcttagcttccccatgaagtatgttgcgccaaactctgcaaagtataataatgaataagaaacagagtggttgttaattcagtacgaagcatacttactatcatgatcctgtaatgggcagaggaagatttttatatcgttaaatatttgggctggactaattgatgttcatatttggttaggggcttagcatacttttcaaaagtatatgtatctggctatctgttgcttgctcaatatgctgctacattcttggatgcacttgaattttagcctacgttagagttcatggtgctgtgtcagtaaatccacatgcttaaattaaaatggagtggctatttcagttctactatatcaaaggttgcttggcttataactattgttcaacaaaagtgatgtgagtttattgatttcattttcattatggtcatttcttattgcattattatatttttctcaatcta

SEQ ID NO: 22924 - DNA, 1204 bp, Zea Mays
tggtgtcggtgtcggcgttggcgagtggcgactggcgacttctctgcctcgtcctccccgttttcccctccgcgtccagcccggcgcgacgccgccacgcacctagccgcggatccgaggcgcagatccaatccagcgatggcgtccacggcggcgaggcggttgcgggagctgcaggcccagacggggaacaagacctgcgtggactgcgcgcagcggaacccgcagtgggcgagcgtctcctacggcgtgttcatgtgcctcgagtgctccggcaagcaccggggcctcggcgtgcacatcagtttcgtgcgctcggtcaccatggactcctggaccgaggcgcagctccgcaagatggaggccggcggcaacgaccgcctcaacgccttcctcacagcgcggggcgttcccaaggagacgtcccacgtcgcgaagtacaactccaacgccgcggccgcctaccgcgaccgcatcgccgcgctcgctgagggcaagccttggaccgacccgcccgtagtcaaggagacgcccggatctgggcgcgcccgccccggctaggaagccacccttgcacgcctccggaggcggcggcgggtgggacgactgggacgatgattttcggtcggacatgaggcggaatcagtcggttggatcattcgccgccgcgggggcgcagtcagggaggcagccgccgaggaggatggcggagaacgagtccaagcctgagggtatcccgccatcccagggcggcaagtacgttgggttcggatccagcccagcgccatcggctaataggaacggcggtgctgctcagggcgatgtcttgcaggtcgtctctcagggatttggacgcctttcattagttgcagcctctgctgcccagtctgctgccagtgttgtccaagtcggcacaaaagaaatccaatcaaagatgagggatgggggctatgaccagaaggtgaatgaaactgtcagtgttgttgccaataaaactgcagagattggaagcaagacctgggggatcatgagaggagttatggcaatggcctcacaaaaggtcgaggaatatgccaaggaaggaggaatgagcggctggggagaggattggcaacgcagcgagcagaacggtgagccttaccaaaggtttgagcacgcgaccgacagcaacagtttgaattcctcccaaaattcttcatggaag

SEQ ID NO: 22925 - DNA, 613 bp, Zea Mays
cacgaaccaaatggcgccacactgcataacaaaatcagagggaaacaagcatagttgataatctatagttgatacaaccacgccatataggaccactgtatgtatcatgtacgcaagatgcaatcgttcaaccagtgtcattgattcaaaagaacaacgaagtacgcaaaaatgcaaaatagtgtcattgatccataagaccacgcacagaatagctcccgtattttgtatgcactgcacctaggcaccaaggatccatcgtccagtaatccaacaccacatgagggcaaggctgcacctgcaccctgcagcgtctggggtggcctcgtgccctcctgggcagtggcagagcgatcgacagaagcagaagacgggtcgggggcgcggtgcgatgggcgaccgccgacagcaggtttagggctgggacgagggaggaccgtagcgggctggcggcggcggagtcggacttcggagtcggatgtcggtgctcggcggcagcaggaagcaagaacgagagagagacgccggtcactcagtggcactgaagaaaggcggcggtgggcgtgccaccgcactgctctgtacctggcgttaggcacttaggccattaggg

SEQ ID NO: 22926 - DNA, 1722 bp, Zea Mays
cacccaccgcccccaccgcctatttccccccactcgtggcaacctctgctctggccccccaaaccccacacacttcgcctcgccaaactttcccctcggcctccgcccgcacttccaccaccgctgcaccgcaccacacctcgcagatgccccagtaggctccaaaaatccaaagccatctctccccaggcggcctcccatccatctccgggagatggcggccggcaccgtgacggcccgatccaacggcgagggccacggccacggcggcgcggggtcctggtacccgcagcgccgcccgcactacgggtacggcggggggtccgcctccttccgcggctgctgctgctgcctcttcctgctgctcaccttcctggcgctcctcgccctggccatcgcgctcgtcgtcgtgctcgtggtgaagccccgcaagccgcagttcgacctcgaccaggtgtccgtgcagtacctcctcgtggcctcgccgacgtccccggccggcctgccccccgcgaccccgggcgccgcctacatctccctcaacatcacgctgctcttcaccgcccagaaccccaacaaggtgggcatccggtacggcgccaccaagttcgacgtcatgtaccacggggtgccgctcggggtggcggcggtgcccgggttcgagcagcccgcgcacagcacccgcctgctccagacccgcgtcattgtcgaccgcttcaacgtgctccaggccgacgcgcaggacctcatccgcgacgccgcgatcaacgaccgcgtcgagctccgcatcaccggcgacgtcggcgcgaagatcctcgtgctcggcttctcctccccaaaagtgcaggagccagtcgctgaaatacaagcagtgtggcgtggacgggataagcgtgtagtgtaggaaccccaagccgccgccgccgccgcagaagctgtattgcagtggagaagtgggtggatctgtgcgtcgattctaatttccctaatttgtggggtttgatttccttcttgtgcttaggtggtaaattttgagcacttacttttggaggaggccactgattctgtgaattattgctgcttgcaatcagcaatcagtaggtatcagtatgaccacggttatacatccatcgatcgccgtgaacaattgcttaggagctaagggaagtggtgggcgtcggttcgtctgtggttgtcttgtttcgtttcgtttcggagttgtgggtctgcgctgtctgccatgtccttgtctggcggctaatcttgttcacttcatcagttcatcagcccgtagttagtggtagaccggtagtggactagtggtgccggggagattgtgagggaaaagttagcgcgggagagcgtgggtggttgatatttctcactgacaagatagtggcggggtcaaaccgtcaaaattttactgcaatttacgactcgtgacggggcaaaacggagtttgtaatgcggactttgtgtaggccgtcgcgtgacccgtgtggtctacactacacatctcctatgtcaggtcgggaagttgtatatatatgtcttcaaatcttagttcgcgcacatgccctggcgtgttttttgcatttttttttctgctgaatgtacaggagacttgctgccaccggtgccttggtttattgattcccatgttatactgcaagtgcttttgtattttttgtgctggactttaattcctttctagttgaagtg

SEQ ID NO: 22927 - DNA, 2669 bp, Zea Mays
cttctatctgtatctgtcattcagagacggaaagcaattgggtgcacatgtctagcggatgaaggtaaccacatgcagtagagaagggatcaacaaaattagcttatctagagtggatgctcgaaccttttgctttggagttcgaattgttaggaggaggactgttcctcaggtattaaatttgatcccaaaggaaggtgaaggggagtcttttgaggatgctcttgctcgtgttcgtcgctgtcttggaggtggaggtgctacggacaatgctgatagtgatagcgacctggaagtggttactgaatctgttacagtcaaccttcgttgccctaatagcggatccagaatgaggattgctggaaggttcaagccttgtgttcacatgggctgttttgatcttgaaacttttgtggaattgaatcaacgctcacgcaagtggcaatgcccaatatgtttaaagaattactctctcgagaacttgatgatcgatccttatttcaaccggattacatctttgttgcacaattgcagtgaagatgttaatgagcttgatgttaaacctgatgggtcatggcgtgtgaagggtgatgccgctaccagagatctatctcagtggcatatgcctgatggtactctttgtgactcaaaggaagatacaaaccctggtgtcgttagtgttaatgagttcaagagagagggtacttctgatggacatagaactttgaaacttggaattaaaaaaacccctaatggattatggcaggttagcagtaaaccagatgataagaaacccgtggttagaaatcacatccaaaacaacacggggtactcaataccaaacatagtacctatgatcagtagccccactgggagttgcagagatggtgaagatgtaagtgtgaaccaagaagggggtggtattcagtttgatatatcattgaaccaagagtttgacagttttgcgcataactttggtcaaacatacaatacagaggataggcaacaagagccacaacataatgctgcagatgtcattgttcttagtgattctgatgaagaaaatgacccgattgttcgcctgccagctgtctatgcaaatactcctacaaatggtgacagtttccctttcgtcactgatgctgctgtatctggatatcctgaagggtaccaggaggatgctggggttggtacaagtggccttggtttattgagcaacaatactggtgattttgaaataaataactggcaaatgcattcttatccacaaccagagcaagggttccagttttttgggactgatactgatgttggcaatccttttgttggtccgcataattcctttagtattacaccagaagactactcccttgactgtaatgttggcatagaggatccatctgcagctcacgatgtctcaatttgccgaaacagtaatgatgtgcatggaagcttggttgataacccattggctttagcaggtgacgatccatctttgcaaattttccttccaagtcaaccttctactgttccccttcaggaagaactgagtgagcgcgctaatactccaaatggagtccaccctgatgattggaggatatctcttacgcttgcggctggtggagggggtaatgaagaacctacaagtgttgatggcctaaaatcacagccaaaagttccatcaaaagagcttctgctctcccaagcatgaacaatgacagatgtaatggatctaatctaaacccgagaaggattgaaaatatattttctcatcctcgccaaccacggtctgttaggcctcgtttgtgtttgtcattagattctgattcagagtagttcggacatcacactgggatagctgaatttgctattaatctggcaaagttggcttccagaatcttgatttttattgtggagggctatcaagttattctggttgatacaaagagaaacaccagtgtggatgctttattgcattaacctggtaagattcaagtgttctatatgatccaagtgggatctccatagagttcatctaatggttggtacaggatattttctaactgggagtggtttaacgtggctagtggagcaggctgtacattttccctgacatttactgggtataaggaatagggggccatcacttggcacaagacaaatacatgtgaatgttttgtgtgtaccatcattgtatttagggttcgggtgttaatttagatgtttatgaccctgatgtttgatggaaaataaattattccttgatgaagcggcggtcaatgaacagagcccttcggttttcagtcggagctactgacccttcatctgttcctgtggtgaagtggttgctgccgcttccgtggtgggaccaaccatgccgaagtcgtgtctagcagagggcaatcaatctccttggtgtctagcaggtttctttgtgcatcatgctgtattattctggtgtcctttgcaggtggtggtggattgtatcggtgttgtgaacccttctgattgaaaggtgctgggatggagtactggtatgaagaacttatcttctttcagaacatggcagcgcgttgtcggagcatggatgacgaaatcaccctgcgcacaaatgtgtcttgatgccagctgatcggtaggcttaggcctgtttgagcaaaaccgtcccg

SEQ ID NO: 22928 - DNA, 1986 bp, Zea Mays
cgaccggccgagagaaacaccgacccgaccgaactcaactcgttctcgacccgaagccccaaatccctctcagaaaacccttccctcccgatggcaaccgccgccaccgccatggtggtacccgagcagccgcgccgccggaagccggccccggggcgcgggggagtggccctccctgcgggtctctcggaggaggaggccagggtgcgggccatcgccgagattgtctcggcgatgggggagctctcgcggcgcggggaggacgtggacctcaacgcgctcaagtccgccgcgtgccggagatacggtctggcgcgagcgcccaagctggtggagatgatcgctgccgtgcccgaggccgaccgcgccgcgctgctgccgcggttgcgcgctaagcccgtgcgcacggcgtcgggtatcgccgtcgtcgccgtcatgtcgaagccgcaccgttgcccccacatcgctaccaccggtaacatctgtgtctactgcccgggcggtcccgactccgacttcgagtacagcacgcaatcctacactggatacgaacccaccagcatgcgtgccattcgggcaaggtataatccatatgtgcaagccaggagcaggatagatcagctcaagaggttagggcatagtgtggataaggtcgagttcatcttgatgggtgggactttcatgtccttaccagctgattatcgcgattattttatcagaaatcttcatgatgctttgtcggggcacacttcagcaaatgttgaggaggctatttgttattccgaacatagtgctgtcaaatgtattggtatgacgattgaaacgagacctgattattgcttggggcctcatctgcgccagatgctatcttatggttgtactcgcctggaaattggtgtccagagtacatatgaagatgttgcccgtgacacaaacagaggacacacggtggctgctgttgctgattgcttctgtttggcaaaagatgctgggtttaagatttacctaatgttggagttgaaagagacttagaaagtttcagagagttttttgaaagtccagcattccgggctgatggtctgaagatttatccaacacttgttattcgtggaactggtctttatgagctctggaaaactggcagatatagaaattatccacctgagctcttggtggatatcgtggcaagaattctgtctatggttccaccatggacacgagtgtatcgggtccagagagatattcctatgcctcttgtcacttctggtgttgagaaaggtaaccttcgtgagctagctttggctcgaatggatgatctgggcctaaaatgccgagatgtcagaacccgtgaagcagggattcaggatatccatcacaagatcaggcctgatgaagtagagcttgttagacgtgactatgctgcaaatgagggctgggagacgttcctctcttatgaggatacacgacaggatatcctgatcggcctgttgcgcttgcgtaaatgtggccgtaatgttacatgccctgaacttgtagggaggtgttcaattgttcgtgagcttcatgtctatggaactgcagtccctgtgcatggccgtgatgtagacaagctacagcaccaggggtatggaactctgttaatggaagaagcagaaaggattgctcaaaaggagcaccgttcagagaaattggctgtcatttcgggggttggtactcgccactactaccgcaaactgggttatgagctagaaggaccttatatggtcaaatgtttggcataataccgtttcattttttttcgtgctcatgtagaacagactagtgtttataatgtaacttgtgtagttttttcaaaaaaaaaaaatttgttatacccttcttttaatattgagtcgtccaaatgaaaatggagacagctcagcgtgtaatattaaatgatagcaaaattccaccctagccccaaaaaacttcatgtgccgtgccaca

SEQ ID NO: 22929 - DNA, 1049 bp, Zea Mays
aaaaattccccggcatctcgtgctgtcttctctctctcctttccccttccccggctccccgcggcccgcaccgctgtgttgtgctggttggttccgtcgcgtcgcttgcttagatcagatctctccttctctccccggatcccgactgcctccctcccccttccacctcaggctagccgagagagatctcggcaccgccgcccgttgccatggcggcggccaacgcccccatcgccatgcgcgaggcgctcacgctcacgagcctgggcatcgcgccgcagttcgtcaccttcacccacgtcaccatggagtcggagaagtacatctgcgtccgcgagacctccccgcagaacagcgtcgtcatcatcgacatggccatgcccatgcagccgctccgacggcccatcaccgccgactccgccctcatgaaccccaacaccaggatcctcgccctcaaagcccaaatacctggaacaacacaggatcacctccaaatattcaacatcgaggctaagactaaggtcaagtcccaccagatgccggagcaggttgtattctggaaatggatcactcccaaattgttgggtttagtgacacaaacatctgtttaccactggtcgattgaaggtgattctgagcccttgaagatgtttgataggacagctaatctggcaaacaatcagatcatcaactatcgatgtgacccagcggagaagtggcttgtacttattggaattgcacctggagccccagagggaaacctggtttttctaagaaacaagccgacctcttcttccccccagatttccaggatgattttcctgtagctatgcaggtttcacaaaagtatgggcttatctatgtaattactaagcttggccttttgtttgtatatgacttggaaactgccgcggcagtttacagaaatagaatcagtccagaccctatattcttgacggcggaatcttcctctactggtggattttatgccatcaacagaagagggcaggttttacatgccacagttaatgatgcaactgttgtacctt

SEQ ID NO: 22930 - DNA, 746 bp, Zea Mays
aggttttagccttcactttgtcaaatgagctcctatgactccattggagccatcctctatagatgttgcaatattttgtctttctttgatgggaatcaactatccaagttatttagaggaagcaaatagggttctcaaaccaagtggttggcttgttattgctgaagtgcgaagtaggctagacccgagcaacggaggtgctgatcctgaaaagttttctaaagccattatccagcttggcttttcgcttgtttcaaaggatgtgaaaaacagaatgttcattctgttctacttcaggaaaaaggaaaaaagtaaggtggcgaagagcatcgattggccacagctgaaaccgtgcttgtacaaacggcgatgagccgcttgtctcgtatccaccagtaatactgtagttgttgtagtagagctcttcaaaagtttcgtcaaaactgaaagtctagatttaggtccctccgtacctgtatggctgcatctgtgtgccacgctattccattattttccacattagctgcgtctttcatttgttggacctcacaagaaaagatcacatagggaacgatgcattgtttggaagcagatcatatataattcaagtctacttttcacatgctgcaaattttgtgtatggtccagcgaacgaacatctggaccgttttcatttttcaatctggaatctggatcagcttgaaggaagtgctatgaccttgaatacttgatgaacggaagcattc

SEQ ID NO: 22931 - DNA, 574 bp, Zea Mays
aaaaaaaacaatatcggcgcacaggccaaagaaaacatggagcggatacgcgtgttggacggatgcgcgtcgccgtccaatggcgacccgcgagtcaagcaccccgaagccatccatggcgcctttcccgctccgccttctgcggacggcgaccctgccgcgacgccgagaggccagcggccaggcgagcagactgcagtgcccccctgcctccccgctgggctgggaagaggatccagtggcaatggagggcgcgcaagatcttccccggcttgtcgcgtcccggatcctaccggcctaccactaccacttccaggtccagccagccattcgatgtgacgtgatcgtatccgatctttccccgtgccgtatcacgtccgcgtgattttggatttgtgtctcggcttttaggagggtacgtttggttcagcttttttctgatcagcttttagtagaatctggctatgtaaacaatctgagtatcattagaattacatgtgggagaagataaatgtatccataagactcatgatctagaaagtggtaaattcctactattgcaacaactcaaccg

SEQ ID NO: 22932 - DNA, 818 bp, Zea Mays
cgcgtgcgccccatccaccaccgaccgggcccgtcgctgcaacaaaggcgttcagtttcgttccgtttgggttggtctgtttagtgcggcggcgacagcgacagcggaggagagcggggacgggaggggccatggcggacgcggcggcggacagggagagggacaagggcaaggacgaccgccgccgctgggcggctcgctgcggtttcgccgtcctcggcatcatgagcaccctcctcgtctacggcgtcctgcaggagaagatcatgagggttccgtacggagcggacaaggagttcttcagatactcgctattccttgttttctgcaaccgtatcaccacatccatggtgtctgcaatggtgttactggcaagtaagaaatccttggaccctgtggctcctctacacaaatatggcgttgtctccatatcaaacatactgaccacaacctgccagtatgaggttggactggtctctgcccttttggttcttctgccattgtgttgtttcgtgttactatgtaaagtacctttttccaggccctcaagtatgtcagcttccctgtccaaacacttgctaaatgtgccaagatgatacctgtcatgatctggggcacaataataatgagaaagaagtatggtggaaaagattacttctttgctgtcatcgtgactctgggctgcgcattgttcattctatatccggcaatgatggatgtgagcccatttaataaaggcagagaaagcactatttggggtgtttcactcatgtttggttatcttgggtatgattgtatatttgtatgaagctttagaa

SEQ ID NO: 22933 - DNA, 3771 bp, Zea Mays
gcacacgctggtcctaattctgaccgttgcaactccaaaatccaaatctgccgcccggtttcatagccacctccaacgtctccttcgccggcgctcatcccccctacacatccccctccccgttcttctccaaggcttcaaactcgcagagattcgcagtctgcactacgtctccttgacctcagcagcggccacacagccacgcgcaccgagagaagagagattccccacggcatggcggcggcggacggggacgccttgatcgcggcgtttgcggtgtccaagggcggcatcgtgctcaagcacattttcctcaacgcaccaccgccggaggcgatgtgcgggtccggcggaagagaagtggagagtgatgaggaggacccgccggtgatggtgggtcggcaccccgactgccacgtgctcgtcgaccaccccagcgtcagccgcttccacctcgagctacggtgccgacgtcgacagagtctcatcaccgtcaccgacctccactccgtgcacgggacatgggtttcggggcgacggatcccacccaacacgccagtggatctcgctaccggtgacacgctgcggctcggggcctctaagagggagtataagctgctctggctgtcgcttcgtgaggcatttgagatggacgatctgatgtatatgccatcgctgcctgaggaggacaaagaggagccatatgttaaggaaccaagcagcaagttattgcctgggcacagggattcagtgaacatggagacccatcaggatacaagtgaacaaattgtgtctgaagacattgcatttccagccaaagtggccccctcagcacctccattgtctgagttccttcaacctttttttgtggaagagcattcactttcccaatttcatgagaaaagaaacggagtgacagaggaaaagttggtcgacaagaatcaaatttcagaatcttttggttcgttgatcatacaggaaatgccaggcacactgacaaatgctggaaaatcaatccagtcaggcgagcaggaggatgcctcaaacaaagtgtccaagaggtccaagttgaagtcagtcaaatcacttcgtgttgacacaggcaggagcagcgagagaagcagcactctgagccatagctttcagaagggagaccaaaatgatattgttgtatgttctcagagctgtgggacagaatgtgcggtatgtatagctttatttggtatttctgaaattgaaaaggctgaagaaaaggaagagttgattgctgaagataacgttgacatgaatcccccggccagcatgatcatggagggaaatatgaacgagagaaaacctgataattatatcccacaagatccaattggtgcaaagctgcagaagaaactaggcttattagattctgctctccctttgcatttcaaagatgatgtgttcgccgacaaggaaattccacaatggaatgttgctagtgttcatacagaatctgagcttctttcagaatatcttataataccagaagtgaagcacgatgacttgaaccatcttaacttggaggaaggtctctcaaaaagcgagaatataaacccaaataagattactgagggccctgggaactgtcagctcgaagggaccattcgtgggaatctatttgacaatttggatactgatggaattgaagaaggtgaagagatctgcccactggacaaggatgaaatcacccccaatggatcagatcatggcgacttttctgaaaatgagaactccatgctgaacactggagatcagatgaaattaaatgaacctgtctctgagaatcttaacccattaattccaactgatgaaaaatatctgaagagccaaacggaggagtgtatgcccatttcatatctggaattcaaagatgatatccttctggatagggaaaactcagtgctggctccgagaaagtacgaggctatgtcccctgtgaggcaggaaaatctgttctcagacaaagagaacgtgactcctgcctctaaggtgaagaccgttgttaggggagttcttggtacaaggatggataattcagtgtcagcagcaaatgcttcaaataagaataaagttcttgggtcaagggtcgataattcagtgtcaacagagaatagctcaaataagaagcaatgtgaattatcatcgaagtccaaaaaagtccacacagtagattttgatgttttctattcggataaggagaacttgactcctatatcttcaggaggcatgaaagcaaggaagtgttttcccaaggacctctcagtcgacttagaccaagatcaggaagcattctgctcagacaaggagaacttgacaccactatcttctgcagctcggaaaacaagggacatgtctggaaaccttacacgagttgaaagtgcggtcacaaagaaaagggttgttggtaggctccccttccagactcttgtgtcaaattctcctttgagacctgctagctcgcatgattgtacctgtgctgttgctagaccagctggcgttgctgctggtgacttggcgatcaagttagaagataaattgaacgatctctcatgtaatggccacgaatcaggtagtgctggagaaggcatgaaaacctggaccatggtggctaatacagacagtcttcttgatgacgagtctaggaaggctattatgctgctaaaaggcttaaaaggaactcgcctgttcataccaaggattgtgatcagggagttggattccatgaagcagcgggagggcctgttcagacggtcaacgaaggcgacctccatcctgcaatggatcgaggagtgcatggcaagggagagctggtggatccacgtccagagctcggccgacatgttcccggtagcaccaaccccgcccgcgaccccttcagcgcagcgcatcgacgaggagatcgagatcagctccggctccttcaacccgatgatggcgttgttcggccctcgaagctccgccgcgctcgcggatatgatatctcccagacccgaggaccgcgtcctcgactgcgccctcctcgtcagtagggtccggagcaacgagaaggtcgtggtgctgtcaaacagcgtcacgctcaagatcaaagccatggcagagggcctgccatgcgagggagccaaggagttccgcgagtccctcgtggacccgtcctccaggcggttcatgtgggcggccagcgccccacgggggtcggcctggtcctgcctggacgcgtccgcgctggcggagaactactacaacagccgccaccacgctatgaagcggagggttctggtggcggcgaggccctccgagtccgaggccgccaagggcctgaagctgatcctgcgtcacaattccctgtacgcgcaggccacggacgccgtcaacaagacgccgctggtatcgctggccgcggtgtgagatcccccgccctcggttcttgttttggcgtgttgttgtcatgatttccatgccgagcgaaactgtgggccgtgtgcagactttgaacaggacaccgtcagtggtttcgttttgggccatcatgagtttttgagtttgtgcctttattagctagcgcagcgaccgactagtgggtgagcaggaagctcccgagggcaggcagtgtctttgactctgtcttgtggacgtattctacacacatctctcgactgagatacgaatgttttttttcttcaaatatgtagctggcgacgagcagaagaaagattagtgcgtgcacaaagttgattagaa

SEQ ID NO: 22934 - DNA, 5407 bp, Zea Mays
ctcgacccaaacccgccccacgcagcgcaggccgcgtatccacggccgaggctgcggcgcagaccccgcgcgtcagttaccgcaggcgcgcggacgcagcgccggatgatccaaaaaaacaaaaacaaataaaaaaacccgcaggaaaacgcgagagagcacagcacaaggccgccggtcccttctccccaagttcttcccactactcgccgcttcctgctcggaccgccgcggcgactggccggagatccagccgccgggagcgcggaggtcggccggtagctgccgtttcctgctggtggttgctgctggagatcggcggacggaagcagttggtgccacagggcttcgtgctgccgaatttcccagatattttgggggttcggttgaacccccatgcccgacgccactgggcttgaaatgggccttaaaggctctaagggagctccagtaccaggaatggaagggggtgtggcaaaggctcctgcttccttggaggaaaacaagtcctctgctgatgaggatcttggcagagggcctgccttgactgggaagaaaaggagggactgcaggggttctgcggatgaggacagaaacgtgacaaaaagggtgttgagatccgacgcaatgaagctgcgggctgaggctgaggcagcttgtgtggtagctgtggaggttagtaaaactgacagtttggagaggaaacgctgtgaggctattgtggaggctgagccttgtaatagcaggctgctgatggaagttacttgcaatggtgaggaagccaacgaattggttaacttggactccagtgacgtctcggaagagtcagctaggtgttctgagaataatatgggaatgcctagtgttcctgcaacagattcttctcaagataacggtttaggcacgcaaagtagccttgcagaatcagatattaagacaatgaagtcagatgagaagatgtctactgcaactctttcagagtgcaatgactccagagctggaatgaacagtttgagtgttgatgaggctcaagatgacaaagtgagacatgggccttgtcagggtgaggtcatagactcagcaatggctaatgatgctggcacaagtacaaatttaatcaaaatcagccctaccagcggatcagaatctgttaagcaggagaataatgtggttggtaccgaggaagtgatactccacagtagcgatacgaaagttgagaagcattctcacattgacgatgtttgtacagaaactgagatttctttgactgataatggaatatgcgcagtagataaccacaccgatctaactgggtgcactaagcaggaggagaggggcagccccatgaatgaagccaatgatgtttcatcacatgacattgtatttacaaggagaggtagaaaatcatgtgaggcaaagcagaggacatgtgaagaggaggcacggtttgagaagcgaatcacaaggtcagctacagttaggcagagagaagtttctgcgagctcacacaaaacttccacaaatgaggctgcactagaaggcagagggaggaagggagatattgttgctcactatacaaggaaagtaagcagtgcagtatctccaaaaggtcaccatgctgagctgggagactgtaataccagtatgccgaaacaaacagtgaaagaaacggtggttgatcgaagagactcaggtgtccctgagaatgataatcatgcgaatgtcacagagaataaggagtcagaaaatggaaaggagatcaatttgaagacccaaccacctgtgggaattgttaagaaaacatccggaggaggtgtttctgcggtggatcagaatgtctctggttcagccatcactgagagaaatgatacggagcatactgattctgatggagttaaatcggaaaataaaactcctgtgcagaaaccactactgtctgttggtgcgaagattgttgccagcaagaagaggatattggaagcagagcttgataaatccactgggagatcaccaattgctttgccatccatgaaaaagacaagaaatatgtcttctggtcctgagataaaccaacctgataagtctactggagataaacttattgagaataattgtgattcgggcaataagcgtgttctgagggaacggcagcatcgcaatcaaacaaatttgtcaaccagatattctaatcactctaatcaaaatgatatggagcagacacaggatcaatctgatgatgatgagatcagcagcgatacttcctacaggagaactcgtagcagacgtcgttgtggtgctgcccgtcttgctgtgccaaaacaagaggactctagtgattctgaagattttattgctgtgaaaaagaatcggcggaaacggaagaaatctgtgcataaacaaagggctggatctaagttgaagcatacttctggtccttccaaagcaggtcgtttgggtagacctcctctgatcaaatctgaatctagttccttatctctgcagccaggaaaaggggaaaggaaggtgcctgaaggtacaggaactcttcgcgaagaaaagcaaaaaataagtgatcagataaaggccatgcttctagatgctggttggacgattgatttaagacccaggaatggtagaaactacatggattctgtgtatatacctcctagtggcaaagggtcttactggtcagtcacaaaagcatattatgcgtttcgtgctggtatggaatctgagcagcaggaaagtcctaaagaccagtctttgtcaacaaaatctgttggtagccccgacaaaaggcaggtctctagttcttcaggttatactttaacagaggatatccttagcaaattaaaaagagttgttgtaaacaaacgaacaaccaaattagagattcaaaggttgagacagaaaaggttcaaaaaggaaaagaagaagaagaacgtttcaaattcaagaagcctgcatctaggcaatgaaaggaaaaagagaggtggctgtgctctactcgctcgtggatcgaacaaggagtctggcagcagcactgatggttttgttccatatgaatggaaacgtacgatcttttcctggctgattgatctggatgttctatcagtcaacactaagctgaaatgtatggatggaagccactcaaaggttttactagagggttttgccactagggatgggattaactgcagctgctgtaacgaggtctattcagtgcttgaatttgtgactcatgctggttctgaagtaaataagccatacagaaacatacttgtggatgggctagacattgaccttttgcactgtctcattaatgcatggaatatgcagtctgatgttgaaaggcaagatttctttccagttagcattgagggcgatgaccccaatgatgacacatgtggtatttgcggcgatggaggcaatttgatctgctgtgatggatgcccctcgacatttcacatgagttgtctaggactggaggtacttccctctgattattggtgttgtgcaaactgctcatgtaaattttgccacgaacattctagtgatggtgctgaagacactgctgatgttgattattcattgcatacttgttcccagtgcgaagagcagtatcatgaagcctgctctcctgagactgattccataactaacctttccagtcagacaggcaatttattctgccaacaaagctgcagactgctgttcgaggaattgcagaatcttcttgcagtcaagaaggatcttgaaccagaatattcatgcagagttgttcaacgcatccatgaagatgtaccagaagaagtccttgctttggacaaaagagttgagtgtaactccaggattgccgttgcactttcattaatggatgagtgcttccttccgattattgaccagagaactggcatcaacttgatacgaaatgttgtgtatagctgtggatcaaattttgcccggttggatttccgtggattctatatatttattttagaacgtggagatgaaataatagctgcagcatctgtccgaatacatggaaccaagttagctgagatgccgttcattggtacccggaatatgtataggcgacaagggatgtgccgccgacttgtagatggaatcgaaatgatcctcagctctctcaatgttgagaagttgatcattcctgctatcacagaacttgtggacacctggacatcgaaatttggatttagtccacttgaagattctgagaagcaagaagtgaaatctatcagcatgttagtttttcctggtacaggtctcctccaaaagccattgctaaaggccttgcctaatgaagaacaatgttcccaaggagacaaaactgagaaagcatctgatgtagtcaatgaagattctccttgctctgatgcaagtgctgatcccctaggtttgggggtcaaagagcatgaggacagcagcaaagacgctgatggcacttgtaacggtgacgtttcacaggaatgtccccattcttgatgggaagatttggttgcagttttctaggccccaagctttacatggactaagcctccatttgtttttgcacctcgagtttttgatccagcagttagcatgacatccatccgttgttttactcagaaattgatgattgacgcgtcggcctgggaaaagaatcaacccgtgcagttctgaaaagcgtttactccatccagccagctaacttaatgtgcagctgaaaaatcggcatgtagaagaatgtggaggataacgtcccttcttttgtttctcgtcgttaacttgagactccgagggcgaatgcagccattgaatcgtcgtaaatgttacagcagttgttgttttgttaataggtttttttatgtcttcgctagcgcattcctggaatctaatctcattcctgtaagataattcacatgtctgtaagatcagctaatgtatgcgcaaagctagaaatcatccgcctcatccctgtgttcgttcctgtggaaaggattcgctttgctggaatgtgtttgtttgttcttcctgtgaaggaaagcttttgcaggtcaaatcatcagttcatcaccattaagatgtgcatgcaatacaatgcccctggagaagcaaaatctacaggcaggcaggcgtctgcgatgctggtgctgctaaggttatcgaggatcttgttcttgacatcctgtggaagcggggcggacggccctgccagcctgccttggagcagaactccgccagcgatctgatccccttctccagcgcgacgtgactcctgcagtgcagtgaatagcgtcggcacggcgttcctgtaactgtgtcgactatattttgtcaattcgctacccaagacatttggaacctgcttggaacagctttttatgaatagcttttctgagaa

SEQ ID NO: 22935 - DNA, 2332 bp, Zea Mays
atgctttaaatgtgctgcactttatgtgcttattgcatggtttagttttgaggagtttctctgctagtacaatccaattgactgtacattgatctctaatatttgttgccaatatctttcatagaaacattgaaaaattcctcaagtacagtgtcggttcattggacatgttccatgtgcacattcagtaatcatgaaagcatggtgtactgtgagatgtgtggtgttttccgtgagacctttgtcaaatctgccaaggatggtctgttaaaagccgttgcagtgtcaagtgagcctaggacatctgctgcgtcaaaaaacgattctgccaaggcgccagtgaagactcgtgctgtaaattctgatggtgattctatgagaaagcatgctagcatgtcttatgataaagccaattccacgcagttaccatctgctggtagctcactaggtgctgaaaaaaagaagaaaacccctgtactttctgaagaagtacctgtggagaggatagctctgttggcttccgatggttttcagtcaaagggtaaccagaatagcggggctagcagttcttcgcagaatgacaatgtgatccagaaactctcttctgacgtaggccagctaaatgtaaacaagaacaatgtgaatgttacgaaatcttgtttgcctgatgagtataagcctgagaagtggatgttagctgatctggagtcaagggcgttgagccaactgaaccttgcaatagtcggtcatgttgattccggcaagtcgacactatctgggagattactgcatctcttaggaaggatatcaaaaaaatatatgcacaagaatgaaaaggagtcgaaagaaaaggggaaggggtcatttgcttttgcatgggccatggatgagagcagtgaagaaagggaacggggtgtgacaatgactgtggctgtggcttatttggagaccaagaaattccgtgtggttttgcttgactcacctggtcacaaagattttgtgccaaatatgatatctggtgcaacacaagctgatgcagctattcttgtcgttgatgcttcaactggttcttttgaagctggcatggatggcgaaggaggaaaaagtgttggccagactaaagagcatgctcagcttgttagaagctttggtgttgaacagcttgttgtcgcagtcaacaagatggatgctgttgattatgcaaaagaaagtgctgtagaaaaccaaaatttgatcaaagctccttcagatgctcgtttgacctcctggtatcaagggttttgcctcttggatgctatagattttctgcagcttccttctcgggatgtttcaaagcccttgattattccaatctgtgatgttataaagtctcagtcaacaggacaattggcagcttatggaaaattggaaactggagccatccaaattggttctaaggtgttagttctaccttctgggcaagaggcgactgtgaaagccattgagcgggactctaattcatgcaccgtagcgagagctgctaaccacttggagctgaaggttctagtcctggacatcactactcctattcttgttggctctcaggtggagtttcacatacatcatgtgaaggaggctgcaagagtaacaaaaattgttgcattacttgacaagactggcaaaccaagtaaatcggcacctcgatttcttaaatccaagcagaattctgttatacaggtcacactagatggagctgtctgtgttcaggaattctccaagagccgagctcttgggagggcatacttgaggtcggctgggcgcaccattgctgttggcgttgttaatcggataattggccaagatcagaactagaagacctactacactcttctgaaatctgaaccaaatccttgtcgttgccttgtcgttgctacggttatactctacgtagtagacactggcaacatgatgttgggaaattttgtttagcagctgcttatagccattccattgtattgagttatatgtgtaagatagtagtcacagctgagttgtgttctaacccccggcttttgcaaaaatgctatggaatccttcgaagttatatatgctgactacttgtgattcgtgaccgctgattcgttatcgttcattactatatgtagtggacccaagtaaaacgatgttggcaaattttgtttagcatttgcatatcttcattctcattgtacttagatgtgtgtaagatggtcacagactcagctgagttttgatttctaatccttgacttttttttggagaagtgctatggaattccctcgaaatgctgaagttttgtgatttgagagttgag

SEQ ID NO: 22936 - DNA, 2214 bp, Zea Mays
gcgctccagctggctctcattccgctgccgtcatctctcatcccgtgcgacactccacagcatccatcaactcaacatcatcagctcgcgttgcgtgctcggcccgcctaatcctctttctttagctcaagaccggcgactaaatttggcgccagccggcagcagggggtataagtagtcgccgccgccgtcttcctcgcacctccccgctccgctctcccttgtcgagttctcagcaccggccgatccatcctcctccgcctccctcggttcggcctctggcctgcacaccatgaactctcgcttccggagcctctggagagccatggctggggctttgcagccgccgtgccgcctcggagctgccgcgtgtagcttgctcgctaagcagcagctatagtagctgagcgagtgcgtccatcgatcggagtcgtccacctccgtctccctttgcgattcggcgtcgtgaactcgtgttcttgagcgtgggggcaaggggcagagcaacaaggagacacttcttcttcttctttacaacaaataagaaagcaacggcaatggagggagctggtctgcagtgacagtgacacgagccatggatcccgagccattcgtgcggctctcagttgggcagctcggtctgaagctccccggcgggaacgctagcaaggcggccggccggctctgcgactgcgagatccggctgggcgggttcccggtgcagaccgctccggtgccgctggtccactccccggcgttcaacctcgacccattcaccaacgcggcggttttctccctcgaggaatccgacctcaaggcgctggcggcgccggggtgcttccgggccccgcggtcgtcgtgccttgaggtcgcggtgtactacctggcccgcttcggcgcttcacgctgtggtgtcctcgcctgcgggaggaagcggctggttggcgtgttcagggtggagctcgcttcgtcggaatggcgggacggcaagcccgtgctgctgcaccatgggtgggcgggcatcggcaagggggcggccaggccggagctccacctcagggtgaagctggaggctgacccccgctacatcttccagtttgacgacgagatcgcgctcaacccgcaggttgtccagctccatggcagcatccggcagcccgtgttcagctgcaagttcatccgcgacaggcggccatctcagagtgaccctttgggcggcgggcagtactggtcgagctccagcagcgaggagcaggacatggagatggtgaggcgggagaggaaggcctggaaggtggtgatccacgacctgtccggctcggccgtagccgcggcgtttatggccaccccgtttgtgccggcgccgggcggggacacggtggcacggtccaacccgggcgcctggctcatcgtgcgcgccgacaccacggggtcctcggacagttggcagccgtggggccggctggaggcgtggcgcgaggcggcggcggcggcggcgagcagcggcaaggacacggtgcgcctgcggctgcacctgctcccggaccgccacgacgactgcgtgctcgtgtcggaggcgcccctgagcagcgacaagggcggggagttcttcatcgacatggacaggcaggcgccctccgccacggcggcggagcactgcgcggcgagcctgggcgccgcgtgcgccggcggcggcttcgtcatgagctgcagggtggagggggaggcgaggagcagcaggccgttcgtgcagcttgccatgcggcatgtcacgtgcatggaggacgccgccatgttcgtcgcgctcgccgcggccgtcgacctcagcgtcaaggcgtgccgcccgttccgcaggaaaccgaacaagaaggccgcctcgccgtcgcccgaccacctcgagctcgacacctaggaacgcagaacaggaaggccccgccgactagcacccatggccgcccatggatccatctaactcgacctgtaaattcacttaatttcaagagctggactgaatcgtttgccacaatcaaaactctgttgtttgactggcctcagcagttagtacatgtttggaagtaaattaattttacagtcataatttatagaaatccaatagtacttcgcagtgaccgtgcgctgcaacaacacataatcatatttgatagccataaaaaattaatattgtcgggtaccgtaattaggggtaccccaaca

SEQ ID NO: 22937 - DNA, 721 bp, Zea Mays
gcgcgaaggctccgacggcgacggcaagaaggtggatccccgctgccccaacgcgcccaacccgttccacgtctgcaccgaccactgcctcgccaagatatccgaggccggccgctcgtcggagggagccaagtcgccgatctcgctcttctcccgccactcccgccgctcctcctcgtcctccgaagatggcagcgtgaagtccgcggggagcaagaaggtggatccaaggtgcccgaacgctggcaatctgttccatgaatgcggtgagcattgcgccgccaagatgcagcggtcggagcagcagcacaagggggtcaatctcaagtcaccgcgcaggaaagtggggaagaacgctacagcgatcccaaactggaaggttgatccgaggtgccctaacgcgtccaatccgttccacatgtgcgcccagtactgcttcgaccatctgagtgaaacagcgcagacaagtgcagcaaagtcagacaagagacgaggcaagggcgtttctgaagacgagggaagaggagaaaccaaaaccaaccctggttgcgccaacgcgtccaacccctaccacaagtgcggtgaccaatgcaagagaaagggtggtggtgataggtagaccgtagacgaggaaggctagtgaagttcctctgccaaccgagtcagtcgttcactcatttgttatctttgagtaagagctgctgctatattgttagtggcg

SEQ ID NO: 22938 - DNA, 895 bp, Zea Mays
ttgcatttcactgcgagttgcgaccgccaagttggtccacagttacttaacagtgcgggtcctatctgtggtgtgccagacttcaagatgaggggaaagaagagtgatgagctcgaacctgtcgatgctggcgatgaagatgatgatggtggtgacgatggggacgaggatggtgactttggggaggagggtgaagaggacgtctcagaaggggagggatatgacaacccaaagggcaatgagaccaagaagcaaagaggtgatcctgaggaaaatggtgaggaagatgaggaagaaccagaagatcaggagggtggcggcgacgacgatgatgacgacgatgacgatgatgagaacggggatgacgaggacgacgacaatggggatgacgatgaggagggtgtagatgaagaagacgatgaccaggacgaggatgaggaggaagatgatgatgaagactcgctccagcccccaaagaagaggaagaagtgaagatcttctgccgctttagttaccgtgcgctgagttctgcctggcttttcgtcatatcctcgcatttcaactttcccatagagagttaagaaggatccacacgttcagcagcacgtgtgggcttgtaggagctttatgatttgaggcaattagggacaactcttatgtcattgttgcttgcttctgtggagtcgaacagatgtttcgctaacataattcgacttgagtgatgaaagcctccagattgaatatgccttctcttttatctcgtatggaatcattgatgcagccctggttgatagcgttccttcaataaatgaattatattggcatcatgacagcttcatgtgaattgcacgtttatactgtgcgttcaaatctcaactaatgtatgactgatcgg

SEQ ID NO: 22939 - DNA, 3227 bp, Zea Mays
cgcagaaaagatagctgtagacatccccggaagaaatggtcccgtgcgtgcgctcactcctttgctgtttttcttctctccgttcaccttgcgtgcgcgacatctagggcgaccgccgccgccgccgccgccctacgcccagcagcccaggtcttcgtcgcgccctttgccggctacgagcacccaccacaccagatcactgtaatccaggctgaattgtggctggtattggcgatataagcattcgttagctgtttaaattgtgtcttttgtctttgattaagcgtcattggaaaggctgtcatgagaaaactcttttgttcaaacgtttctctcctgtaatatgaatgtactgtgacaatccttcatcctatgctagaatcacatattttagcttctaagctccttacagttctttacaagtttcttattcaaccgaatacctaatgcattaattcggtgcttgtgacaagcattcatgcaaattcgtggatattaattcagaacctggtggcatattaatcttggatacttggtcaactgcaaacttgaagattcattttcatgcaatcaatggagagcctagcgcaattagaggtgttgtgtgaaaagctttataattctagagactcggctgagcgagcgcatgcagaaagcaccctcaagtgcttctcagagaacagcgagtacatttcgcagtgccaatacatattggacaatgcctcaactccatatgccctgatgctggcgagttcaagcttgctgaagcaagtttctgaccgcagtctttctttgatgctccgtctcgatatacggaattatgtcataaactatcttggcacaagggggcctaaattgcagaactttgtcattgtgtccttaattcagctggtctgtcgaattacaaaatttggatggtttgatgatgacagattcagagagactgtcaaggaagcgactgattttttaggtcttgcttcccaggatcattatttcataggcttgaagatactaaacaatctcgttacagaaatgaatcagccaaaccccgcgatgcctttgacgcttcataggaaaattgcgggttcattcaaggatcagtttcttctgcagatcttccaaatttcgttaacctcactaaaccaactgaagagtgaagctccggatgactttggacatattcctcttgaccttgccttgaagtgcttatcttttgactttgttggttctccggtggacgaaagctctgaagaatttggaacagtgcagcttcctgcatcttggaggcctcttcttcaagatccttccacactccaaatcttttttgattactacaaagtcaatgacatacgggtttcaaaagaggccttggagtgtctggttcgacttgcttctgtcaggcgcagtatttttgtggaggatcctgcaaggtcccagtttctttctcatctgatgctaggcaccaaggagatacttctaactggccaaggacttgctgatcatgacaattaccatgagttctgccgtcttttgggacgtttcaaagtgaattaccagctggcagagcttttgaatgttgagttttatggtgagtggattggtctagtagctgaatttacaactagatccttgttgtcatggcagtgggccagcaacagtgtctactaccttctaagtctttggtcaaggctggtgacatccgtgccttacttgaaaggtgaaacaccaagtcttcttgatgaaactgttcccaagatcacagaaggttttatcacttccagaattaattctgttcaggccatccttgctgacaactcactggaaaatcctttggatagtgtggaagttctccaggaccagctggagtttcttcctttcctttgcagattccagtaccaaagtagtagtctgtacatcataaacatcatggaacctcttctgcaagcttatacggaaaggtccagattacccgctcctggtgatgctgatgagctgtctgtcattgaaggccaaattgcatggatggttcacataattgcggccattgtcaaagttaggcagtcaagaaacacaagagttgattgacgcagaactctctgcccgtgtactacagttgataagtgtgactgatacaggagcgcacacacagagatatcaagaattaagtaagcaaaggcttgaccgagctattctcatttttgtacaaagtttcagaaggtcatatgtaggagaccaagctatgcattcttcaaagcagttgtatggaagattgtctgagcttctaggacttaatgaccatttaattctactcaatgtgattgttggcaaaattgctacaaatatgaagtgctatgctgagagtgaggatgttattgatcatactctgtccctgttccttgacttggcaactggctatatgactggaaagctgctgcttaagctggagagtgtaaaattcatcattgcaaatcattctccagagaatttcccatttcttgcagaatacaaatgttcacgtagtagaactacgttctattacatccttggctccttagtcttcatggaagatagccctgtgaaattcaggactttcatggaaccacttcaacaggttgcattaaacctggaggcaactcctgatgctgcttttcggactgatgtcgctaagcgtgcatttgttggttggatgagagatctacgtggcatagctatggcaaccaacagccgcaagacatatggcctcctatttgactggttgtatccatctcgcatgccacttctgctgagagccatctcactttgcactgatgaaccagaggtcaccacacccttgctcaagttcacgtatgaatttgttttgaacaaagctcaaagactgacatttgattcatcatcaccaaatgggatccttttattccgagaggttagcaagataatcgtggcttacgggtcacgaattctattgcttcctaatggcacagacatttatggaagtaaatacaaaggcatatggatctcactgactgttctttcaagggctttgtgtgggaattatgtcaattttggcgtatttgagctctatggtgacagagcacttgctgatgcccttgatatatctctgaagatgaccctctcagttccattatctgatatattggcattcaaaaagaaaatcatctcctctataagaggatactgccttcacagcccgtgcttcagcaagtacc

SEQ ID NO: 22940 - DNA, 5394 bp, Zea Mays
taggtgtagagacccagacctggacccaccgcggcggcactccagtccggctggctgcgcgtcttgttttatggggtatccgcgcggcgctccggttcgcccccaaatctcattcccatgggccggaagaagcgaacctccgcaccaaaccctactccgccaccgctggacgcctcccgccggtcgccggcggcggcggagaagccagccggcatcggcagggaagatgccgccgtgcgcgccgaggtcgacaaagcgcttgcgtgcctgcagcggggcagccacgcgcgtgcgcagcgcctcacgagggacgccatcgcccgccacggggaggcctcaccgctgctcctgcgggcgcacggcaccgtccacgctcgcgccgcctccgtcctcgacgaccacgccagccgcgcgcgccaccagcgtacagcgctccaggcggcccagcgcgccgtccagctcgcgccggactccatcgagctggcccacttccacgccatgctgctcttcgacgctgccaccgactcccgcgcctacgatgaggtcgtcgctgagtgcgagcgcggcctcagcatcgaggccccctccgaccccgcgccccactccctcaggttgcccggccccgacgtcgaccaggtccagtccgagctccgcaacttgatccagaaggccaacctcgcctccatctcctcttgggtcaaaaacatgggcggcgcgggggacgacaagcttcgcctcatccctgtgcgccgtctagcggacgagccaatggaggcccggcttgtccccacggcgccctccccgcgccgcccaaacgagatcaagaaggcgaccaagaccaccgaggagcgccgccaggagatcgaggtacgcctggctgccatgaggctgctgcagcagcagaaggagcagagcaatgatgttgtgtctgctacccctgcctcttcccggtcacatggagatgatgccccctcatcgtctgagtcatcggtgggcggacatcgagctgaccggagaaaaggtgggtctaggaaagcaacaggctcatccgcgtctgagcgcactgaccaggtgcgtgcctactggggctcgataccagtggagcaaaggcttgcattcttaaacactagcatttctgagctcaagtcacactatgcttctgcaatgcacaaggagaaagatgctgccagtgcagcatctgatgtgctcaatgaggtgatacaatttgccaacaagcatgacaagtgggagttcatggtatgtggtaggtgtcgggagcagtttacacatgtggaggcacaccggtggcatgtcatggttgagcatgttgggctactctcatccgagctgcaggaaatggttccgcaggagattgatgctgactgggcagaaatgctcagtggttgcaactggaggccattggatgctactgccgcactgaaactttttgaggaagatcaacacaacaaccttggaccagatagggaggatgaatcgaattcgttagatagttggagtaacaaagccatggacatgtcagaatcctcagcctggtcacacaacgaggagtctagcggttttggagtggtggtgagggaaggtgacaccaagtggccattctcagatgatgacgaaagggccaagattttagaaagaatccattcatcgttcaaaatccttgtgaagaaccataatctttcagtgcacaatctaaacagggtgattcgatttgctgtagaggaactcagggggttgccatctgggtcactactgcttaatcactctttggacgagtcgccactttgcattcgcttcttggaggcatcatcactgcagaaagtagataatttcttgcaggacttaatgcaggcttctggacttaataggaacttacagaaggctgaaggattaggtgacggggatagtttcatccaaaaccacgatgtactagagaaggttacccttaattctgattcatcagaactgatcattgatgggcacaccttcggcggaaagtttgattccgagagtgttgatactgatgcattgctttcatggctgtacgccggatcttcaattggtgagcagctattggcctggaatcgtatgatcgacgaaaggtcaaatcagtgcgtcgaccttattcgagcacttgggagggagttcaacaacctgcaaaactcatgtgaacggaaacttgaacagctgagaaatgaggatgcctttacttctgtggagggcctcttttgtgaagagcaaacacgaagggagcaggtgggacggtatggattccaaactttcgaggagctcctcaggaagcggcaggagtttttggaacacaacactgaggagcagtccgacagtaacagatctgagatagatgcaatctcagctattttgaaggaacttcacacatcacactttggttatgatgaggcccttactggcatggccccacgcttttctgacttcgatgggggcgaagaagatgaatggaggctgcatgattttatacatccaaatgattcaatggtacacatggttgtatcaaagatgaaggaacatgttactatggagattagcaagatagatgctaagattatgcgaactttatctgtgatgcggcaactagagcacaagcttggacctgtttctgctcttgattatcgaatgattcttttaccccttatgaggtcgttcttgcagagccatttggaagagctggtggataaggatgcgagagagagatctgatgctgcaagggaagccttcttggctgaacttgctttggatgctaagaagaatgcaagcaaagggggtgatatgaaacaatcccatgaaaaatcaaaggataagaagaagtttaaggattctcgtagggcaaaggagttcaaggattcaagctggagcgaccagtctctcattcaccaagacagtgctgacgaggaaacaacagagacatttcaaattcttgctgattgtgatgatctggattgcaaattctccacaagtgatgattacttcaatgaacaagaggaagaacttaggcataaggtacaacttgaagcagaggaacgaaagctggaagagactctggaatatcaacggcggatagaggaggaagcaaagcagaaacatcttgcagaacaatgtagaagtacttatgcatcttctgtaattggtacagctcgtctttcaagcactgggaatcaggataaccatgaaagtgcaatcaatcactcttcccgtacttatctcgaaggcataaagtttggtgattttcgctacaccgagaacaatttcagccagaaacttaatggattggattcatctgatgcacatgcattaaccagcagtgatatgaatgctcctagatggaccagcacttgtaaaatcgctccctacgcaaaccacagctatcaaactggaaaacaaaatcggctacatgtgttgccttcagatgatctgcaatttgctcatagagatcacgctgcaggaacagagaagccaaattttgagaaagttggcagtggtgcaataccatcagcggatttgtgcatcaaggatgattttgataaaaggtttcaagaagatcttgatgaagcagtgcgccaaagccttggatacgatgcttatcctgctggtacaataagcacttcaaatgaaacagaagtgtatggcactggccttaaaaatgccgctggtgaatacaattgtttcttgaatgtgattattcagtcattatggcatataaggcggtttcgggacgagttccttaaaacatcatcactgcacaagcatgttgaagatccttgtgctgtctgcgctttatatggtatcttcattgacctgagcaaagcagccaagggacacggagaagctgttgcgcctacttcattgaggatcgctttgagcaaatcctacccgaacagcaaattctttcaggagggccagatgaatgatgcatctgaggtactgggtgtaatctttgagtgtttgcataagtcatacacttcgcgtactgtctgccatggtaaacctcatgagaagaattctattggatcatgggattgtgcaaatatttcttgcatagcacatagtctttttgggatggacgtatatgaacggatgaactgtcacaattgcaagatggagtctcggcggctcaaatatacttcatttttccacaatattaatgctagttcactccgaaccgcgaagatgatgtgtccagattcttcatttgatgaacttttgaaggttgtcataatgaatgatcaactagcttgtgatcaagacgttggcggctgtggaaaaccgaatcacatacaccacatcctttctactcccccacatgtctttacagttgttttgggatggcagaacaacaaagagaatgtggatgacatatctgcaactttggctggtatttcaactgagatagacattagcatattctaccgtggcctagatcaaggaagcaaacacaccctggtgtcagtggtttgttactatggccagcattatcattgttttgccttcaaggatggacgatgggtcatgtatgatgaccagacagtcaaggttgtaggtagttggggtgatgtgctcgtgatgtgtgaaaagggtcacttgcaaccccaagtgcttttctttgagtctgcaaattaatcattcttcagagtcgtaaagtgttgtgcagtggttaacatgccctcaaatatagggtttttacctgtggccgtgaagattagaaatagagtagcaaattcgttttgagcgggggtatagagtagcaaattcaacagctgcgttggtctctgagctttggtcgagcccctcgtaataagtagtcacctgaggattaaaggagagctgtttacccctctgtttttttaacctttggtatacttgctgaacttcggatccttcatctgccaatgagatttcactgccgatcaagttggtggggacgcattcgacatgaactgccatccaacaattctagccggatctgcctaaagctcttcattatgcaccagttatgtatagaattttgtgcttacaatgaggtgacaggtataggagtgtgactgttttgaggccagaaggtttagagaatggaaggaaatggaattgttggtgcggtgtgtatctgtggagtactgtttgaaaagaggaacgatatctggaatacggtagactttgagaaatctgtagtacacgagtctatgtaaacagggactcgatgagattatgtgagatgagtatagcgatgaataccagactccttatcactactgtttttatagttaaattcttattttttttatttagctaaagattgcgcgcctaagatataaaagaaaccgttgaagtgacaaaagactcaga

SEQ ID NO: 22941 - DNA, 635 bp, Zea Mays
aggagatctacgagtcattacattaagaagaaagaaacagataagtccagcaaggctggataggatacactaaacccacacccactcacaaaacctgaaaaactagccaaaacaagcaaaggcttagaccaggaccaaccgaaaactggtgggaaaggatgcgacaagatcaactttagtctaagattggtgcctttctaagatcggcgtctatcaaatgtttatactcatatggtttgataagtgatggtttctaaacgtttatgtggaccattttcaggcagatatcacttgactgtatgttcctggagtcccagtctatcatcgattatagcatgctcttggggatccattttagagctccccatcacctgaagacatcctcatcacatcagagcagtcttgaaagatgcggaattccagatagtgatctgttgcagtatgaggaaaaaagttcctggaagggatttttgcttgttgctcatgagccaggcgctacagttggtggttcccacataagaggaagtatggttagagcatcggaagctggttatgaagaagttgatcttgttttgccaggcaccggacggtaactgtttactccggaatcgtaccatcccttaattcatagaatt

SEQ ID NO: 22942 - DNA, 1755 bp, Zea Mays
ccttgaatgacaggacaaagaaatgtttgttggaaacccttaatgagaatttgcgtcatcccaattctcaaatacagtgtgctgctgttgaggcattaaagcattttattccaacatacctggtatcttctggtgaaaagattgctagtgatattatctcaaaatatgtggcacttctagatgacccaaatgtggctgcaagacgaggagctgcactggcccttggaatattaccattcaaattcttgatgttgaaatggatgcctgtcatgagtaaactctgtagctcatgcaccattgaggataagcctgatgaccctgatgctgaagcacgtgtgaactctgttagggggctaatttcggtttgcgaaacactaacagcatcttttgatcagctctcaaatggagattctctatatgcatacataaaagattatgtcatgcgagctttatttagagcactcgatgattatgctgtggacaacagaggagatgtgggttcttgggtacgtgaagcagcaatggatgcgctagtacgatgcatgttcatcctctgcaagagagatattgttgctttgagagcagtgtcagccactggccatgactctgaactgggtgatatggaagtaaatgcaagtagtactgcataccggctatttgattctggtattgcacaggatctggtagcaggcattgcaaaacaagcagttgagaaaatagataagataagagaaatagctatcaaaaccctgcagagaattctgtaccaccaggaacacctcatcccatttatacctcacagggagttgcttgaagaaattattcccaacagcagagatttggagtgggcggttcctactgtgtcatatccacgattggtgaaacttcttcaggttagctattatagcaagtctgtgctctcagggctcgtgatttctacaggtggtttgcaggagtctttgaagaaagcttcaatgtcagctttggtagggtatctccaagattcagacatcaatactaattgtgaagggaaaagtagagagtatctattgagttgtgatcttctatggggcctccagcactaccagaaatgtgaccgtgtaattactcccatgttcaagactattgaggctctcttcagtaaaaaggttttcttgaacaaggaggggtacagtgagttctacagtggactggtagattccgtgagctctgaactgaagggatccaaggattttacaaagttatgtgcaggtctctcgatccttgggtacatttcttccgagtcagatggaacttgcaccaaggcattttcccaactcctcacattcctaggccacagataccccaagatccgaaaagctgcagccgaccaggtgtaccttgtgctgctgcaaaatgatgaccttattgtgtcggagaatatggataaagcccaggaattacttgcggagacgtgctgggaaggggatgtggaggaagcaaggcgtaggaggtcagaaatcaacgagatggctggttttagggtcaccacttcacagaagtctggaaagcaagaaactagaacggtcgccgcttcgacggatgagaacagatcttattcgtcattggtcgatttcagcggatactaaagatcgccttacatcctattttcgacgaaaggtgtcgattgtactagtgcacaatgccgaatatcactaaacgtttgaatgagcggggttgcttgtggattttcttttttttttttttcaatgacag

SEQ ID NO: 22943 - DNA, 1158 bp, Zea Mays
tctgtcacaagggacttctcgattacaagcatgaaaggaggttaccgccgcgtactccaacgccctattgattttgaatgggacctgatgacttacacagatgacaatacacctttagtaccaactgatttagatgttctatcagaaacccagttatcagaaacaaatgagccattatctgatgggacttgcagttgtccatcaagtgattccaggttgcaagttttattggacacctctggaccaaccattgaagctagctcagtagaaaccaaatcaattggcatctcagatctgtcaccagagaaactggctgtgaaattagaatttactctaccagcatcatcttatgctacaatggccataagggagttgacgaaaacttcaacttcggtgacttcctgttcaattcttttttttggttttgtaaatacttaaattatctttgctactcttttttttcatcttttggtcattgaaccgaaccatttgagctccaccacgatcacataattttctttagggcatctcactcaatggtttctctttgacagactattatcgtacaaaacaatgtattcagtttgcactccaatgcttgaactcatccaccaacatcctctcttatagccataatgttatgttttcctttggtaatgtacaggttgcttgccagaaaacattaaacggctgaccaagccttgcagtgtaaaatgctttcttcgcaagctggtatccattgtgacaaaacacaccatgtgggtttaactgggcccaggggatggaaccaagcttcggaaaagaaggaacatttcggttctttgctctcactaggaatgatgttccatgattttttagaaaactggaacaggtgttggtctgacatacatggatgtaaacttagatgactgaaaagtagctttaccttttgcagacagatctttttgtctttagtttatgcatcgtatattgtgatgtctgaactggggtcgcaacctcgtgggcatgcacgtatggccatgcacttctttgaggcgtgcactacctcataacgttcacgtccttaccagcactgggtcattttgtggacggcaatcatatcctgaaagaatatgcatagcgagcaacagaagctatccattctgtgttcgctctgtc

SEQ ID NO: 22944 - DNA, 1774 bp, Zea Mays
ctaccctcccacctgcgagactgcaacgccgttgcttcaactcgactccagcatccctcgtccccgcatcaccgcgccgccgacactccgctcgctttcgctcccgagacccgggcctgccgagccgccgccatggacgaggagtacgacgtgatcgttctgggcacggggctcaaggagtgcatcctcagcggtctcctctctgtcgacggcctcaaggttctacacatggatagaaatgattactacggaggagattccacctccctaaacctgaaccagctctggaagaggtttaggggggaagacaagccaccggcacatctaggtgcaagcagagattacaatgtagacatggttccaaagtttatgatggcaaatgggacattggttcgaaccctcatccacactgatgtgacaaagtacttgtcattcaaagctgttgatgggagctatgttttcagcaaagggaagatttacaaggtccctgccactgatatggaggctctgaagtcccctttgatgggtctattcgagaagcgcagagcaaggaacttcttcatttatgtccaagattacaatgaagctgatccaaggacacatcaaggattagaccttactagggtgacaactagagaacttatagcaaaatatggtttaagtgatgatacagtggatttcattggacatgcacttgctcttcatagagatgatcgctatcttgatgaaccggcacttgatacagtgaaaaggatgaaactatattcagagtctcttgcgcgctttcaaggaggctcgccatatatctatccattgtatggtctgggtgagctaccacaggttgaattcgatatggaggggaaagtgtgtggtgtcacatctgaaggtgaaactgcaaagtgcaagaaggtggtctgtgatccttcgtatttaccaaacaaggttaggaagattggtagagttgttcgtgcaattgctatcatgagccacccaatccctaatacaaatgagtcccactcggttcaaattattttgcctcagaaacaacttggacgtagatcagacatgtatgttttctgttgttcatacacgcacaatgttgcgccaagagggaagttcattgcatttgtgtctgcagaagcagagactgataacccgcaatctgagctaaagcctggaattgatctacttggttctgtggatgagatattatatgatatttatgacagatatgaaccagtgaatgaaccatctcttgataattgctttgtcacaacgagctatgacgccaccacacattttgagacaactgtaacagatgtcctgaacatgtatacaatgatcactggaaagactgtggatcttagtgtggatttgagtgcagctagtgctgctgaagaatactgatttcagtcataatgtttatcaaagatcacatcattggggacagcacatgaccaaacttcaatgagtggctagtatgagtttagtcggttccagattataccatgccgacttctactgtacctcgtgaatcgtgatgtctattgggcacttgttgctgacagaactgtgcacaatgttgatccaatttgatggatggtggtggttctgttatttactagtcggtcaaaacactaaacggtggccatcatggctgtgtgatgtatcataactgttcagtaaatttgtgttcttctgcccggagttctgctcgatgctattgcgggcggcccgaggtgcttgctctactgtgaatgaatgaagtttgtca

SEQ ID NO: 22945 - DNA, 2170 bp, Zea Mays
acgctagctctgtatgcaaacatgcctgactcgcccgttcgcctatctcgcccccccccccccccccccccagcatcggagaacggagggaaccagggagctccggccgcctagaaccggagctcccaaatagatcgatccatcggtcgttgagcggacacggcaatggaagcccacgcctcgcggggccgccgcaccctggaggagatccggcagaagagagccgccgagaggatgcagcacgccctcccgatcgcggcgtctcacgtcgactctcacgggaaccaaagagccggagctgagcttcttgctcgagttcaagaacttgaaaatgggaacacggaattgattgatgagaagggagttgagaaggatgcccttgtaaaccgtttgaatgatctcgagcggaatgtagttccctctttgcaaaaaaacttgaatgacatttctttggagaaagatgctgctgtagttgctaaggaggatgctctagctcaactcaggagcatgaagaaacggctcaaggaagcagaagaagaacagtataaggcagaagaagactcagcctccttgagagcacagctaaacaccctgcagcagcaagtaatgggacactcttacagtggatatacaatgggaatatcgactgaggaatctgttgccatggaaaaggagatacaagatttacaggcacagctaaagcaagagtcactgctaagacaacaggagcaacaaaaattagctgaagagtcgcagctgaggcaacaagagcaagaaaaactagccaaagaacaaatccatattgcttctctggaggctgaaaagcaacagctggaagaccaaattactatgttgacaaagaaagctacagaggacgcttctgagtttgctgcacacaaggcattttcaatgcaagatagggaaaaacttgaaaaccagttgcatgacatggctttgatgattgagaggctagaggggagtcgtcaaaaactgctaatggagattgattctcaatcgtcagaaatagagaaactgtttgaggagaattcggccttatctacttcttatcaagaagccatagctattacagtacaatgggaaaaccagaaaattccaggttagagattgtctgaagcaaaatgaagagctccgttctcacttggagaaactaagacttgaacaagctagcctgttggaagtaagcaatatcactaccaaatcagatggacaaattgaaaacagtatctcaaacctaccagaaatggtcaccgagaatatttctctgaagggtcagcttataaaagaacagagcagatctgagagtttgttggcagagataatgaaactttcagctgagcttaggaaagcagtccaagcacagaataaccttgtacgcttgtacaggcctgtattaagagacattgagagcaatctgatgaaaatgaaacaagaaacttatgcgacgatccaatgatacatggtgtcaaactcaatccacgatactgtggaatggccgcatagtcacaagctccaccgtaggcctggttcggttgcatctgaattggaggtgattgaatccccttctattcaattttaactagggagagatttaatcccatccaatcttctctgatccagacgcaaccaacaagcccttgctcaagatgctggtgaatgtattggtctcatgccattttcaagatgctggtggaaagcagttctttcggtggctaccattcataagtagagttctgtcgagatcgttcaacctgtatcatactcttgtatacccgattcccaccggttcatcttataaactgggggcaaatggagaaaaagattggttagggcttgtttggtgaaaaagattggttagggcttgtttggttacaacttacaagggaggtggaggggactggagggaaataaactaatttttcccttaatccccacatttcccttctaaccaaaacaaattattatccctgctctcagtccacaaattgggcgcaacaactttttaaatcatgtcatttgcgtccgcatgttcgtttggccgttggatgggtccgcatgtagggtgtatttggtttggtgaatgaggtggtctatttctctcttctcacttttttatttggtttgtgaaatataatagttaatctatcattat

SEQ ID NO: 22946 - DNA, 1781 bp, Zea Mays
ttcctctgtaacccaccagcacacccatccgccagccctcctggccccattcctctctctcccctccctcctctccaccgccaccgcttcatccccttcatctccacctcctacgaggcggccgccgcctccatgctcggccgcgaccgcagggcctcagctctagcagcgttcaatactgtaggctagcggagaggtgggggatggcgaagccttcgacgaggctgcagaggcgctcgccaagctcagggacgccgagcttggcccccgcaaggacaggaccggcgacggccgggagaacaagcgcagcacggaggccgccgtgccggagcacttcctttgccccatctcctcagagatcatgagggatcccgtcgtcctcgcctccggccagacgtatgatcgtcgtttcattcaagaatggttaagcgctggaaaccggacatgcccacagactcaacaagtcctttcgaacacaattatcaccccgaaccaccttgtgagaagcatgatctcacagtggtgcacagacaacgggatcactctgccaccggttgagaaccaagatgaagatctggttacaaacaatgagcgggagacatttcgtaaactgtttgagaggatcgtatcgtcgtcgtcagacctgtctgagcagagggaagccattaaagagctcaggctgcggactaagtgcaacagttcactaagagcagcgataggagagagaccggattcaatctcgcagatgatttccgtagcgtccagcccagagctagaaaacagtgcagaagttgtggaggatacggtgacagctatccttaatctctctatccacgagagcaacaagaagatcattggagacgacccactggcagtcccgttcctgatcaaggccttacagtcaggaaccatggaggcccggagcaacgccgccgccgccatcttcagcctatccgcgctggacggcaacaaggcgaggatcggcgagctcggcgcgatgaggccgctggtggagctcctcgagcacggcagcacggcagcgaggaaagacgcggcctcggccatcttcaacctgtgcacgctgcacgagaacaagtcgcgggccaccaagagcggggccgtcgacgtgacgctgagggccgtcgcctgcgccggggacggctctggctccggctcgctggtggacgagtctctggccgtcctcgcgctgctgtcgggcgaccacgaggcggtggaggaggtcggcgagacgggcggcgtggcctccatgctccacgtcgtgaaggacgacccgtgcaagcgcaacaaggagaacgcggcggccgtgctcttcgcggtctgcgtgtacgaccgcaccaggctgcgggaggtcgccgagcacgagaagctgaacgggtccctgggctggctcgcgcggaacggcacgtcgagggcgcggcgcaaggccgccgggatcctcgacaagatgaagaggtccatgcaccacccgcactactcctgctagtgctgccgccgtggctgtgtgtgatcagggggggaataagggtggtgtgtgttgtgttggactgctcgttgctttcgcgctgtatatatatatatatatatatatatatatatttcagcctgcgtatatagctctatactcttggtctctgtggtttggtacatatatgagggtacattttttttccgtctcgcggagtaagtggtggtggtttccccctctggaacgttcttgttcgtctgaaatttgcacttgatatgtttcttcagggtctttg

SEQ ID NO: 22947 - DNA, 4733 bp, Zea Mays
ctgcccgcccgatttcgcctcggacctcgtcgtccatggtgtgctttttcttcgtggcgatttgctgcgcctcgtcgccggcgaccttggcgcttgcaggcggccgactgcagtagggcaggtctgcttccacagacgtcttcgccgtttgagaggtggcgcccacctccaccgtctcgtctgctgcctgctctagtggtgccggacctggggtggagcggagatccacaagggcttggattgctttcgttgtcttgctggctttgaggtggagatgacactaagttgaaatttttatcacacgaggaagcaagaacaggaaaaaaaatcacatttcagtgttgcactctgtggagggttcattgttggtccaccaaactactgcagtgctggagggtttttgttgaagtcctcttcatgttcaccatttctaaattgtcataggctcatagcattgtagctgatcagtcttcaagatcttcctatgagtacatagataaatcatcatcgtatctgtgttaagtatgccaccatggtggggaaaatcttcatccaaagaagtgaaaaagtctgccaaagaaaacctcatcgacacatttcagcgtctcataagttcaaatgagcaaaagggaagcagaaaatcacgaagtagtcgtagacatggtaaagacacagctggtgacaaaggttgctggtccactgcccaatcccgctcaacatccccttcaaaagaggtctctcgatgtcagagctttgcagcagatagaccacatgcacagccacttcctcttcccaaatcacgtgctaaggtgacacgtacttcttctgatattaccaactcaaagtccactttggaaaagcatggcaaaggacaactgcttccactccctccaattcagcctaaaaaaagacctgaagctactgaacctgttactgaagtagctactgcttcggtctccagcaactgttctattgacagtgatgatcctggtgattctcagcttcagagtcctgtgggaaatgaggctgaaaatgcgactagaattactgcaacaagtagttcaagtgttgtgcgcaaagaatgttctagtgctattaccagaaagaacacaaaggaagttgcaaagccaaacagtgcttttctcagtaaccaaatcctgtcaacatctccaagaggtacctttgctgatggttatcaatccaatttacaaagcccccgacagattgccctggagagtgctccgaatagtttgatgtcaagtccttctcgaagcccaagaaatatatgtcctgttcagattccaacttcagctttttgggcaataaaacctcatactgatgtaactttccttgggtctggtcagtgctccagtccaggttctggtcagacatctgggcataattcagtgggaggtgatatgctaggcccaatcttttggcagcctagccgaggtagtccagagtgttcaccaattccaagcccaagaatgacgagtcctggtccaagttctcgggtgcatagtggaagtgtctctcctttgcatccaagagctggtggggtcactcctgaatccccaacaaatcgacatgctgaagggaacaagaagcaaacccacagattgccgcttccgccattaagcattgctaatagttctacctttttgccaaacagctctaacccaactagtcctatatctcgtagtcctggtagaacagagaatccaccgagtcctggttcacggtggaagaagggaaaattgattggccgtgggacatttggccatgtatatgctggttttaacagtgacagaggtgaaatgtgtgcgatgaaggaggttacccttttctcagatgatcctaaatcaaaagaaagtgcaaaacagctctgccaggaaatatcacttctgagccgactgcagcacccaaacattgtgcgatactatggatctgaaactgttgatgataagctttacatatacctggagtatgtttctggtggatctatacataagcttctccaagagtatggacagtttggtgaacaagccatttgcagttatactaagcaaatacttttgggcctagcttatttgcatgcaaagaatacagtacacagagacatcaaaggcgcaaacatattggtagaccctaatggccgcgtgaagctcgctgactttgggatggcaaaacatatcaatgggcagcagtgccctttctcatttaagggtagcccgtactggatggctcctgaggttataaaaaatgctagcggatgtaaccttgcagttgatatatggagtttaggatgcacagtcctagagatggctacttcaaaaccaccatggagccaatatgaagggattgccgcaatgtttaagataggaaacagtaaggagcttccaccaataccggatcacctctcagaagaagggaaagacttcataagacagtgcttgcaacgtgatccatccagccgtccaacagcagtggatcttctgcagcatccattcgtacaaaatgcaccgccacttgaaaaatcatctgcctctcatccactggaacagttgacggctatatcatgcagaacaaattcgaaggtggttgagcatgccagaaatatgtcctcgcttggtttggaaggccaatcaattttgcagagaagagctgccaaattttctttgccaaatagccccaggactacttcgggtgcttcaactcctctgactggtggtagtggagctgttcctttaaaccatgtgaggcaaccagcttacagaaatgagggcttcacggtcacatcaagaggttttgatgaccacatgcctagccggcctgttgatccagtacatggacgttttattcgagtgcagcaattttccgtgggtcggcaggagagggtagtctctgaagttgacattctgagctctcaatatggaaagatgagacatgcaaatgtgtgggatccgcatgataggccattaccttctgagcgttcctctcaacagtgctttgggaatcatgcgaagctaaaaccttcactggacttgagatctggtcctcggcaacctgggcgcaatcatggccattgattctgtagcaaaagttaatggataagctttcagtcgtgtctatgtgatagctagtggtcctaagctggttcactgaaacctttaattgtatcatagtagaagatgttcattaattatttcagatgctgacagttggcagtggataaagattctcaaatgtcaatctcatattcccattactctaaagaaggaaggggatgttgtatactcaaggacccaaaacagtgactctgaacctgtatactcttactctcgtatctacaacaatttagttttcgttttcttctatgggtttggaggccattgtacagaagggaactctcaacaagaaatccagattacatggcacaggcgaaagcaatggtccggtggtgagggagcctataccttatcgttttgcgcccttcaccttcgaaaacgccttggcggcttgcgagttgcgagccaaaacaatcaagggaacaacccatgtgccatggcgtagagtacgcaggcagcaagccagcaatgcattagccattagctcccagggtcccccatccagcagtcttttacacctgtcatccatcatgttcgtcctcactccaatcatggcgctgccagaaggccacccacacacaccaggtccaccatcgctgtagattcaaatgaagcactggagctgttttgaaccactagtggtcacgctacgttctatgttgcttttaagatcgtttcaaattactattagtttccaggaggcatatccgatgtgaatgcgaatccagccagtgccgatttctgttgaaactgaaaccaagaaaaccctgaatcgatttcacttaacttaaattctcacatgacatctgccctttcttgccaacatcccaacgcataaaatgagacggcaaaccttgcagcaaacggataataacttaaattctccacgatggaaagaaaaaaacatgcacagctcggtacaggaatacacagagttcttgtttcggttaacagaacggcgcagcagtgagcaccagccctgaagagacgacgaataggaatcgacagagaaactaggcgtgggcagacaagaagacatcacaggaagacgcccgttcttcggactggcatgtctcggcacggccacggcagcttaagacctgctcttgaacgggatggctctgatgatcacctggtggtagatggcagccagagcagcgccaatgaaggggccgacccagaagatccactgcaaaacaatcataggttataacacgactcctcggtaccaatagaggattaaacatgcatgcattaacaaaggatcattagttaatacatgccatctatatgtataaacctataattatataggtcatgattgtcaatagcatgccactgtgtcttcatcatttgaagtttggtgagttaatgataagtcgtagttagaatcaggccagactttctagagcatgccactatgattgctgcacaatggaaagttggatgtctgatatttggatggagacattacactgcgagtggtaccaaactgtaggaaatggaaagttggttagaggggaatcgagagtagttccactcacatggtcgttccaggcgtgatccctgttgtagatgatggcagcgccaaggctcctagctggg

SEQ ID NO: 22948 - DNA, 2124 bp, Zea Mays
caatggcacagcaccacactgctatcacctaatagattaaattgtgcctgagatgttagttatatatctttgacctctgagatacgtgcacgtgactggtgtaatgttgtcacatgccacatggatactccacaggcatatgtatggcgtcttcagaactttgttattggtgaacatgttttgacaccatcatcaagcactgtgacaccaattaaggcttgtgtgataagtgcatgtggtaattttactatcttgggcactgaaggtggttggattgaaaaatttaaccttcaatcagggtttagtcgtggtagttacattgacacctcgttggcaatgcaatgtgcacatgatggtgaagttgttggattagcttgcgatgccagaaatggctttttgattagtgctggataccaaggtgatattaaggcatgggattttaaaacttgcaagctgaaatctagattggatgttggtaaatctgttactaaaatcgcatttcaccggccaaatggtcttcttgctacggtagcaggtgatatggtactcatattgtttgatacggtgtccatgaaaatggttcgtagatttgaaggacatacagaccgtatcactgatttgtgcttcagtgaggatggaaaatggctcatctcgtctagcatggatgggactcttaggatttgggacatcagtttagcaaggcagatagatgcaatgcatgttgatgtatctataacatctatctctatgtctcctaatatggatgtgttggcaaccactcatgttgatcaaaatggtgtctacctctgggttaatcaatctttattctcggtctcaacaaatactgaaaattatgccagtggtaaacatgtacggaatgtgtgtttgccagctgtttcatcaacagagagatctgaggaagaacaagttcagaatttaggagagtcatataagtccagtattaaaccttttgtcataacggatcatcaaataccgaatctagttaccctctccttacttccaaagagtcaatggcaaagtttgactaatcttgacattataaaggttcgcaataaaccaattgagccacctaagaaacctgagaaggcaccattcttcttgccttcagttccatccctttctggggagatattgtttgagcctcctgccagctcaaaagatacagacatcagtaccacgaagaatacaaatcataagatgtctgaactctcctctcatttcagtcagcagttgcaattttgtggtgaaacaaagaactattcggcttttactgactacctaaaaggcctgtcaccgtcgtctttagatatggaactgcgaatgctacaaatattagatgatgaagagtctgaagatctggagcaaagacctgagcttcagtccatttcttcgctgttggattatttcattcatgaactttccttcaggaataactttgagtttgtccaggctgttctgaaattgtttttgaagatacatggtgaaacaatacgacggcactcaatgcttcagagtaaggtgaagaagcttcttgaggtccagagcttagtttggcagaagattgataagatctttcagggtgcacgatgcatggttacattcctcagtaactcacaattttagtagcaggccggagttccacataccagggcatacatggtgcctaatgcctgcacgagtgtggccattggattgagcaagtggatatagttgattttttttggagacggcattaaaatggatctggttctcaaacatggcatgactaggcattggagcattgttgagcagcagccatggctatattactctaggcttacaattttgctgtagctgttagtctgttacacagcaaggagtccacttggtaaacatttgtagctaccaaaacagccccatctcatggtgtaacaattttgtagttttacatttgtgtcatctttttgtaacaaactgatgtatcaaacaccgtattgcaagaaatactaaggcttgccattgctatttgaacaaaaaaccatatctgtatattcaacaagcttagcttctgtgttggtcttatattgtggaggataccaggtgaaaatatccaaatgtacctaa

SEQ ID NO: 22949 - DNA, 161 bp, Zea Mays
cttttcccataatatggtgatctagctacaatctttggcgggagtgctactataggacagtttgtgaagacctcaaatgaaccccttgttgtggatgtggaagggcgccggcgaaaaagatatggaagccactgaagaaaatggcattgggacaacatctg

SEQ ID NO: 22950 - DNA, 2389 bp, Zea Mays
aaaccaggttttccgacaacccagagagccaaagaaaggactaccaacaaccgcaaccgctcgcttcccagcacctccccacctttcgctccctccctccctccaattgcaggatcggcaccgatgcgattcgaccgcggcctcgcatccggtgcggaggtctgtcattggagggaggctcctctccgctgcgcgcgcgcgtcgcggcctgggcgagtttcctgctggttcctcgtccctcgggagagattttgcgatccttggcgttactgttcgattgcaaacagtattgctgcttctctgaggaggcattagggctatgggcagttgaactgaaccgccgcggcagaaatccattcgtgggagagagaaatcaaagaggagagtgagtgatcatggagcgcgtgattggagggaagtataagcttgggaggaagattgggagcggatcttttggggagctatatctcggtgttaatatacagaatggtgaggaagtgggaataaaattgaatcaagatataccatttttaaacttagagctgaagtgtttggttcaaggattcaccttttctttggtttgatctgtaggagcctgtgaaaacaaaacatccacagctgcactatgaatctaaagtttatatgctactgcagggtggaaatggtatcccacacctcaagtggtatggtgtcgagggggagtacaatgttatggtgatcgatcttcttggcccaagcttggaagatttgtttaattcctgccacaggaatttttctatgaaaacagtactcatgcttgctgatcaactgataaaccgagtggaatacatgcattccaagggatttattcatcgtgacatcaagccagacaacttccttatgggcttaggtcggaaagctaatcaggtctatatcattgattatggacttgctaagaaatacaaggaccttcatactcataaacacatcccatacagggagaacaaaaatctgactggaacagcacgttatgctagtgtgaatactcatcttggaatagaacaaagtaggagagatgatctggagtctgctggctatcttctgctatattttttaagaggaagcctcccatggcagggtcttaaagctggcactaagaaacagaagtatgacaaaattagtgaaaagaaaatgcttacgtcagcagaggttctttgcaatcttacccgtcggagttcgtctcatatttcaactattgtcgctccctgcgatttgaagacaggccagactactcttttctgaagaaactgtttcgtgatgtatttatccgggaaggataccagtttgattacgtatttgactggactgtactcaagcaccctcaaatcggttccaacaacaagcttgttcaacaaccaagtgcaagaatggctggagttggaccatcagttgaccgaacagacaaagcctccgtgggacaagaggcccgggacagattcacgggtgctgttgaggcattcgccagaagaaatccaggctctggtcgccatggagatcattccaggcaccaaagccttgcagattcctttggcacatccaacgaagcagttgccgactcagagaaaacgcacatcttgtcctggggagggagctcgtcgaaaatgcccgcggcttcgtccagccggccgacctcctcgggggactgcagtgaccagaaccaccggtgggtttctggcagtagtggcggcagcgggcggccgtccacagtgcagaggcaccaccactcggcaggcgccgagaacagcaggtcgtccacgcgctcccccgtggcccggaacgcggccgagagaggaggctccggctcgcgggacagcacgacgttccggagcctcgagcgcctctccatcaccaccagcaggaggaagtgagctgccgaggaccacgccgacgatttctgtgagtgaaaggcggttactaggccgacatcttttgcgggatcgttgctctctgcagctgaagcaaatcggcaaatggatggacgggattgcagcgcaatgacctcgaggatggcctcctttacaagaactgccatgaaaatgctttctccaaaccgtaacgtataacgcttcccccaaccaaccagagggaagacaactccaaagtacaatgcaatcctgtttcacggcaagctttcactgttcacttgttttgccgttctggcactagtttctaaagtctccagcaatgtaatctatattcatcttctatgcctgtactttatagtctcatctaaaagattctctcttctatatctttctaatctgcagcagcgtcctctatatctcgtcctttatacatactagtcggttgcctatgcgttgtgacggctcacaataatacccacgtaaac

SEQ ID NO: 22951 - DNA, 378 bp, Zea Mays
aacgaaaaccagctctcatattggcataattccaaatttctctcgtccgcaccgccgccactcgccttttcattccgcaccgccgccaacccgccgcctcttctttccatggaagtggacgacggtagccgcgccaccccgccactggacgccgtggccgccgccttcaagtcccaagtcatggagttgcaggacctcgtcctcgcccgcagcatgttcccggccacggcgctgcccgacctcgccaacgtggacgcgttggtgacggcgatggagtcgcaggtggaaaccatcagccgccgccttcaggaggagcttgacgccatccctaaggccaaggccattcaaggggacatcaaaggagtttgatgcaatcac

SEQ ID NO: 22952 - DNA, 457 bp, Zea Mays
ggaaaagcctaatcacggtttgggtattgctgtgcgggtttgtgaaaaaaaaatcagctgctctgatgttcaacaaactaacatgctgatcctcacacttcccgagatgaatttttgggtccacagctttgccatttcaggcaattttttgtttttattttgattcaatagtaatttgattcccgtttggcaagctgatatcggttagatgctggtatagaggaaacctgagttttggcagcacgacctaatctttgcatggtgcttcatgctgttaggtccactgtatcgaacatgccgttgagatggcaacccatgtattttatccctgtaatgtttgtaattattcttcctggtgcgaaagtaatcaattgttaaatgctaatgtaggcagaacttcaagctccgtcagtgtctattcactaccggaattcgggcctttgccgagtgccggcgg

SEQ ID NO: 22953 - DNA, 3859 bp, Zea Mays
caccgaggcccgaaacaataataatagtgtagtaataataaaaggaaatcactaaatttccccacccagtccgctgcgcaggccagacatccgcggcgtccgcctccccggccccgatcgatcggaagcttcggcttcccctgacacaaggccggcgcgaaaacgcccccacaaacaaacggcggaccattgccgcgcgtcgattcgaacccgccggggaaagcgccgacgccgtctcaccccgcggaggcgaaaccctagcgatggcggcgtccgtggacgctgcggcggccctggcggtgacgccccccgctgtggaggaggcgggcggcgctgttgagcaggccaggacgctcatcggcgcgctcaacctgctttcccgcaacctgccgctgccccccgacgtcctgcgcgcggtctcgtccatctaccacgatgggggtgcgggtgacgatgaggaggaggaggggggagagcgggaagcggagaaggaagggaatatggagatgacggccgcggaggagggttaccccgttgacgttgcgaccaaggggagctccttgattgaagagcttgaagatgcaatatataagaataaaaaaacaccaatatcctactcagagttagcagctctgaaagaagggcgattcaatgcatccattcagcatcggctagctgaacttgaaggattaccttctactaggggtgaagacttgcaaatgaagtgtttgcttgaaatgtatgggcttaagctgttagatttgcagaagaaagtgcgatctgatatcagtgcagaatattggctacagaagaaatgtgcatatccggagaggcaactttttgattgggggctgatgcggatacggtatcctttatccatgtatggaataggagatatcctttcaatggatgctgatgatgttcaccgcaaaaagagatttacagagaggatgtcaagactcgaagaggaagaaaaaaatcaggcagatattaggaagaggaagttctttgcagaaattctaaatgcttctagggaacaccaggtgcaattaggcactacattcaagcaaagaaagcagcggaatgatggagtccaggcatggcatgttcgggcacgtcaacgtatctcacggcaagagaaaaataggttgaatcttctgaaaattggtgatcaagtagcatatatgaagatggttgaggagagcaagaacgaacgtctgaaaatgctccttgacaaaacaaatgagcttcttgaaggaattggaaaagctgtacagcgacaaaaagatgctgagcatgttagtcagcatgaagggagtgaagtgccaaaagggtcagagtctgaggattgctctcaaatctcaggcgtcaagagtgaatcacctggggaatctccttcagatgacgatgcagactttgctggctctgcagatgaaagtaaattcaatgcaggtcgtagacttgattttactgtccattccattgaagaaaaggtgacagaacaaccatcagctctcgaaggtggggaattgaggccatatcaactggagggtctccaatggatgctttctttgtttaacaacaatttgaatggcattctggctgatgaaatgggtctgggtaaaacaattcagaccatagctttgatagcttatctgttggaaaataaggaggttgcaggaccacacttaataattgctccaaaagcagtattaccaaattggtctaacgaattcaaaacctgggctcccagtattgggacaattctgtatgatggtcgtccagaagagaggaagcttttaagggaaaagaattttgatggattgcaatttaatgttttgctcacgcattatgacttgatactgaaagataagaagttcctaaagaaagttcactggcattatttgattgttgatgaaggacatcgtctgaaaaatcatgaatgtgctcttgctcgcacactagtttcaggatatcagatccgccgcagactacttttaactggcactccaatccaaaatagcctacaagaactgtggtctttgcttaactttattctgcccaatatttttaattcatctcagaattttgaggaatggtttaatgcaccatttgcatgtgatgttagtcttaatgatgaggaacagctattaatcatacatcgtctgcatcaagttttgcgtccatttttgctgaggaggaaaaaagatgaagtggaaaaatatctccctgtcaaaacacaagtaattctcaagtgtgatatgtctgcttggcaaaaagcatactatgaacaagtcacaagcagggaaaaggttgcactaggatttgggctcagatcaaaggctctgcagaatctgtcaatgcaacttaggaaatgttgcaaccacccctatctatttgtagagcactacaacatgtaccagcgggaggaaattgttagagcatcagggaagtttgaattgcttgatcgtctacttccaaaactgcagagagctggtcacagggttctgcttttctctcagatgacgaaactgcttgatgttttagaaatatatttgcaaatgtacaatttcaagtacatgaggcttgatggatccacgaagactgaagaacgagggaggttactggcagattttaataagaaggattcggaatatttcatgtttctcctcagcacacgtgctggaggacttgggttgaacttgcagacggcggacactgtcattatatttgatagtgactggaaccctcaaatggaccaacaagctgaagaccgtgcccatcgtatagggcagaagaatgaagtgcgtgtgtttgttcttgttagtgtcggctccattgaagaagagatcctggaccgtgcaaaacaaaagatgggtatcgatgcaaaagttatccaggctgggttgtttaacacaacttccacagcacaggacagacgagcattgctgcaggagatccttaggagggggacaagctcgctgggaacagatatccccagtgagcgcgagataaatcgtttggctgcacgaactgatgaagaattctggttgtttgagaagatggatgaagaaaggaggcttagagaaaactacaaatctagacttatggatgggaatgaggttccagattgggtattcgccaacaatgatttacccaagagaaccgtggcagatgagttccagaatataatggtcggtgcgaagcgacgtagaaaggaggttgtctattcagactctttcggtgatcagtggatgaaatccgatgagggatttgaagacattccaaaggcgactcagaggtcgaagaagactgcttactcatctgacatccaagttgagtttagtgaaaggaggaaaagacctaggtctgtagaaaacagcgcagacggtgtgagcaacccgacgtggacgcctgacaaaggaagggctggagtttcatcatacagcaaggacgagactgaagatgatggcgaagacgaagtcattactagcggcttacaaaagggaaacagtttcacatggaataccctaggaagaagaaggtcaagccacttcagttcgtcatcggactcgagagggcgcccaacattctaatggcaacatacatgaatgttatggcctcgacctgttggttgatggaatacccttgtagagcagggctgcgactatgactgagtaccttcaagcttatgaactttattaggattactagtatactgtatggacttgttggcatgaatttgtaactcctttaaatattaattgtttaaacaactggtggtgtttgctatcataccgcgcctacatgtttttatttttttgctaatcaaagtttttgtggccaggttttattggtg

SEQ ID NO: 22954 - DNA, 1139 bp, Zea Mays
gcagaacccaaatgtctaatgcgtaagtttagataaggaaattaccaaatatctgcggaaggactggaagctagtttatcattgtggaatgacaccacagaagctccctgatcttgttgaacataatccacatatagctgttgaagttctttcaaagctaatcaactctccggacatggatgcgtactttgatgctattgttcatatggatatgagcttgcattcaatggaagtagtaaatcggctcactactgcagtagttttaccaccaggatttgttcatgactatatctcaaactgtattcgatcatgtgaagacattaaggacaagtatatgcaaaatagactagtgagactagtatgtgtttttctacagagcctcattcggaacaggataatagatgtgcaagatctcttcgtggaggtgcaagcattttgcatcgccttctcgcgaataagggaggcagtggggttgttcaggctcctgaaatctctagaatgaagagcgctgcaccatcagttgggcgctggattctcagaacagaaattcccaaggtgtacatccatggctctgccttttgcttccaagctgctgaccctgcataggtctggactctgtagggcgtggattttgctggtatattggttatcatcaagctgcgtcccctgcatcatccccgaaagacattgaggagaaacaaatccataggtctgacaggttgggttcgaggtagagttagttctgttggaagtgtccacggggcttgtcgttcttgtgcagtaggcaacaatggcaagccccgtagttggtttgctcgaaatgagcgaatggtacggtgaactcagaaataaccgggatagagtatccgactgtcagtcatacttgctctacggcatggtatatttattcattagcctcataaacggttgcttgctatttaggctgtcatacctgtatttcgaagttcattgttacatcatgcagatgtgagacagctattgcctggcataccgtatcatgtagtacgtatgaaaaatgaaaggcagcagggctgtatccagtggcttcatgtgttggcctgggtccgaagtggtcatccatcaacctagacactgacgggagggcgcaggcgcgcagc

SEQ ID NO: 22955 - DNA, 1260 bp, Zea Mays
atttaccactggggcagctatgctttatatggtgatatgactcaacctggaaatatatataatcccaatcttcagcaagtaaccctatcaagaaatgaaccttccccatcttataatttggattcaaataggaacactcttcaacagtatgctcaaggtccaagtgaccgacatatggatcaaatgtaccatggatccaattttcagcaggatactggcggtactactccctctaattattttgagggagacagaagagtagatggtgactcacagttataccaacctgatggtgacgctttacctggtattgaggggtttcaaattgctggtgaacctagaccaggatttcaattaacagcatgcggttttcctactaatggtactaccctttgcaatttccagtgggttcgccatcttgaaaatggtaccagacagtctatcgaaggtgccacgatgtatgactatgtggtcactgcagatgatgttggtacttttcttgctgtagactgtacacctatggatgataatggccgccagggtgatttggtgacagaatttgctaacaatgggaataagataacctgtgatccagagatgcagagtcatattgatgcatatatttctaatgggagagctgaatttgaagtttttgtcctggcttattctcctgaggagtgggaattggctacattggtgctaacacgacctaactatcagattaagttcaaaaagaccggtgaagctataattgatgagaagtactcacaaagtctacagatgaaaattccaaatgggcgcacaactcaatttgttttagtaactgcgggtgcaactctcccatttaacacacagggaatatcagagccaaacaatgaggattacgatgttaggttacgcgatctaatcgtattagtcatgagaactttccagaaaaaggctttagatgccaaaaggaaagtcaacacttagaatccatgttgatctgttacaaaagattctatgtaaaaccgtagaaaattttcctatttttgattgttttgtgcagtattcgatgatttttgttcttgagatggaatgagctctcgatcaaagttttgctaggtgctagacggaatctaggcgatgacccttagcctagggactagtccaagcctaggcgatgctagacgttttgccaacttatataatatatacatttatagataaaaaagagggaaggaccagtagacataccttttgtccttgcagatctgctaa

SEQ ID NO: 22956 - DNA, 1467 bp, Zea Mays
aacgaaaggaaaatttccgaaacagaggcggcccgccgggcgagcgcgccggagcccgcatgggtgcctcgtccactccggcggccgcggccgcggccgcgccgagccggcgcaaggtgacgctctatctggtgctcctcaccttgcagtacggcgcccagcccctcatctccaagcgctttgtccgccaagatactatagtgacttcactcgttcttgcaacggaagcagcaaaggttatttgtgcaatcattttattgattgcagacggtagtctgaaaaaacagttcagtaattggaccctcattggatcactgactgcgtctggactgcctgctgctatctatgcccttcagaatagtctgctgcaagtatcattcaagaatctggattccttgaccttttcaatccttaaccagactaagcttttgtggacatcatttttcacatttcttattttggggcaaaagcaatcatccaagcaaattttagcattggccctcttaattagtgccgctgttcttttaagtgttggggagagtactagcaaaggttcaaatggtggtggctctgactatatcttgctatatgggatcattccggttacagtcgcttctatgctgtctggtttggcctcttcattatgtcagtgggcatctcaggttaaaaagcatacctcttacatgatgactatagaaatgtcatttattggaagtgtgtgcttgttagcaagtacctatcggtcaccagatggagaagccataaggaaatatggggttttccatgaatggactttctggaccatggtaccggtattaatgaatgccgtgggtggaattcttgttggtcttgtcacaacttacgcaggtggtattagaaagggttttgttatagtctcagctctccttgtaactgcactgctacaattcgtgtatgatgggaagccaccatcactctactgcctgatggcattaccacttgttgcgacaagcatattcatctaccagaagtatccatatgtggataagaagaagaaagtctgatgcacataattgtcagagatgggaagtatcatcagcaggatgtaatgctaaccttattttgtccacaaggctggaatttgcaccgtcaagtgggccagatgtgactcttgaagagttgcctgttcgtgaatctattttcaattatctactgatctagatatataattaaattagcagtacagtagcctggaatcagtttcagcaggcagttgacatgcttgcatgtaacatctggaaggaggtttcatattaatggtgtttacttgcacagcatgatgaacctactgtgtctgcctttcatggattgttatttatagactgatttgtgaattttgaatatgttatttatgatgacagaaactaagaactaattattttgcgtcaatccttctcattcggaatctgcactatgttagttgtcata

SEQ ID NO: 22957 - DNA, 2158 bp, Zea Mays
ttttttgaactagaaagctgctgaagcaaaccattattttctgtctttgagaacatgtttttctctttctctaacaggtgggcttggggatgttgctggagctttgcctaaggctttggccaagagaggtcatcgtgtcatggtagtagttccaaaatacggtgactatgaggaaccacaagagataggagagccaaggagctaccacgttgcagggcaggatatggaagtaaagtattatcatgcatacatagatggtgtggattttgttttcattgacaatcctgtcttccactatgttcaaagtgaaatttatggtggggaccaaactgacatctggaaacgaatggttttgttgtgcaaagcagctgtagaggttcaatggtatgttccatgtggtggcttctgctacggtgatggaaatcttgtgtttattgcaaatgattggcatactgcacttctacctgtttatttaaaggcatactatcgtgacaatggttttatgccatatgcccgttcagttcttgtgatacacaatatagcacatcagggccgtggcccgatagatgatttcaggtacctggatttgcctggtcattacatggatcagttcaaactttatgatccattcggaggtgatcatctaaacatttttgcagctggtattagagctgctgatcgtttgcttaccgttagtcatggttatgcatgggagctcaaaacacctgatggcggctggggccttcatagtatcattaatgaaaacgattggaaattccagggtattgtaaatggtattgatactgctgattggaatcctaggcatgatgtccatctacaatctgatgggtacaccaactattctctagaaaccgttcagactggtaaagcacagtgcaaggaagcactacagaaagagcttggactccctgttcgtggcgatgttccggtcattgcttttattggacggctggaccatcaaaaaggtgtagatctgatagcagaggcaatgccgtggattgctggtcaggatgtacaattaattatgttgggtactggaagacaagaccttgaagatacattgaggaggcttgagagccagcattatgacagggtccggggctgggttgggttctctgtccggttggctcatcggatgacagcaggggctgatatactattgatgccatcaaggtttgagccatgtgggctgaaccagctatatgccatgatgtacgggactgttcctgtagttcatgctgttggtggtctccgcgacacagtccaacattataatccctatgaggaggttggagttggatggacttttgagaaagcagaggcaaacagaatgatcgatgccctagggcactgcttgaacacatacagaaattactggagcagttgggaaggtatccaacgtagagggatgatgcaggacctaagctgggataacgctgctaaactctacgaggaagttcttcttgccgccaaatatcagtggtgactgttgttgaactgtccaaggaactgttgatatttgtcattcatagacctgaaggctttctgtcgcatagaagtcaccgactgtttcaattcttttggtgactgcttcacacagctgctgcatgctttgtcctgaattttgcaggacggtgtgcgtcgcaacagccaaattttttttgttgttgccagttcctaataatcgcatcagatgtgaatgtgaattctgagtctacctcctggacaaacacagtggatgaggcttttgctggaaacaggttaatgctggaggaaagattgaggggaagcgtcgtgcactttttgcaagtgtttacgaattcatttgttctacagggagagctcatttagacgctttggtacaggagggtggtagatagcagagaaactgatgctttgtatcttgagtagttttgttgtatctctaaattaggatacttgttacaatgttcagttcttcatatttttttccgtgcatatcctgtagatgatttagtgttccggtcttccgaatgatcgtaaaaaaggggtttgcaggttgttgagaataatatataattatgaaagggcatcggaatccctgaacaatactgaagttctctgaaagaaccgaggccatgaatgtatgtttcggaag

SEQ ID NO: 22958 - DNA, 1627 bp, Zea Mays
  misc_feature (1627)..(1627): n is a, c, g, or t
agggattccagcttctggaaccttcctttcgctatacgacctgagttcgcttcaggcagccgccgctctctctctctcccgcgtccgtcccaccttcgcaagccagccacctccctgagaggcctgaccgtgatttcggcgtggcatccaaaggcggtcaagattcgagaggccggaggaaccaagcgtagggcctccgaccccacgtcgtcgtccgcgcgcgccgcccgccgccgcagggagatgggggccgattactacaaggtcctcggcgtcgaccgcggcgccagcgacgacgacctcaagaaggcctatcggaagctcgccatgcgatggcaccccgacaagaactccaccaataagaaggaggcagaaaccaagttcaaggagatctctgtggcatacgaggtccttagcgatcccaagaaacgtgcaatctatgatcagctaggggaagaagggctcaaggggcagccgcccccaggagcaggaggtcctggcacatctcccttcttccctggcggggctcattccaccgctcaccattttaacccgaggagcgcggacgatatatttaaagagttctttggatcccctggcatgggtggcatgagaacggaaccaggatttcaaaggtcaatgtttggcaacgatatcttctcttcgcgcttccgcgctgagggttccaccagtatgcagcagccattgcgcaaggcagctgcaattgagaatccacttccagtcggccttgcagatctctacaagggtgtgacaaaaaagatgaaaatctcaagagagactattgatgccagcgggagaatctcaaacacagaggatattctgacaatacaagtaaaggctggttggaagaagggaacaaggattacatttcctgacaagggaaatgaagctccaaatatgaaacctgctgatattgttttcatcattgatgagaagccccatgatgttttcactcgggagggaaatgatcttgtcgtgactgagaagatctcactggtggaagcactgactggctataccgcacgtgtcactacgcttgacgggcggagcctatcattgcacatcaactcaataatccatccaaagtacgaagaggtgatgcctggagagggcatgccagtgcccaaggaccccacaaagaagggaaatctgcggattaagttcaacataatgttcccctctaggctgacttctgatcagaaggccgggatcaagaggctattgggttcttaggccgccacctcaaatgacatcttctttatgatgaaagttgtttgtgaatattgccagtaatttgtttgtcacagtttagttttttaaagtggtgcccttagttttgccgatgtcctcatttttacccttagtcgtgtttttttttaagggtgaaccttcaccattttattttagtcaggcagagtgttgtgccctttgcattacggtattccattcagttacaggtgaattaataccgctgtgtaccgccaaccggatttacttaaagaagccaaatttgtatcgctgccaattccacaaacagaatttgcagacttttaatcaccagactgggaacaaacaatggaccgactgactcaagatgaaaacaaan

SEQ ID NO: 22959 - DNA, 504 bp, Zea Mays
cgtaccatcgatcggcgcgggatggaaggatcgagaccacgctggcagatgaatctgggaaaacccttgccatcatcatcggcctggtggcagcggccgccattgtcatcgtcttcctctccttcctccgtaggtccagggctgccggaggcaaaagctaagagcttgcaggatggtcaccacttggctcggattggatcaatcgggatgtctgaaaggcgttccctgtgcagacatgtgcaaagtaaagattccatccggtaccagctactcgtaaagccacgatgcgcaatgcaagatatattttcacaaaaaaaaagatatatgtggtttctgcccatcatatatatacttatatacaatgtacttattatggagcatgattcagcattgtgcaagtttatgtgtccaattggtgtcacctcttacaattgttgtcgttgtcgtcgtctcctcttccttctcctattagtattattatcatcatcattaataacatatccg

SEQ ID NO: 22960 - DNA, 2248 bp, Zea Mays
cgagcgttgtcgcattggtgcatttaccatagaaagaacgcagagcaaattgttcagacttgggacaagcagttccacagctttggcaaggagcagaagatccctttcctttatcttgctaatgacatcttacagaacagcaagcgcaacgggacagagtttgtagaagaattttggaaggttctccctggggcgcttaaagatgtaagtgagaacggtgatgaccgtgggaagaaggtggcatctaggctggttgacatatggcaagaaaggagagtttttggctcacgcgctgggggtatcaaggatgtgatgcttggggcagccccccttcctgttttagatatgaccaaaaaacggtctcgcagttcagcaataaggattgttaaaagagattctcgttctgtgaaactgagactaggcattggaggaactgcagagaggatcatatctgcattgcacactgttctcagtgaacaagcagatgaggatgatgacctggaaaaatgcaagacttctatgcgtcatgttggaaagatggagaaggacgttgacagtgcttgtagcaaagccgaagatcctcgtcgcgaggttctttgcacagaactaaaagatgaggaagctaacatgaaaaaatgcatcgaaaagctaaaagctgttgagaaaaatagagcagctattgtgtttgaactgaaggaggcactgcaggaacaggaatctgaactggagaaagtccgcactcagttacagctagctgaagcaatggtacatgaagcctcgaacatgcagcggagactcaagaatgagccaaccattccgctgcccagatcagcatcgttagtagagccaggaaaggtggtctccaatgggcaagtaaaggagcagcacaagacggctgctgctatccttgcagacaagattgcagcatcatcaaactctcagcagattctgcagtctgcactttcgaagtttgctgccgaagaagcaaagaattcatctgaaacacgctcagataagaggcaaaaggctgaacaactatcgcaggtaccaagcgtcgcaaatgccgctgcttttgttccaatgccacaagtggttgccacaacagctcagcagcagccccaggcaatcttagtgcaacaagcacctatgcagagccaagccactgcatctcagccccagtacaatatctaccaggccccgccccagcagtttgtccctcagcctggaggtgtaatgatgggcatgccttacaacatgagctccatgaccccaccgcctccaccgccgccccagatgatgagcctaggaaggccctcaccttcagctccacagccccagatggctgtcatgccgcagactcagcctccagcgccaccgatgcttcagcagcagatgccaatgaacctaggtcctcagatgcagttcacccttcaaccgcctggcgtgccgcctttcaggcccatgcagccacctcctgggatgcagtacttccatccccaatctcagtgacagttttggtagcccagccctgttaaacttttgacaggttctcaatttagcgttgactagtaagcaggatctgactgctgtagggtatactgtttgtgtggttcgtttcgacatatgttgttgtactgtacatgtaatgcgaggagaggtaaagagcgaggagagaaatgaagattaaagatttcacataggcctgcttcgttctcgtaaggtggtttggtgggttgaatctgcggctgcaagtgaggtgagttctcttttctcatttttgtgcatgcaggtaaagcttctgggtttcctaaaggggcagagtttatgggcctgattacatcagccgtttttttttggtaccataggcaacgaaatacagaaatattatttttgcatattacaatagcctggagcaaggtggagcttgctcctagtcacctagtgcctcaattagacaacttgccagcatcgcagttccaacctccaagggcagcaagttctgtatgaaaattgaggcagagatgtgctgctgtcttaccccatgcatctgggatgctcttatctaactcaaaacatgatgtaatctctctctagtatgcatgatcccaaccccaagaacatccttatatggaggaggaaacaaagtgtgatcttgcaggcaatagatagcctgcgggaacatgcattgactggatgttgcgaatttacctggtaaatatttatataggttacatctaattcagtacta

SEQ ID NO: 22961 - DNA, 124 bp, Zea Mays
aggatacaagttgcctgaattgacacgtcatgatcgcgcgtcccagtcacaagtcacgtgatattacacgtgaaaaatacgcggaaacgcgcacacgtgcatgtgtggctagtcatgctctttc

SEQ ID NO: 22962 - DNA, 1379 bp, Zea Mays
ctgaacacaggcgttcttcaacctcggggctgcggagccgcctcttggcctcttcttgttcctattcgttctcgcctagtaggctactaggctggagcagaacggagaaccagagacaaggaggttattcggacacagaaactcctctctcgccatttcatcttggtcatttgatgacatctctctgaaatcgacggagtcaacagatcaagatgacagaaccatcatcatcatattcattgccctctaaaaagcgacaacgctctcctgatgataatgaacattcactagacagaggtcgaatttgtttaagccttgatgataatcttacgttcaatgataccatgatagcacttcaattgatgcgcacacagtttccaaagctggataaggttttggcgcagccattcattttgcagtcacaattgtatagcagtgtgaaggatagaacacaagttgacagagacttggagtcatttaagaaagacaaagtgttacggatattcaaacttagttctgggcaagatgatcatgcaatcatgttcatggatgattatttgaaacaggtctcttttgctattaaacggtcagggggtaaagaccaagatggtagtgaagtatttgagtggtttgagagatatgtggtcccttcaaaactggatgttagcataactcaactagagctgtgctcactgttatcacagggtggtgatgtaacagacaaacatatcacactattgatgaatgctggtctcttaactcgtcaacttattgatccaaatatttactggttttctattccaagaattggccccatattgaaaggcctatcccagggcaggaatgaaattctttcgctgttgaaccgtagaaagtacaaggagatgccgctttcttcactggagaatacaaagttaagattatcacctcttgatacgcggttcctccttcgcgatttgattggatctgggcacataaaaacagttcaaacgcccactggtttgctcgctcgcgtatcaagggattaatagagctctctgtcgtaatcctacttatctgtctgccttatctcttatctgatcatgcacgatttggtgattctagtttcgttttgcattttacctgttttcaaacagcattcaacatgaccccaactcgtcgatagtctttttcattttaagagggtggttgggactccgctctacgttttgatgttccgtggaaactccagcaactcggttccccaaaaagcgtttttgatggagaaattcgttttaagatgtagatgtggagttcagggttaattacccaccaatgtcattcattaaatgccattcattatgatgagaaaataacatttcgtctcaatctattccttc

SEQ ID NO: 22963 - DNA, 868 bp, Zea Mays
ctttattggagggtgatgcttttaattcagccccctagcttgctgttggaaacattgtgagacgtgttttgcatataataaaggaggaagatatatcttccacagcagttggtatcgaaggtctttctgttactgttgacagtgatgatgaatatgacagcgaacatgatgatcgccctgcattatctgctgctgttcttgctgcacatgctagaaatgcccttcgtgcaccttcattgcagactctgctagaagacattcctgtgagtcctgcaatttcccgcactgcatcatcaactggtgactcagacggaaaaagtaaatctggagataagagctcaactagaaaactgaagcatgatgtcatcgcagccattggtgatcttattgatgagattgactcatgctatgagccgatttctgagcaagctgtggaacttattcaccaaaatgaggtaatcctaactctaggtcgttctagaaccgtcaaggagttcctgtatgccgcgaaagaaaagaaacgatcttttcgtgtatttgttgctgaaggtgctccaagatatcagggccatgttctcgcaaaagagctggttgagaaaggtgtacaaactacagttataacagattcagcagtttttgctatgatatctcgagttaacatggtcatcgttggagcgcatgctatcatggcaaatggtggagtcattgcaccagtagggatgaacatggttgcacttgctgctcaaaggcatgctgtgccttttgttgtggttgctggtagtcacaagatagtccacccatctcaggaaatctctttaacttccattttccatggttgtcatgcttaactagacgcctgacatacaga

SEQ ID NO: 22964 - DNA, 1224 bp, Zea Mays
cccaaatcgagatgtacaaaaggagcagttaggtcaggacaggggaagggagaaaagagaatattcagaacaccaccagtcatcttcctcgtgaagaagcggcaagggagaaaagagaatattcagaacaccaccagtcatcttcctcgtgaagaagcggcaaggcgagtttgttggagtctcacgccccgtttctcgtcgacggcggccacgggacgtgacagagtaccgcgccacgctcgagttctactgggcgcccttcctcgtcgagtccaactctgacaaccccaacttccacagcatcaaggaatggatcatcagtcccgagcggatcgaggcgcacaccaagcactggaaggacgttgactaccttatattcaacacctacatctggtggatgaacactgccgacatcaaagtcaggagatcgaactcgaggtactggtctgagaacgacgaggttcccaggattgaggcgtatggccgggtgttcaagacatggtctgattggctcaatgacaacatcgatcctgcccgcacgtccgtcttcttcatgacgatttctcctcctcacctcagtccacagaattggggaaacccggatgggatcaaatgtgtaggagagactcttccgtatcagaactacagccaacccctggatctttaccatgacatgcggctgtatgacttagtggtcaaggtggccagctccatggagaaggtcccagtgacagtgatcgatatcacaaggatgtcagattaccggaaggacgcccacacgtccctgtacaccatccggcaagggaagctgctgacgcctaagcagaaggcagacccggagaagttcgcggactgcatccactggtgcctacctggcgtgccggacgtgtggaaccaaatactctacacgaggatcctttcgaaatcatcatggcattctaattttagcccccctctgttccagtccctgcctcttcctccccaatgagaatcagaagtgggagcttggtttttgtcggagaatgtatgatttttcattcttttttttcttcttttttgggtagattgaccaaaatgttagcgcaaaaaggaaaatggatatgctgattactgatggtatagcatgtaagaaggtatagcatgtaagatggtatagcagccaacaaggagtttgaaaagatcggagtattcttgtttccttgaaatggtaaagattgatgtgat

SEQ ID NO: 22965 - DNA, 2831 bp, Zea Mays
tccccgggcgggatactggacggagatcgccgggagagagggacagatcatgctcggggaacggtgtgtggcgaggaatgttgactagttgtttaatacgagatcaagaaggacaaagcaattaaacaagcagcaggctttgtgctttgtgggtgtccctcctctggttcactgccccgctctccactccagctccatacattagtttactcctcctgaggtactttgtgctcctcccccttctggcccctcactgcctacgatagcagcagcaccggccgcataagtaggttgggcgctagagtgcgcttcaagcagcagcgctgttgctgcatcggaacccatccccactatttgtttgttttcgctgtacgagcgatctcctggccggctccggcacgttgcaatattcggtcttctcttctcggcgcagcagcaacttgttcttgtgcgctgcctcgctgctctgagccatttgccgttgctgcggtggacaagtatgggatagtggttgtggtgctgtgcagttcttgcttcttacaagtggtggtggtggtggtggtctggacgtctggtctctgcgtgagcattggactagaggagcgggaagctgtgcggctcctctttcgtggtcaagatgaagttcatgaagcttggatcaaatccggatacatttcagggagatgggaatgaagtcagtattgcggcatctgaattggtgagcgacatcactgttcgtatagggactacaaagttttaccttcacaagtttccgctcctatccaagtgtgctcgcttccagaagttgattccaactactggcgatgaaaatattgagatccacatccatgatattcctggtggtgccaaggcttttgagatctgtgccaagttttgctatggcatgattgtcacactcaatgcctacaatgtgattgccgcccgctgtgccgcagagtacctggagatgaacgagactgttgacaagggcaatctgatctacaagatcgatatcttcctcagctcaagcatacaccggagctggaaagactccataattgttcttggtacaacaaaggctcatttaccttgggcagaggatcttaagctggtcagccactgcattgactctgttgcttcaaaagcctctattgacgtttcaaaagttgaatggtcatacacatacaaccgtaagaagctcacagttgagaatggtcatgattcgccatggaatggagtcaagcagcagcagtttgttccaaaggattggtgggtcgaagatctgacagatctcgacattgacgcctacaagcaagtcataacagcagtcaaaaccaagggtacggtgcccaaggatgtgatcggtgcggcgattaaagcctacacttacaagaagctcccgtcactaagcaaggtctcgatgatccatggcgacgcaaaagttcgggctatgctagttaccatcacatgcctgttgccatccgagaaaggttcggtttcgtgcagcttcctcttgaagttactgaaggcaacaaacttgctcaagtgtggagagatgtgcaggaaagagcttatgaagcgcatcgcacggcaactggaagaagcgtcagtgtcagatcttctgatccctacggtggatggggataccaccgtttacgacatcgacctgattcttagcattgttgaagaatttgtcagacaagatagcaagaatgcccagagacataacggtggtgaggtgaacgaccacgtatctgctcctagtgcgtcaatggttgcagtggccaaaactgtcgatggatatctcgcagaggttgcaagggacccaaatataccggtctacaagtttttcagcctagctgagacggtttcgggaggttcaaggccggttcatgatggactgtatcgtgccattgatatgtatctgaaggagcacccaagcttgggcaagagcgacaagaagaggctatgtgccctgatggactgcaagaagttgtcgcccgacgcgtgcgctcatgccgtgcagaacgagcgcctgcctctgaggatcgtggtgcaggtgctgtaccacgagcagacaagggcctgtgccgcagccaccgccatccgagccgacagcatcggcatcggctcctacgagagctcaaggtcaggcgccacaacgaacacagaggacgagtgggacggcgtcatggccgtggaggacctcagcctgtccaagacgacgaagctggtggacaaatgcgacacggcggccagtacggtcgtcgtggggaaggacaaggaccacggtggcaacaagggcgccaccggcagggtggccaaaggtggcgctggcgcggcgacaccaaagaaggcgctcgggaaaacggtgtccggcaaagggcagaccggggagcgcagcagctcggactcatccgacagcgccgtcgccgtcgcagtcttgaccagccaggagcatcccaagaggacgacccgcgcaaggaacgccgccaagtcggctgctgcgtagcccttccgctgagagaaatgctcaaggagcactagctaggttttagcagtcgtctgttctttgttattacgagtgttgcatagaagccaggaccatgttttttacacgtctgtagctgcctgtagggatggtgtaataccaggtacgtgcgttgttaggtgatgctgttagcacgtaggttccaaacctatgagaccttgggctctgctgggtttatgtcgaactcgcagttgtgttataagaatcctactttgatagacttaaactgttctgcagctgtgagatcttttgaactcatcatcctgagcatgggtaatct

SEQ ID NO: 22966 - DNA, 2481 bp, Zea Mays
cttttgttctgaagcagtcatgacccagttgttttttaggggaaaatgagaagaatgatagaagctgaaccacccatagatgaggctgctcttgcaaagctggttccagaggtaggcatggaatttgtgagtgaggaaaaggcatacgaattctacaacaaatatgctgggcatgttggctttagcgttaggaaaagtacatcacataaatcttcagaaaatattaccaaagttagaacttttgtgtgctcaagagaaggctacaacagggataaaaaatcactggaagccaagaagccaagattggatacacgaatcggttgcccagcgagattgattataaaagtcacaccagagtgcaagtatagagtaactgattttaaagcagatcacaatcatcagctggccccaccttcaacgatgcatatgttaaggtcgcagaggatattgacagaacttcagcctggagaagcagaattatcagatgattctgtagtgacaccaacaacaaaggcaactggtgatcttgttgtgagacaagtcagttttcttcggagtttatctctcctcccagctgattacaagaattatctccgttcgaagcgtatgaaggccatgcaacctggtgatggtggagcaatattgaaatatttacagacaatgcaaatggataacccctcgttcttttacactatgcagatcgatgaggatgacaaactgacaaacttcttttgggccgaccaaaaatcgagagatgacttcaactatttcggtgatgtgctctgcttagacacaacatacaaaataaacggttatggtagaccgcttgcgttattccttggtgtgaatcaccataaacaaacgattatttttggtgcagctatgctttatgatgaatcatttgattcatacaagtggctttttgatagttttaagatcgccatgcatggaaaacagcctgcagtagctttgatagatcaatctattccattgagcagtgcaatggcagccgcctggccaagtaccactcaacgaatttgtgcttggcatgtgtatcagaattctcttaagcacctcaatcatgttttccaaggttcgaagacattcgcgaaggacttcggcaaatgtgtctttggctacgaggatgaagatgaattcgtgttttcatggagaagtatgctggagaaatatgatcttagacataatgaatggttgtctaaagtgtttgctgagaaggaacagtgggccttggcatatgatagacatatattttgcgctgacatcataagtgcacttcaagccgagagtttcagtagtattttgaagaaattcttgagtcctcaactggagctgctgtccttcttcaagcactatgaaagagcagtggacgaacatcgctatgctgagctgcaagccgacttccaagctagtcagagctatccaagaatacccccagccaagatgttaaagcaaactgctcatacatataccccggtggtatttgagatctttcgtaaagagtttgagctattcatggactctgtgttattcagttgtggggaggctgggacgacatctgagtacaaggttgcttcatctgagaaacccaaggagcactttgttcggttcgattcaagtgattgctcctgtctgtgcacttgtaggaagtttgagtttatgggtatcccgtgctgtcacatgttgaaggtgctagattacagaaatatcaaagagcttcctcaaaaatatctgttgaaacggtggagaaggaccgccaaatctgcaaatgaagacaatgaaggcaatgcaacaaacgccaacaacgggtcattattgattgtccctgctcctcctacaaatcaccatgggcttcagagcttcagtgcaatgattcaagatgcttcagtttctagcatgcattagaatgcatctcatagaagctcttaatgcaggaacttgcagggtcaatgccaacgacgcgtttataccttgcaagactccacagcgttggccactgaagaagcattggatgggccggccaccgtcaagattcaaccacgcatgtgttcaccgtgtaagactcggcgccgttggccactgaagcaacagttaggcggccgcccgtcaaccgcgcccttggataagttgggtgggcggacctgtgttgtacattgttcagccgtaggggatttcagtcaccgaggcaccggtccttagcctaggctgtagagtagatttttttttttaaattttagttttaaaaggcataatgcttgtatttgcgctgccaataatccaggaattttgtgcgcgcctaataaatgctagcccgtttattaggagcaaaaaaaaaatgcaattcaggcccttgtactgtgctggagaagagagagggtgcgtgcgtgcgtctgaaacctgtgtgcagacagacaggcctctgaccttgtggccggccgccggcctgtgcagagcaagtaggcg

SEQ ID NO: 22967 - DNA, 3043 bp, Zea Mays
ccaaaccagacactgcggcgcggccgataaggcaccacgtccacgtgcgtggcctggcccttccgcccgtcactctcgtcctctcccctcttgctgtgtcgccgcgcgtggaagacgttatcgccttcgccttcctcttcctttccctctccctgaatcctgatttctattcaccttcttcccctcctccgggcggaaggcaaagacctacacgcctatccctctccctcccgggtcccggcttccccttccctgctccccagatcgattcacccagcgggaaaagcggcgcgcagtggggtgcagcaggcgcagcgggctcggcgggcggcgagcggctagcggctagccgcgacgggcggccaatctacagcggaaggcggtgggcggctaccggtggcacatcgacctacggaaagtagaaaggtggggaggactgccctgttcgcatttggagcatcaaaacagggttgcaatctagcacatattacacatcagtggctgataagaaactgcatccagtggatgtaaatttcattggatttgagttttggttgagatggcagttggattgacatctcagctgttccaaagagtaactgctactgacatcttttgccaaaggaacaaatttaggagttctgagatgaggagttctcttcccttgccatccacctcgtttccttcagttgctgataggcgagactgttggggtcgcaatgtgttagagagtagctgcatgcccatgctttatacacctcgcagatatagatctttgggctttagatcttttgccttgccaattcctttgaaggaaattcctcttgtcaagaacacatcattagcactaactaggtcatgtgatgctttacttgcaaatcctgctacctcacttgtggtccctgcaatcgggattattgtgtttgctctgtggggttttttgcctctaatgcgggatattagaaaccgttttgatcatggaggcaactggaagaagagtcctacatatttgatttcttcgtcgtaccttcaacctctacttctctggacaggagcaacactaatctgcaggggtttggatccagttgtcttgccttcagcagcaagtcaagctgtgaaaacacgtctgataacttttgtgagatcattatcaactgtcctggctgttgcatatattctcacaagcttgattcagcaggtacaaaagtttcttatggacatgcgcaatcccaatgatacaagaaatatggggtttgattttaccatgaaagctctttatactggtgtttggattgcttctgtttctctctttatggagttgctgggtttcaatacccagaagtggataactgctggagggtttgggacagtgttgcttacacttgctggtcgagagatttttactaacttcctctcaagtgtcatgatcaatgcaacacgcccatttgtagtcaatgaatggatcgatgcaaagatagatggtgttgatgtctctggcattgttgagcatgttggtttgtggtctccaacactcattagaggtgttgatcgagaagcgatatacattcctaaccataagtttacagtttctatattaaggaataacactcagaggacccattggcgtattaagacctatcttgctattagccacatggatgctggaaaaattgggactatagttgctgacatgaggaaagttttggcaaaaaatccgcatatagaacaacaaaagctgcacaggagagtattctttgagaaaattgatccaaaaaatcaagcacttatgattttcatatcctgctttgtaaagacatcacattttgaggagtatctcaatgtccaggaagctgttatgttggaccttcttagaatagttgggcatcacaaagcaaggcttgctacccaaattcgaacagttcagaaatcatatggcaatgcagacttcgataacattccttttggagaggacatgtatagtcgagtccgtggccggccacttctgattgatacatctgcaaggatcagtgatgacaaacccaggcctcgacctgtatcatcacgtgaggagcagaaagtcaagacaaatggctcggtagatattaagtccagttcccctgaaaatgctagttcaagcaactctgaaaagcaggaaccgaaaaaaatggtgcctgaagatactcgggtgaagaacattaagggtgataatgtgatgccagtaacaccatctttagatcctgctacgtcaacttccaaggctggtaaagggaagacacgggaaccagagcccactgagcggcaaggagatgggtcagtctcggtggctaatccaaagaaagaatctagaccagtttttgaagataacattgttctgggcgtagcccttgagggttccaggaggacactgcctattgaagaaggaaatcctcatctatcactatctgagactgaggtggacaccgaagaggcggcttcatcaccgaaggataagataggccaaagcccaaaactttgaggtccagaaaaaaagccgttcagaggaatctcgataggtcatccgagttcaaactgtatccttgtgaagatttgtcaccaagcctaccttttttgtgcgcttgtgcaaatacaatgccaccacacatcagtgttgtatgcttaaggggtaaattcacactgacgattattcagggaacattacctgtcagtcgtattgctacaggcttgtaaagaagcaagtgcttcaataggcattttgtaaagattatattattgctcatttaagtggcttcttgcatatgcatcggcaattcagcatgcgccgttgcaactgtcatctcggtttccaggtttggcttacgttagttttgtttccaatgccatctgctgcgagctgaaatatcatcgtctcttttcctttttttttttttacaaaagacacgctaagtcgtggagacggtgaattcttccggatggcgtctcatcttgcagacgactaaaacggaataccgcgattatcgaaaaggaaacggaataccgcgcggcg

SEQ ID NO: 22968 - DNA, 4828 bp, Zea Mays
ggttctttctccaccccgatgcccctccccctcccccgtgtgatcccctctccagatcgatgtctgccccggccgtaacccccgcggctcaccgcacgaaaccgccgcgagatcttggagctcagcctctgacgatggctacgactacctcgccaacctccgcgagctctgtccccctccctctcctccaccggcggcgggggatccttggccatgttcctcccgaggcgccggtccacgcgcttcggcctccgcgtggtcatcaagcctttctgatggctcggaacagaggtcagctatgcgatgtggcgtggcgaggttaccgcgggcgccgcggaggtggagggggaaggggaggacgagggcacgggcaagagagcgcatcgctgtggacggtctcgtgagagggaccttgggtgatccgggtgcttggtttcttggttctacggctttcgctgctgttggatttgccgagccggagccgacggagatgaccgtcgacgagctgaagctgcaggcaagggccagcggcggccacgacctaaggaccagttccccgtcggcatgcgcgtgctcgccgtcgacgacgacccgacctgcctcaaggtcctcgagaacctcttgttccgctgccagtaccatgtgacaacaatgggccaggcagccactgccctgagctgctgagggagaagaaggaccagtttgaccctgtgatcagcaacgtccacatgccggacatggacggcttcaagctcctcgagcttgtgggcctcgagatggaccttccggggattaacagctgaaaacctcgcccgatttgtaaagaagttttcttgttcaatgcggcattgaatttgggaggaatgacaagtctcatgaaaacttctgtatgccctacacgtgaccactaaaagaaagagttagacaggacaaaaggctgcagcggcagaagaagagcttttacatacccttacaatgctgattttgatggagatgaaatgaatttgcatgtccctcggacggaggaagctcgcactgaagcgcttaattctcataggggttcaaaataatttatgtactcctaagaatggtgagatactggttgcttccgcgcaagacttcttgacctcatctttcttagatatgttttcgaattagattgggatggaaattcacatttgttatcacattttctgttagcaagcacaaccattgtgacattattttgcatgcactcagcctctcaccatggctatgagaatgaaattcaacttatagatataccaaaatgttatagaatcaatataattagatatgtcaagatgacaacacatatttcattcaactactatggatttttcattgataaaatacatgcttgatggctgcttgtctaaaatttatttgtttaatattctttgtttgtaagcccaagaatttgtaaaccaggaaataattccaatgaaagatcggtgcggggcggaattttcttggctttttgtagtggctaccgtagtacatcaacttgggcacttggcgacatgtccggtgcccagctccatcacatatcaatctgaaattaaacatgtgtctgagttctgaatgaaaaaattcagctaacagctaacactacgcactactaacagacctcaagcataatactgttgatttgatgtccttatatttatcttgaagcattgcattcatgcagtcatgtaaatagtactttatttatcttctgaccaacacactaataaccaacctttgcagtgatgggggatacttcaatgcaataatgagcttcccacaaaattacccaaacagcccaccatcagtcagatttacctctgaaatgtggcatccaaatgtctaacctgatgggcgggtttgtatctctattcttcatccacccagtgaagatccaaacggttatgagctcgcaagtgagcgatggacacctgtgcacacacttgtaggtactgatcacagcacattcaactccacacagattgtccatgtttctttcagtcaccatgatttatcactaggtcattgtgtttgtggccaacgagtattgttctaacagttatgttcccatagctagctagattcattgttgtgttttgttcagggtactttcaccacttctggtatggttctgtctgtaatgtgccagggattattatattgtttttggtttggatttggaatggtttggggtccacaacgatgatgcgtcagagctgttccaaggattggatgatttccattcccctgctgccaattcgactaggctcgccgtctccgctctgcccaactggcaccaagcagccaatggaacttgagcagccaatggatgatttccattcccctgctgccaattctccgaactgctttgacccttcaactcaatccgcatgtacccaggattctttgcttgctcttctacttctgaaaattcgcaaaatggatagataattccagttaattttaatccattacagcctattgtggcagcaaacagcgactgggtgcggaagccggaagggagaggcgcttggttgacccagaacggacgacaagacaccgccgggggttcgctgcaaccgcacgcgtggtggccggtgtgggaaggagcccactgctcaagcagcgacgacttccgtaacttctcaggccaagttgtagggagggagggcagcaaagaaagcaagcaagaaagaagccgattccactggtggttaaggttttggattaaaggagagaggtgcagagaaaaaaaggcaatcttactcttaatctctgtgtccacatcacttccgatcatgccgtgatcgacagaagtacgggtgccatgtataagtgccccctccaactcaccaaagtaataaggagcagctgctgcaggttgcaactccctgggccaagcagtagcccagcaagttcagcaccaatggcagccatatgaaatataaggcaaagcagataaaaagcttaatttttttcaataaggtaaaggcaatgacagaaaagtgaggagggtcagaggtgtacagataaggatgagggctgaaaagaggagcaggaagggcatgatgaaatcagtgtttgctatttagcctccttcacaactaagatcatcctacataatagatttagacaacaaaaacttatggagtttgctgaaatgccctttcaggcatgctccatctgtgctacaagggtcagaatggacttgataggacatttgactatacaacatggaagttatttcaagatatccttttttaactatgctgtcgttgctgatcatttgcatttttacatttttcacattatactatagttgaagatacattcctgaggacgaatgggtgcagttatgggcttcctgcttgctgccagcagtcttttggtgcttttatattgctattaatttgtttgaaatttattatggtgatgactgggaaggtctttttgaggctattactggttatggccttggtggctctttggccgtgttggtggtggtatttataccaaggctgctgatgttggtgccgaccttgtggggaaggtagaaagaaacattcctgaggacgatccaagaaacccagctgtcattgctgacaatgttggtgataatgttggagatattgttggaatgggatcatatctctttggctcatatgctgaatcgtcatgtgctgctcttgttgtggcctcgatctcgtcttttggaatcaaccatcaatttactccaatggtgtatccccttcttgtcagctctgttggtattatagcatgtctcataacaacgctgtttgcaactgatttcttcgagataaaggctgtgagtgaaatagagcctgctctcaagaaacaacttataatatccactgttgtgatgaccattggcattgcgctcatgttggcttggtcttccatacaccttcaccatttataactttggagcccagaagacagtgcaaagctggcaattgttcttgtgtgtggcggttggtctctgggctggcttagtcattggttttattactgagtactacacaagcaatgcctacagccctgtataagatgttgctgattcctgcagaactggagctgccactaatgtcatttttgggcttgctctgggttacaaatcagtcattatcccaatttttgctattgcgtttagtatcttccttagcttcagccttgctgccatgtatggtgttgttgtggctgctcttggaatgctgagtaccattgccacagaccttgctattgatgcctatggccctatcagtgataatgctggaagcttaagtctgtatgggtgcatcttatcatttatatgtatatctgaaagcttaagtatttttttaaatagaagatgtctggaaactttagtaacgacatgagtttcaggctttcagctatagcagtcttattcgcttttaagacagagaagatttttatttagagtttagaaagagtaggtgctatgggtgcatgttatcatttatgtggggaacatctctggtggaaattaatcagtaacgacatgagttaagacagagaagcttaagtattttttcagctatagcagtcttattcgcttttaagacagagaagcttaagtattttttgaatagaagatgtctggaaactttagtaacgacatgagttaatcagaagagatggaagggtagtttatcaacatgtatttggcacttcgccgaaaatgtcacttggactatcttgcaaactgaattttcagattggcttcttctgtctgaacattcagttcagtcttgcaggattt

SEQ ID NO: 22969 - DNA, 1663 bp, Zea Mays
gagagaagagagagaggaagggaaaaaaaaatatctgctgcctccttgcggcgctttgccattaatttagtcagcatcacatcgcaatcacaagactcctatacccaaacccacgccccccaccccctattattctatatatataatacacacactagtgtagtagtgtggagtacttcaattggcgttggccgaagaagaggagaagcgaagcaagcaggcttcgagaacaagggggagggggaggaccaagcgaaagggggaactagagcaagatgggcggcgaactgctgcttgcgctcctcctcgtctctgctgctgccgcccctcaggtacttggagttggcaatggagacaatcacatgagaatcatccaggaggacatcattgagacagtcaacaaccatcccagtgctgggtggacagcctcacgtaatccttacttttcaaactataccattgcgcaatttaagcacatacttggagtgaaaccagcaccacagaatgcactaagcaatgttcctgtcaaaacttattcaagatcactggaacttccaaaagagtttgacgctagatctgcatggtcccgttgcagcacaattgggaacatacttgatcaaggtcactgtggctcttgttgggcttttggtgctgtggagtgcctccaggaccgtttttgcattcacctcaacatgagcattttactttcagtcaatgacctactggcatgctgcggttttatgtgcggcgatgggtgtgatggaggctatcctatagaggcatggcgctactttgttcaaaatggtgttgttacggatgagtgtgatccatacttcgacccggtcggttgcaagcatcctggatgcgaacctgcttatcctacaccaaagtgtgaaaagaaatgcaaggagcagaaccaagtttggcaggaaaagaagcatttcagcattgatgcgtacagaataaattcagatccacatgacataatggcagaggtctacaaaaatggtcctgtagaagttgctttcacagtttacgaggttagtaaggacatgacaaaagcggaacaagagaaacacaagccaaaaaacaaatctggatttcgcacactacaaatctggagtgtacaagcacatcaccggtggcattatgggtggccatgccgtcaagttgattggatggggaaccagtgatgctggagaggattactggcttctggcaaatcagtggaatagaggctggggcgatgatggatacttcaagatcataaggggcaaaaatgaatgtggcatcgaggagggcgttgttgctggaatgccatcgacaaagaatatggttccaaacttcggcggtgccgttggaagagctatagtttaattggttacgtttgcatggcctcaaatgctgttggaattaactaaagtaattttaaaatgcaattgttaaatggccacgatggtgtatgtattttgtacactagctcattccaaaggtcgttatgttgctgatgccacatcactttggtcaagtggaataatattaataagaactagaatttcgattcgaatgttacggtttcaagtccgaccagatttgtgctctgatgatctccggccaccaagcctggttaaaatatctgttgtaaaatgaaatcaagttgagg

SEQ ID NO: 22970 - DNA, 2732 bp, Zea Mays
cggccctacgtgtcggcgacagccgagtaagcacgggccggctcctcctcgcccaacaaccaccgcggcgtgcgccgaccgtaccctctccctccggcgcaccgctctggttcatctccaactacatccaccgcgccccaaatcgcaccccgcctcccccattcgcgccgatcgaaccccaaatcggtggcgatgagcgtggtcggcttcgacgtcggcaacgacaccctggtggcggcggcggcgcggcagcggggcatcgacgtgctcctcaacgccgagtccaagcgcgagtcccccgccgccatcgccttctcccgcaacgcgcgcctcatcggctgccacgccgcgtccgcctcgtccgcgcacgcccccttctccagcgtcaagcgccttctcatgggcgccacggggaggcacccggactcctccctactccgcgacctgtcccgcctccccttccccgctgccgtcggtggcggcgctgtcgtccacgccgaccacatcggccgccgcatcgcgctctcgccgacccacctcctctccatgctgctggcctacctcaagcagctcgcggaggccgacctcggcggcgcccccgtagccgactgcgtgatctccgtgccctgctacttcactcaagcgcagcgccgagcctacctcgacgccgccgccatcgcggggctcaggccgctccgcctcatgcacgacctcgccgccaccgcgcttggctacggcctctaccgctccgacctcggcggctccgggggtcccacctgtgtcgcgttcgtggacgtcggccaatgcgacacacaggtcgcggtcgtctctttcgacatgtcggggatgaaggtgctgtctcacgggttcgatgcagacctcgggggcagggacttcgacgaggtgctgttcgagcatttcgccgaggagttcaaagacaggtacatgattgatgtcacaggaaatgtcaaggccagtatgaggttgagggcagcctgtgagaaggcgaagaaggttctgagcgcgaacgcggaggctgtggtgaacattgagtgcctgatagaggagaaggatgtgaggggggtgatccgaagggaggacttcgagaagctatgtgccaggctgctggagagggttgttgaaccttgcaacagggcggtgacagattcaaggattggattggagaggctgcattctgtggaactcgttgggtcaggttctcgtgtgcctgccattgccaaggtgcttaaggaattcttcagaaaagaacctagtcgcacactcaattcaagtgagtgtgtggctcgggggtgtgcattacaatgtgcaatgcttagtcctacgttccgtgttcgggaatacgaggtgcacgatgcaatccctgcttccataggattttatactagtgacggcccagtttcaacattgtcaagtgatgcattgttccggagaggcctgccctttcccagtgttaagatcattactctacagaagaacgacagttttagttttgatgcctattatgtggatgcgaatgaattgcctcctggtacctcaacagacatcggtagttttcagattggcccattccaagcacatatggaagcttctaaagtcaaagtaaaaattcgtttgaatttacatggtttggtttcagttgaatctgctgctttgatagatgattatcaaaggaatgcaacttctgctgaccatatggaggtggataccagcggtgatgacatgggtcacaagtcaagaagtgaaaggtctatccagcggcaggagttgccaatcactgagtacatctgttgtgcaatgagcaagcaggaactgctggaagctcaggagcaagagcaccaattggcttatcaggataaacttatggaacggacaaaggacaggaagaatgcattagaatcttatgtatatgacacccgtaacaagactgaagattggctttatgaagaaggtgatgatgagacagaagtggtttacagtagcaaacttgaggagctgaaaaagatccaattgaaaatcgttgtaatgatgacgaagtgagagctgaaatcgcaagggagcttttgaagtgcattgttgaccacagaatggctgccaagtcattatccgcacctgaaagggatgctgttgacaatgagtgcaataaagctgagcagtggctaagtgaggggtccaaacttcaagaatccttgcccaagaatgtggacccagtactttggtcctgtgaaatcaagggaaaggaagaagagctggatatgttctgtcgaaacataacaaggcacaagggctccccagcaaggacagatggcagcaggggttcagatcacatgcctacacctgatagagattagatatattcacaaggtttcttcactgtacgactgataacaccgtcatataattgactctgtaccacactaggcccgcattaggtgaccgcttcttggttctccagggtgttgtgcagttttcacttgagagcctactaatcatggttattgatacctgttaattctttttctgtactcggaccatgggtattgtctgcttcagtttgtgctgaatgaacaggaaaactaaccgcgtgtttggttggtggacgagtgcgtgcagctgtatgcacggagcgttgaagcatggtttgtttggttgccgcaccgcacacacgcaaactaggatgggttgaatctatgacaactaagatgtgattgtac

SEQ ID NO: 22971 - DNA, 666 bp, Zea Mays
cgccttgtgttggcggccgtaggccgtagggcgagctcccaggtcgacgtggcggggatggctgcgacggccggcggtggcggtggtggaggggctaaggcggcagtgaccgagcagatagcacaagcagtgcggtccacctccaacctcctccagctgatggagcagtcctcccccgctcagtgcctctcaaattaagactgttacacagctcttgtcaaacatggagaacactcagctgaggtacatgttgccttcctctcaaaagaagaaagatcaaaagagtactgaaccttaagaattcagagtcgactgatgtgttcaccgagacataatggaaggatatgttcttgccgttttgtgctaaagaaatttgagttttgtggctctcaagagatggcttggctttatctggtgtaaggatccatcgttgtctactgtctgtcccacatttgctgagttcggttgggggacgctgttaatggaaatattcttctttcttcaaaccatttacgggtgcctaggacctgtatcataaggcaagcatgcctgttagttgtcacacattctggtctatgaacacgttgctttcttgtaattgcattggttgttttagcagtaaattatggtagaaattatgaagtgatcaaagtgtttaacgtggca

SEQ ID NO: 22972 - DNA, 2701 bp, Zea Mays
agtgtggtactattgtgctgaaccttttggatatttttgtgcattttaacttggacctgcaatgggcccgatccaagtgaacagcaaagatctttcaaaagaactctacaagaaatatagcagtgtacataggcgtaaagttcgtgtgtggcaaatgatatgtgttctatcacactatgtagaagatgatattgttggagaagtgacatctagcattcacatctgtctttatagaaataatttgccagctgtccggcagtacttggagacgtttgctatactcttatacttaaaatttccaaccttggcagaggagcaacttattcctatttttcatgacaaagggatgcgacaacaggcactatcttcatatgtttttatagcagcaaacgtcatacttcactcaagacagtccgtccagatataccacctgaatcaattgcttcctccaatactgccgtttttaacatcccatcatcacagtttacgtggttttactcagcttcttgtccattcagtgctatcgaggttgtggcctactctgcatcccgaaacttcagaagatgcagtctttgagaggaggtgctttcaagaattgaaagattatttggcagaaaattctgactgtgttaggcttagagtttcaatcgaaggtttccttgatgtctttgatcccaatgcatctgggaccccccctggaatatttagcgcccgtcctgaggtgtctgacttcgaatgtgttccggtgtcagtgatggagcgtgtgattgagttcctgaacgatgtgagggaggacttgagacaagctatagcaaatgatacagtaacaatcaagaatgaggatctcgcggtgggagagcatcacaagagtgacgagagcgtgtctgagatggtaaaaactggtcaagaggtacttgatttccagaagaaaataacaccccataggggggactccgagcaagcattgaacttgaacaccagaggtcattcaggcgttggtgacgaatacatttcaagaataatttcagagatggaggaagatgaccaagttttcgacctagcgctagaagcaagattgcatgctgcggaaacgatcaagcagagccggcaagaactgatcgtggttgcgtcattggtggaacgcataccaaatcttgcggggctgacgagaacgtgcgaggtcttcagagcagccggtctggttgttgccgacaagagcgttcttcaggataagcagttccggctgatcagtgtgaccgctgagaaatggctgcctgtgacggaggtccccgtggacagcgtgaaggcttacttggagaggaagcggggcgatggttactcggtgattgggctggagcagacggccaacagcatgcctctggaccggttcgggttcccggaccggacggttctggtgctggggcgggagaaggaaggcatccccgtcgacatcatccacattctggacgcgtgcgtggagatcccgcagctggggcgtggtgaggtcgctcaatgtccatgtcagcggcgccatagccgtctgggagtacacgcgtcaacaacgcaatcagcgttagcttgttgcttgtttttgctccattgaccattgacgacgaagactactactactacctgggagggagagtagaaatcaacatgcagcactcacaggaaggagagaaagacctgggctgggctgggccgacagtaatgaacgctagcccaccttcctttcccaccaccaagacgtacaagtcagactatattacttcatttatttgtgctaatatcgtaacgttttattgtgtaagcaatttggtacttgaagcctgcctgcatttggatttggagcggcatcagaagttttttaaagtatttattcgtagaggggtcgatcgagctcgcccttttattgctgcaaatatataatacacattattactgctgcaaacataagattacgttacattacattaaatgaaaagctatattacctcccgttctcgttatcccgctagttcatttttaacgaaacagtgacaaatatgaactaaacagcaacaaataaaaagaaacggaggggtactacgcttttttttatttcagtgcgcgcgtgtctgctccagacggtgctgctgcgcccagtccttgacgatgtgcggctgctgacccgacgacgaggtcgtggtctgaaggtagcggtacacccacgccagcacagccaccgcagccacgccgaaccctcccgacgaaacgatgcctaccgtgagcagcgccaccgtgatggccgccggcaccagcacggggctgaagatcaccatcaatggcgtcgccacgatgagcgccagcaccgtgcccgtcaccgccagccccgacaacaacaacatggagaaggctgccgtggctgtggctaacgccttggccaccgccatgggcgcgggcggcggccgctgctgctgctggtgaccgtagtgggtggcgttgtagtcatcgtcgccgtagaggcccctcatgtagttctctccgacggcctcgcttcttctccctgcacgatggtcatccgcatgatgagcagtggccatacaagctctggctagctagctagctagtatacaatgattcaaaagaaatagatgagtggagcagctagtaggttcttgcataatatatatatagatagatagataggataaggactgga

SEQ ID NO: 22973 - DNA, 1197 bp, Zea Mays
cacacttccaagcctataggagatcaataggaaggcagccggagttttgctgatccggaggttgtaattggttgtgaggatggtcgagcctttgtatatgatatgtacagcaggagttgctcacgtatttatcggcttcactcctctcctgtgacatgtttgatgataacggatgaccagctgattgttggtggatcaacttttggaaatgtagctattgcagatcaaacctcagggcagaagttaggtgttctaaaatcagatcatggaccattggcaataagatccttatcttcctgcacaaattcacacatgatatttgctggttcgtcagctggttatgcacattgctgggacttaaggactttgaggcctctctgggaaaaaagagtcagcccaaatgtcatctacagcacacgtcatttgcccggtgacacggcaacgctggcagttggaggcattgacggcgtgctccgcgttatatgccaaaggactggtgacatcattcgcagtcttgtcgttgacgcagatctcccagcagaagccacatctagatcccggcagcaaatagagaagaaacgtgttcgaaggattgaccctgatgcacagttggacggtatcccgaggcgtttgcgccctcagattaccagcctatcggttgggatgaagaagattgtgaccacgcatggtgaaaactacattagggtttggaagtttcgcatgaaaagttcgtaaaaagggcgagatgatggtaatctagttatctggtgtaacctgtactgtagtctactgaataagatggcgtggtaccgtggtgtgtcacctgcgcttgtaataatagcctgaaacatagttcatttgtacacttgtagtcctctttaggatactattagcaattaaaaaaatgtttgtgctcggttcttttttttttacaatagatcgctatatgaaaaaaagtctgtactcagcttacggtagagatgcctggtaagctaatgcgtggatgaaagctgaacttaaccttatcaacacattcaaaccgttgtagtttgaacctgaatgtatccaaacattgtcggcaacaggattgcttcaaaagaaagaagtgataaaactatgaagtcgtagactcatcaattaaatttttttgtatagattgtaattgtatttgagcttatatataaatgtaaaagttgt

SEQ ID NO: 22974 - DNA, 2057 bp, Zea Mays
gtgctctgctgctgcagcctgcagcggctttccttcccccaccatcgcgtgtgagtccacggtgtgatgtcacggagcggtggcggctttcccgatccactgtgcgggagaaatccccgtgcagccttcttccagctcttcctactctttgctactcgtcttcgctgatttctgccttaattccatcccttccctgcctagaacttgctttgcttcaccccatcacagcttttggtgcctcgtcatcggcgacctaaccgccggcgaccagataaactaagccaggcccttcgctccgaaagtcgtctctcgtagagagcacttgctcacctgctcctcgccctcctctgctggcagtggacttgcgcggagtggagatccatccggacctggttcgatttcttcatctcggttgcttctctgtccagtgggtggatcactggattgtgggttgtgctaactgcaggctggcttgtcagcctatcataaggaaagtgaaaaagagacaacaaagcaatttgttgtctcattcttaggagctggcgagcactcggcatggcagatgctagttcgaggactgacacctcgactgttgtagacatggatgataagaatcaaaggttagaaaacggacagagtggagccatggtcccggcttctaattcatctgaccggtctgacagatctgacaaacctatggaccagaaggttttacgacggcttgcccaaaatcgtgaggcagcaagaaaaagccggctgaggaaaaaggcatatgtgcaacagctagagagcagtaagctaaaacttgcaagcctggagcaagaactccagaaagctcgacagcagggaatcttcatttctagttctggagatcaaactcatactatgagtggaaatggagctatgaccttcgatttagaatattctcgatggcaagaggaacaaaataagcagataaatgagctgaggactgcagtaaatgctcatgcaagtgatagtgacctccgtcttatagtcgatgggataatggcacattatgacgagatattcaggctgaagggcattgctgcaaaggctgatgtgttccatatactttcagctccttgtgaatcagcttgagcctctaactgagcagcaattgatggggctgtccaatctgcagcaatcttctcagcaggctgaggatgcattgtcacaaggaatggaagcattgcagcagtccttggcagaaacgctggctgggtcccttggtccatcaggatcttctggaaacgtggcaaactatatgggtcaaatggctatggccatgggaaaacttggcacactcgagaatttccttcgccaggctgacaatctacgacagcagaccttacatcagatgcaacgtatcctgacaatccgacaagctgctcgtgcgcttcttgcaatccatgactacttttcacgtttgcgcgcactgagttctctttggcttgctaggccacgagagtaacatcacccccgttggggtcactcgatgaactgatctgtgaatgtgggactgctggctgcaaactcgcaaagcatttgcagatgactggaggatcagtcctctctgtacaagttgtattaacatcttctggtctcatattgtgctccagtgttgtacaatttagggaaaagcttggattaacttgtaagttatcatgaatttgttattggcatattgtacaattgtattagcaataaaaatagaagtacataagtgctggaagcctggaaggatatccagaatctatattggttggaaacgagcagcagaagattgttatagattgttatgttgctttgaatattcggttgtaagtgccttttttggggtatatagaacaaagaaagattcaggagagatgtagggattcaccagaggctatcggggattgtgcttctaggagctccctggactatctctagcaagtctcatattaagctctactctgtaaacagtgatacattgaattgaacgtgctacggttatgatggtaacatttgctatgcattttttaggatgaattctg

SEQ ID NO: 22975 - DNA, 846 bp, Zea Mays
gttaatttcgccggcctgtttggagcctgtttccgcgggtcggcgtctccctcgaatcggcaaaacaccaggggaacgctcccccgagtcgcgaccccgggcaagtttccccacgggcggggcgacgaaatcaccgctctgctccgacgtccagctctactcgcgagcaggacatcaccgcgcgtccaccatctctggcttgctgtcctccgcgcgtcatctccatccctggcttgagaagataaggctcctccttaccgaaataggaaagggtcactttcacaaaacgtgatgttggcatgtgaggtgaatgtggcgatgaagagatgggcttacagtgtgttaagtggaagcaacacatgaagcggacatggagaaggaagctggcatgacactaaaacgcataaagttgacttgtgacgttcatgttttagatgtcttattctactgccaaacttcctagtactccatttttatactatattgtctatctgtacgtgtgaatggagatgatgatattatgtgatgtgatgatggatggattagcttcgttgaatattagatgatattatgtgatgatgatattaaacgggcattgtagtattgatacatgcttcatatttctggatttttagtgatgttttattgtttatgagttttctaaatattccttatttttgtttgattttttctaaatttttgatgtatttttttgctcaagaggggtatttagcacctttctttccaaacaatgccaggaaaatatacctgggaggggagattctctccgggaaataaggtggcatataaaatcccctcctgggttagtttccaagggattttttt

SEQ ID NO: 22976 - DNA, 693 bp, Zea Mays
cccccaccaaaccgccgcgcctatcgacccagtctgtgaccacgtcccacgcctagtcccgctggccgctgtcgccgaaacacgggcagcaggagcagtagcgtccgtccggtccgcgcgcgttcccctccccgaccggcaggttccccggccattcatccgtttcccactgctcctccgtggctcagctctgctccctgtatcggtctgcccctctgccctcccggtctctcctcttcccgtcccgcccagcgcgtccaccaaggaagcccccacgccacggcatggggatcgtggaggaggcgcacaacctgcgcgtggtgggcgaggggaagcgcggggtcatcgtgctggcgcacggcttcggcaccgaccagtccgtctggaagcatctggtgccgcacctcgtcgccgactaccgcgtcgtgctcttcgacaccatgggcgccggccccaccaacccggactacttcgacttctcccgctactccacgctcgagggctacgcgctcgacctcctcgccatcctccaggagctcggcgtccaatcctgcatctacgtcggccactccgtctccgccatcatcggcgcgctcgcgtccatctccaggcctgacctcttcaccaagctcgtgctcctctccgcgtccccaaggcaaggaaagtgcaagtgtgtacacttcttggtacgtt

SEQ ID NO: 22977 - DNA, 2014 bp, Zea Mays
aacaaaatgtcccaagcagatccgcaagagtccagagagaggctcggccactgcaggcgggccccacctgagcaaagacaggcgaccatttcctttccttcacctcactggctcgctcgctcgcctttctctccgtgcggcgaccacggactgggcaaccgccaccgccctccctttccctgcgctagcgacgactgggcgaacgctgcctcgcttcgtcacctcttcgccggcggcgacgatcacccaccagttgctttgcaggttgatgccgattttttggttgacaatttgaagattactaacttctatgatcctgagggcaagaagtaatgatccgcccaggctcaaaggactcgcaaaattatgataacaataatcaaagagtccatcctcaaccaatcgacgataacatgaatcagaacggggactcaatggacactgtgatcgggaggatattcaacaacatatcctctttaaaatccgcctacattcagctgcaggaagcccacaccccatatgaccctgacaagatccaggaagctgataaacttgtcatagaggagcttacgaggctttcagaactcaagcacgcttacagagaaaaacatcctaagccaatagctgcatcccctcaagattcacgcttgctttctgaaatacaagagcagcagaacttgttgaagacctacgaggtcatggtaaagaagttccagtcccagatccagtccagagacactgagataacccatctacagcagcaaattgatgaagctaaacttcggaaatcaaagctagagaagaaactgaaacagaggggcctacttaacagggagtcggaggaatctgacgaagaagagaactacttttccattgaattgacaccaagtttgtttacatctgccgttgataatgcctaccagtcgatacatgacttctcgaagcctttgatcaacatgatgaaggctgcaggttgggatcttgatggggctgctagtgcgatcgagcctggtgtggtttacacaagaagggctcacaagaagtttgcttttgaatcctatatttgccaaagaatgttcagtgggttccaagaagaaagcttttctatcaaggattctaacatcagtgtttccaatgaggctttcttccaccaattcctcgcggtgcgagccatggatcctctggatgtcctgagccagaaccctgattcagtattcggaaagttctgcagaagcaagtacctatcgcttgtgcatcaaaaaatggaaggttctttcttcggcaacgtggatcagaggaactacgtcatgagcggcggccatccaaggacacctttctaccaggcattcctaaagctagcaaagtccatatggttgctgcacaggttggcgcactccttcgatccaaaggcaaaggtgtttcaagtgaaaaagggaagtgaattttcggatatccacatggagagcgtcgtgaaggacatcatcctagaagatgtcgcggagaggccgaaagttggcctgatggtgacgcctggtttcctgatcgggaccagtatcatacagtcccgtgtgtacctttcaggtgccaagtgtgctgactgactgactgactgaagatgcagcagctacacaaggagctagatagagggtcatttgcttcttggaatcttgggagagcttcagagctaccagctgcataagtttaaggtggactgtgctgtcctgtatgtaacgcgtgagagacctgttgtttatctgccgtgctgggttggacgccttttgccttttgtggagttttccatgtgccatgcgattctgtctaatggtacgatatgtttctgttcccctatgctgggtttccgtgtgctatactgctatgtaattctgcccaaatgtttgtacatgttatcagtgtgattggagagcctatgtgatgctcgtataggatgcacttttcatccgaaatgttttattttttttgacagatcagatgattgtattgtattgtcgtgtgc

SEQ ID NO: 22978 - DNA, 1576 bp, Zea Mays
tgtaacgcctcatctagtatggtgtgttcgacaagtgttgatgaagctcttatgaaagaagagtttgacaagctgtctgctgccctggtacaaggagcagcaacatgctcacctcccttgccactgacaactattgtagtgcaagatcataaagggatatcaaatgctgcacctactgattgcccactgatcccgctattggtaccaaagggagataagttggatggcacatcagaagataaaacaagaatccatgatcacataagcaacttaaagttctctatatcaccaacagcttttttccaggttaatactcttgctgcggaaagattgtatgcccttgctggtgattgggctaatctcaattcagacacattactttttgatgtgtgttgtgggactggaactattggcctgaccttagcacagcgtgttggaatggttgttgggattgaaatgaatgaatcggcagtttcagatgctcacagaaatgctcttatcaatggcataaaaaattgtcgctttgtctgtggtaaggctgaagatgtgatggggccccttctcacagaatatcttggttcaccacagcagcaggctgcagcttctaaaagtaattctgaaatcgatgatacaagcaaaactgaggatatgattggttgtgcaagttatgatggtgaaaatatagatagctcaaagcagagacatgacaatgctgaaggtcagcagcctatggacacgtcagttgatcatcctacctgtgcaagtgaggtggatgggatggacgtggttgattgcaatcatgatgaaaacaatgtggcttctggtgaacaaaattgtggggaagcatcattgattaatggtaaacccattgagacatcatcagataatagtttggagcaaggcaagacatgcaaggatggttcttccagtccaaacaacaatgtccttgctgctaatgcatgccagtttaagaatgtcgttgctattgtagaccctccacgtgttggccttcaccctactgtacatttcctgcaaccctgacagtctagtcgccaacgggatcgagctttgcacaccaacacccgagaaacaagagaagaacaaaggcaaccgagggtggcggtctatgagcagcgcgggtctcgctcggcagaggacgaagtcgatgcccaactctgaaccttttatccccaagagggcaatggctgtcgatctgttccctcacacaccgcattgcgagatggttatgctttttgagaggtgaaggaagtgtgtctaccaattggacgcagctggcgtgcctcagattcttgttaagagatttttgacctttgtgtcgaggaccatatctgtttttcctcctcaccttggcccatccatatgttgtaacttagtaacatctattcgattgagaggccatgacggttggtgttggtggttactctttcggatttgccttctgttcggctacacttaatcactggtatgtatttctttttcgtgttaaatggatggcatagtaggactaattcgtgtacgtaaaatgtgtgctagtagccatacctggctcagcttt

SEQ ID NO: 22979 - DNA, 1001 bp, Zea Mays
gtaggtagcgctattggggaaccaaggattctaattgtgttaaaaaagacagtggcaaagctccaatcttgattgctgtagcctattgtgtagttgcgaaggaatccgttccaaagaatgtctcagtggcatttcttgagaggttaaaggatgacttcatgaagagatatggtggcggtaaagctgatacagctcttgcaaaaagtctaaataaagaatatggaccagttataaagcagcacattcagtatgttcttgatcattcacaggaactagataaaacgttaaaagtgcaggcccaagtttcagaagttaaaaatatcatgttaaacaacatagaaaagactttggaccgcggagaaaagttgagtgaactccaagacaagacttctgatctacatagtcaggcccaggagttcaagaaacagggggtgaagattcgtcggaagacatggctgcagaacgtgaaaattaagttggtgattcttggaatccttttgctccttgtgatcatagtctgggtatctgtttgtcaaggctttgactgcaccaagcatgaaacatagtagtaataagaatggtgcagcacgactgtggcagagctgcgatggatgcgagtttgtgctggtgaggtcaagtgtgtacccacatatgctttggctctcaagttcgattccaccagacaagtatcacggtacaaatgtaagtccgagctggtctttgttgcacgccggaggtaggtgtacttgcaatgcaagactagcatgatataaagtgatagcatggttccttctgtactagctgaattcgctagaatctagcataaaatgcatttcaattaccacttatttttgctcaacctattaacatatatagggcggactgagttcaagatatttagtgttagctaggttaaaccatgttacaagcagaaatagaagggtttactgttttttttttgagtggagcgtacatgtttttttaaataacaagcatcaaga

SEQ ID NO: 22980 - DNA, 1459 bp, Zea Mays
aggcccatacatcccttgcctctttctcctcccccgcatctgcttctttctctccacgccaacccgacaccgcgcggtcggctcggctcggccatccccgccagctcccgctcgagatcccagcgccatgacgatcggcgtcgctctcttgctcgacctcacctcccgcctgccccgcgccggggcatccgccgcctccgcagccgtccgctcccaccccggtctctctaccaccgccttcgccgcgactgccgcggccgcgttgtcgtcctccggggtgccgctctccgcgcgccacctcttcggttttcatgggtttactgttgctcattgtgatgctggcacacctgctggatggaatgatggttctgatgatcttgttaatgagattaataccaagattattgattccttgcaatatgcaagaaaagactacttccagaacacaacaaaggaatacccttcagagctgaagccactcttttctgcctttgggttgaaaaattttactatcacaaccctaaggtctttcctattatattatttgccactcatacaacctaaacctcacactggttctgatgatgaggatgatgatctgcttcatgacactcaagagaaaaccatggatctggttactcccttctacaattcagtaaagcaaatcgtgcgggagacttctattgtaacgaccagacgagtatttgaaaggattgtagttcgtcatgtttcacaaagaacagcatggaaacttctcaaaggaaagctgcaagggggatgccaactccacagtacacatactgtgttgccagaacaactttccgagcacatgcactgggaataaccgctgcttgggtagtgcaatccataattgaagtatacagatgtttcatccgtaagcctagtgaggactgtgaagcactatcaagcgacggcaatgaacagtttgacgatatgaataaattcagattgtttgggaggaagatttatgggattaccatcaaaagttgtttctctttggttttggcctcagctggagcaggcattggtgccctcgtgcatccagtgcatggacaatggttgggttgtgccttgggagatgttgcaggtccaattatcgctataattgtttttaagaagatgcagctaccactatgagagactggatttttggcgaccactggttttgggtcccttgtgcaagtcatggccttcagtcttctgtgtggttggagatccctgatctaacttgaaagttcacagttgatgaataacagctttcacctcagtgctcgtagttttgtagctccctttacaagatgccttcgggtcttgtgggacatgagcatgtacttttgcagttttgctaaattttgtactgtctcagatttgaaggatccaaacaagaaatttaattttactagatttgaaaggaattggtttgagaagtaaactccat

SEQ ID NO: 22981 - DNA, 787 bp, Zea Mays
  misc_feature (787)..(787): n is a, c, g, or t
gttctcctgatttttcctttactatgggcacaactatttaaaacaggaagaagccgccgctgaggaggaggatgaaaaggagattacacaaggggaagccatctgctggcttttcatattgactatttggatttcagtactctcagggtacctggttgatgccattcagggtgcgtctgattcattaaacttgccagtggcctttattagtgttattctgcttcctattgtggggaatgctgctgaacatgcaagcgccatcatgtttgccatgaaaaacaaattggacattacattgggagttgcgatagggtcatcaacacagatctccatgtttgtgattccattctgcgtggtaattggctggatgatgggacaagaaatggacttgaattttcaactgttcgagacagcgactctctttataactgtactagtggtggcattcatgctacaggaaggcacatcaaactattttaaaggtcttatgctcatcttatgctacctcatagttgctgcaagcttttttgtccatgtcgaccctgatgcaaaacacaaactcaacagactgaactaagacaaaccttcaattgcaatttgtggattgcttagaaaacaaaatgtttaatttcaaggtgtcttatctccagacaaggacctgcaagagtcctgaatttggaagcaacttgtgggcagaatctcggaccgagggtttaacttggggctcaagattacaaggagctgatgcagcttttttaggatagcaacagcatcgcccgttgaggan

SEQ ID NO: 22982 - DNA, 830 bp, Zea Mays
agatgcacagtgatgagaactgaggaaaaaagaaggaagcttatctcattccaacatggaactaccaaacatgccagtacaacactactccgcaggaagcttttacagtggctcaagatatcatgaagacgatgctagaaaaggggtacgtgctcagcaaggatgctttggctaaggctagagcctttgatgagtcctatggattaacagctgcagcagcagccagggctgcagagctgagcaagagaattggtttaactgatagggtcaatgctggtgttggtgcaatgcgatcagtcgatgagacatatcgcgtaagagagacaaccaagacggttgctactgccactggaagaacggcagcaaaggtggtaaatggcatcgtcaccagcagctacttctctgcaggagccatgatcttgtctgatgctcttactagggctgccaaggccgcggcagatctggccgctcatggtaggcagaattaagtgaaaaatagacataaagttcatccttgcagttactaaacatgaggacgaacaccttcaagtgatgttgcttgatgtatatttatgacacaacagtgtcgtaaattaaaaggagacgatcactgcgtttggaacaaattgtttgctctgataagtttgattattgcaaatgtagtcaagtgatcgtgcagtcatgtttcggacttcctgcgcatttcatattcgcgcattgctgttgagtatctggagaatcaaagcaactgttctcccctagacaagtgttgtattacgaatataatatccctgattccagagcaaaaaaaaaatcatccttttttcaac

SEQ ID NO: 22983 - DNA, 1116 bp, Zea Mays
gacgggagagggtgacaatgtcttgttccgccgtgcagagagggaagagagcagtcaccgccatggctatcaatctcgggccggggcatgacttggccctcgataagggtatagagagcacggccgggtcacgtggaacctgcccaagggagtaatcaagcgcaaggagttgtgatcgggggcgatttctcgccggggtacatcatcctccatcgggccgccattcaccgtggccgaccctcgctccatctccaccgtcgttaaggactcctctattgagtttgctatcacctccacatcgcgtagagacttgtagattgggggttagttccctaaagcgttggcttagtacgtctccgacgggggaccaacgcaggaagggcggcgccgccgtgctcggatgtcgggtggggtgggggatggcccttggccattgattgcgaggaagatggataatattagaacgagagataatgtttcggccaattaaatctaggacgttcagatgtgatctggtggttaagaataggtcacacaacacacatggaggtctcttgggttgtggatctctaatctaggggctcataatgtgtaccgcttcagtttaaatattgatctcttctgaaccataggcgtcgatcagatgactgtagttagccgataccccttcggtcgagactaattgcataagagtctctgccattttgtttaataaacccgccatccgcatcaattcaaaagttattgcaacttaatcctagaatttacgttttccatcctgatctctttacaaattatgtttgtcgtctcgtagaccataaatgtacataagaaaattcagaaaaaggatttataggtataaaaataaagattctattttgtgatttaacttcaaattggctcgttccagttgcgttagtttcgtaataaacttgtctacattttaaaaacattatttgtatcattccacatacttttataaatggatattgatttaacttatgttagttatttaatcattctagtaaaagtcgatttaactataattataatctgactaagatcactactcaagttataacttagattaaaattgcattagttatttatttataa

SEQ ID NO: 22984 - DNA, 2722 bp, Zea Mays
atgttcattagattcaagttagtcacaaaatttattgtgaagcacagttaagtggccttcaaaatttggatctctgcacctccaagggttggtgcatcagaatttattgtgccgtattgcaagttcttgaagagcttgaactatcacttttcagttggaaccagatttaaagttggctgcgagaatgaagatgctaacgagaggtcctttggattgatcataggtattagtgaagttgatcccatacactggcctggatcaaaatggaaatctctcctggtatgcattttaagggctagtttggtaaccccattatcccaagggtttttcattttcccaagggaaattagttcattttctcttgggaaaataggaatcccttgggaaaatagagttcccaaactagccctaaacgacctgtttttcctagccaaagagccatagccagattttcctctcgttcttaattgtggtgtactatggtaccttctaataagtcatatttgacccactgaattttatccgactagcttgcaatgtacctcaacaagttggtaatggtcttccactttgctgttttttttttgggtggaagtaggatcaccattaaggttaaacctaagctagctatatatatgtcggggaggaaaagtgtaacgtagagaggtttgtgtacccaaatttaatatggtgcacaactatgcatgcagcgattgttttatagccccatctcgtccttggctgctttgttttgtagaaaaccccttgatatcatgcaccgctagatctgattttaaaggcaggagtttatatgtgcactgtgcactggatatcatcccatgcataaatatgatgtgatgaaggtgtaaaacactcttagcgctttttataatctaaccacctgcacagtaggaatagaaatgaatcttgtgtttaactgagtgagtacttatttagtcttaaggctatccccaacaatgtccggtatgtgctcctctccgctagatttagagatcgatggtgttctgtacacgtccaacaatatcctgtaaatgagtctctaaattttgccgcacgccgatcaccctctaaatatgggcaacctggcgcatcctctacaaacgtgcatcctctacaaacgtacgatcgagcagtatcactactattttatacttgttgtgccgtttcaggtggttgaaaatgattttttgactgtacaacaccagttctgtaggtactactgtagatatagaggaccaaatttaggggttattgctggagatgaagaaaatatagagaacataattttttagaggatactataaaggacagagaatattcttttagaggacgaaatttaggggttgttgctggagacagtcttaatgtatggcatgtgggggtacttgactttcctcaaactggaatttctcatctgtctgcatgatttacagataaagtgggatggtgctactaagtacagccaccagaatagagtatctccatgggacatcgagggagttggcagctcagtttcagttactcaccgactttcctcttctgtttcgaagcgaacaaaactgtgcttccctccaagcgatttggacacgccaattctagatggaaacggtcgtccagactcagtggaaactgaacgtttccacagggtcttgcaaggtcaagaattggtgcactctagtattcatggtactgcatgctctcattcatcagatagccccagatgtcaaggctcttatggcaggagattctctgctgatgcgtggaactgcaagatgaatgatgtaatgagtgggcctcgacacctaaatgccactgggtttgcttaccagcccctaggcttcagtgaatctgtcaaattctcagaggtcttgcaaggtcaagaaatgtctcaggcggttccttccttcatgagatctgctttcaactctggcacgcagaatggcagggttcgaccatttgattatgtgcagagatcagatgcaactcaaggatacgctctccagcagtttaatctgccagcaacagaagtgcattcgccctcttctgttcttatgtttaaccaaaccatggtaccacatgctgagctagatggtgcgaccaaccgtgaagaagtacatggcagcaggtacttgtcatccaatgcaatagggagagaagctgaaccatggccatccatgcagcagcaaagagcgagtgtaaatggaagcgagcctctcgacacaactgaagcctcagctcctgcaaggaacgctgaatctggatcggtcggcaggggcgcggggcgaagcaactgtaagctttttggtttctccctgactgagaagatccttggaacggatggtggtggtgtgaaagaagggaactacgaagtggaccgtcaaactccccgggtgctagacttgtttgggcacggttctacgcctggagctctgcatgctctctgtgctgctcccttgggaatatgatgctgttctgcctagttttacaacagttagatttatgtaatccttcagccattttcatcgcgttgtacttgaccaatatgtccagcgtatgatttccagttttaattgtatgctgatgctacatatcctctcttgagatccatgcatgagaattctggcagaatgaacagaggtaaattgatgtccagctgttttctttatgaacaaataggtaaattgatgtttaatttcagaat

SEQ ID NO: 22985 - DNA, 1938 bp, Zea Mays
gccgcaccaacagccaatccggacctctcgcctcctctctcgcgttgtcctcgccgcgccctgctccggttccccaatccttcgccccgcctccgttgcctaccgtctcctccgagccagatcgatacaagcggagccgtgatccggtcaacgcgcggagcgtgttagccggattctctcgccgtcgcctcccctcccctcccgccgccgtcaccgccgtttctggttgcccgggatcagccgagttggatctcgaggcgtgaagcgttgcgggcgcccggcgaggatacgatgcctgcggtgctcgccgcattcgcttgcctccgactccgagcggccgctgccatcgccttcggggactcctccttcctctgctcccatcgtcttaagcatcattttagtagtaattttagtattagtaattgtctttgacctttacgtttcctccgtcacccacacccccctccggtttcgttctggttgtgttcgattcgtggcttctttggctctgtcgcaggatcgaaaggaggcaaggtgttttaacgtggttattactacctacaagataacagaaacttgtatttgtaatttgagatcaagcttgtggatgggcgaaccctcagcggacttcagtgctgaagatgttagtagcatctcagatgatttggcggttgaggaaattggaatcgctcttacagaagtgacgacgatcgatctgttggcggttgacgaagggtcaggtctgcatgaagattctgatgacgattacatcgatgatccaattctttctctggaatctgattcaactgatgatttagtgaacgttgattttatatcacctgcctttcctattggtggtgtaacagaatcatcaattagcaattcagttgctgggaattcttcaattaatggcactccaaggttagtttctgcaatgaaaggaactcgtgccaagaagggaatcaaaacaaagttgagcgtttcatgggccactgatgtatatgacccacctattacttcagactcgcacactgtgaaagggcaccgtaagagttcaactaagggtaactacaaatacaagtgttccaagagcagcagtagcagtaaccacagtaccactggaagcaaaaaggacaagaagcattctaggcaccgtagcagcagtgggggtggcagcaaaagggacaggaaacattcttactgcagtagtgctagcagcaacagtagcagagttgttaccaacggttctctatatggtaacacatgcagtggcggtgggatcagcagcagcagcagaactacgacatgtgttcctgaatctgccaaggtatctacattgatggtagctgaaaatgcgacaccacaagagagagttcctgtattgaagacaccggaaccaatcaaatgtactaccagctacggcaaagagaagccatttgccttgctgtcgcgccagtttccccctgcaagatacaaggggatgttctccttctggagccaaaaccagctggcttcttgataatctgctatacggaaagctgctatacagaaagctcacctggaagtcttggttgctaattaaattgcactgcatctgtgattgttttttggtgtcgttctcttcgttgccatgtttcttttgcctgcgtctgaaacttcagagatcacgttttcgaaaattgctcagcgaagtgcttgtatatttgagtttatgttgttactatttcctcaccgaatcgtgtaattcgcttatcaatttcatcatgtgttttgtattattccatttgagatcatgcactattatttccacacctacactgtagcaagggactggtttagtcttctgtactttggttattatgttggaattgcaacgattacagtaaatgagaatgacatcacctgatgcttaggacataagacatgttgatttattcc

SEQ ID NO: 22986 - DNA, 2992 bp, Zea Mays
gaagaactagtaacagccatgggaggtcatttgctaactaaacactctatggacgtgaattttgtaatcgtgaaggatgtcttggctgccaaatataaatgggctctgaatactttgaagaagcccattgtcaccatgaagtggttagagcaatgctggattgagcatcgtgttgtgcctcatgaaccttacaggattcttccctttactgggttgaatatctgtgtcactaaactggatccagctttctaaaagacaacacaccttgattactatattgatttcttaacatattattacaaacctggaggtgacaaatatgtcatggcccaaaaatggggtaatatttacattgtgaatccaaaatgggttgaccaatctgttgctcgaagagcaacatcagttgatgattcagtatcaatgtcacaacatttgcctgcttcatttggtgatgcttcacggatcagcagcactgatattgttggtgcacctagtgtccaagagacagatgacatgcaggttgatagtcatattgctgaggactcagagccagaaaacgatgatctatatttatcaaattgtcgaatttctctggtgggttttgaagagaaagagttgttaaggcttgtcatgctgatacgtaatggaggtggatcccggcatattttgctaagtgagaagcttactcatattgttattggtacaccttcagatgaggaaaaaaaggaggtaagacgtctggctgcatggggtgtaataaatatagtgaaagtaacatggttagaagactgcaataaagcaaaaaaagaagtgaaagtatcctcaatgcatatagctactgagctcctcttgaagggattttctcaagtaagcatggaaaattctgctgatacacgtgaaactaaggtagccaaaagctcaggtgggatttttcatgttccaactgtcaatgacttgcatgaaaaacaccatgaaaaaggtgtgtcatctgaaaggaaaccaaaaagaggcaaacatgaaaacagtataagtaaaacccgatcagcagccaggactgaaaaatcaagtcaacagaatggattggccaatgttagcgagtaccagctccaatataaagtaacatcgataatgaattctggaagtagcagatcaaatatattcaaagggagaacattcagtttctcaaattcattttctcatgacaagagacctgaggttgttgattgggtcagagatggtggaggcgttatggtggatgacatacactcaactgctgcagatttcataattgagtgccacggacaaaacagcttgccttgtgacttctctcattcacttgtttcaactcaatggatacgatcatgtttggaggagaactgcttacaagatgttgggagtcatcctatcttctctcctttgcgctgtcgcatcccattcccaggatttgaaagctttcgtttctgtatttcactttcacaatatggagagaaagaaagacatctgctgaagaacttgtgctttctactgggagctaagtttacagacaaagcatataagggagtaacccatctcatctgcaaatttgcaagtggtcttaaatatgaggtttactccaaaagaggaactcccaccattacttctgagtggctctatgagtgtgtaaaacaggataaacttctccctgttgatcactttcagccaaaaccacttacatcacaggataaagatgcttatccgtgcactgccagccaatattccacacaggctaccagatttgattcctctgagctgcttagtggttgtcaagtaacaaaaaacaatgcaacacacaattctgtcaatgaagaaacaactatgcctgctgttagtagaaagagaagaatatctgttcctggtaaggttaacggtatttgtggaaacatcgaaaaaactgagaaacaactcgacaatagctctgtccctgatgtcgcagatgccatagaggttctatcatccaagattcaggatgtgcaatctccgaggagtatatttcaacctgacaattctgttgttcaagagcagaaagatacacactcctttgacatttcaaggagctggctgaacatgcaacagaagcaagatagcacctctgtcacaaaggttcaaaacttaaactctgtaccagtcccctccccagctcctactacttactaccctttcagtgagacgcagacagaatctcaggtcgttggatacgaagaagatttaacaggcaggcagaagatcatagacagggttcggtctcagagcattaatgtgactccgtcgagtgagattctttagttgtggaggcgaaccataacttctcccagatctgactgtcaaattgcgatagggaagatgtgttatgaaatctgcttgttgtgccatgtcggcttcaaattaagcagcatgaatggagtctacgaatgtggagtcgtattcctagccagatgacccgcgcagcataaatcaagaagatttccattgcatggcattcgatgaacggaacctcgcgctattacatcgtgatcttgtggatgtaaccacccttgtttgtagaactgacagacactaaacgcctgtgatccgtttggtcctgtacattaacaatcttgtacactatacaagagcaggtaaaggagttatatatatatatatatatatatatatatatgggtatgaacagatgtaacagttcatttttgatttaatgctcaattagtcgaggtagctggtgtagcactatgaaaatcattaaataaaataatgaatttagttaataatgatattaatagtaatgaattttcttttaagcgtgtgtcatttatttgcctttggaatgattttttggatgctcatgattgattttggtcatttaatagcatttcgttttaaataaaaatcctagtaaataatatatataataatattagtccaagaattaatatcttatttataaataattttagtt

SEQ ID NO: 22987 - DNA, 1519 bp, Zea Mays
ctagagcctccgcatcgcaactcacaggctcgactcttccagcctccgactccgcatccgcctccccggcggagcctctcgccaccgcacagcctagatccgcccagaggagctcaatctccccctcgaggccccaaaacgagatcctctgcattcctgcataggatgcagacagattgaggattctttgtttgtagaacgccatggatgagaggctgctcatgtttgatgtggttgatgacgtgtggacagtgctaacatgattgttcgagttggatgcacacgagagccttaggtggtttggacatgtcttcgagccaagagttgaaatcttgatgggattatgttggggcagatcttaactggaatacatatacggaacccggttggcagcagaggtagtgccccggtgcgccgcgcgcaggggcacgcgacagctacaaatattcggtggaggactggcttaggaaccttggatgcaagtgagttttcaattctttgtaagagaattcgagttgtgttaatttttgctttgcagactccaaatgtcatggtggcagggtgattggaaggaaatttgttgaggtggagatggactagaccaaggctaatatcaaggggtacctgtgagggaacaggactacactggatttggctcccgtctcaagagtaaagtgtgtttcagcaacctgctagccggccaccaaaggaccaattatctatttttgttgatgttaatatattaaaatctggttatagtaaatatacataatatgctgtcatctagatcaatacacatatatgcctttgagacataaatatgtgtcatgattcaactttcatgaatagtttttctcaacgactcgcatactaatgatattagcaaattatttaaaataataaccatgatatacaacttatataaattattatgttatatttgtacattttagctaaactatttgacatctaatataattgtaagttcataagcgtagatatattttctagatatgagcttagcggtaggtaattttgcttatctattaccgtaataagcttgatgactgaggtagacatctgatttatatttaatctaactgtttctctatgtgaatggatacatatattaactcaggtagcactacaactagcaatgtatggatgaattgaaggaagtaaaagaaggcagacaatcttatagaaactctgcatattgaaaccgccatgattggcaaagaagttggatgcatctttgcattggtgtgttcttatcaccaagcagtaatgtgaagcaagttcatttgttgactaagaacggatcaacacaaattagtgaagattttgttcacaagagatgcaggatggagaggtggtagatttcaatatggctttgatactattttttccacttacaatattttgtatggaacaagaaaaaacaatgtatgtggttactattgtaattcaagaatttatttctaaataataaatatatttgtttatattttgtttatga

SEQ ID NO: 22988 - DNA, 3661 bp, Zea Mays
acattctctctctagcggccccctctcaaacacaaacagccattctctctccctctcaaaactccaaactagagctagaggcctacgaagtagtaggaagctgctgctctcctccatagcccctaccccctcccctacgctgccactctatcgcccagccatacagcagctaccccgctgcctgtcactgagccagcgcggcgcaagtgcgcaaagccgagcgcgagaacccacgaaaccaacccagagcccccattaaggcaggctcgctgcagcacgtctcgcgctccatcgccgcctgtcctcttcctgtaatgtcactcccccgatgcctgtgcgcagctcagtggccatgacgacgacggccgcccgtgctctcgccgccctcgtgctcgtcaccgccgccgccgccgccgccgccgtcgccgacgatggggcggcgctggtggagatcaagaagtccttccgcaacgtcggcaacgtactgtacgattgggccggcgacgactactgctcctggcgcggcgtcctgtgcgacaacgtcacgttcgccgtcgccgcgctcaacctctctggcctcaaccttgagggtgagatctctccagccgtcggcagcctcaagagcctcgtctccatcgacctcaagtcaaatggcctatccgggcagatccctgatgagattggcgattgttcatcacttaggacgctggacttttcattcaacaacttggacggcgacataccattttcaatatcaaagctgaagcacctggagaacttgatattgaagaacaaccagctgattggtgcgatcccctcaacattgtcacagctcccaaatttgaagattctggacttggcacaaaacaaactgactggggagataccgaggcttatctattggaacgaggttcttcaatacttgggtttgcggggaaatcatttagaaggaagcctctctcctgatatgtgccagcttactggcctttggtactttgatgtgaagaacaatagtttgactggggcgataccagacaccattgggaactgtacaagttttcagggatttgtcttacaaccgctttactggaccaatcccattcaacattggtttcctacaagtggctacactatccttgcaagggaacaagttcactggcccaattccttcagtaattggccttatgcaggctctcgctgtcctagatctgagttacaaccaattatctggtcctataccatctatactaggcaacttgacatacactgagaagctgtacatgcaaggcaacaggttaactggatcgataccaccagagctaggaaatatgtcaacacttcattacctagaactgaatgataatcaacttactgggtcaattccaccagagcttggaaggctaacaggcttgtttgacctgaaccttgcgaataaccaccttgaaggaccaattcctgacaacctaagttcatgtgtgaatctcaatagcttcaatgcttatggcaacaagttaaatggaaccattcctcgttcgctgcggaaacttgaaagcatgacctatttaaatctttcatcaaatttcataagtggctctattcctattgagctatcaaggatcaacaatttggacacgttggacttatcctgtaacatgatgacgggtccaattccatcatccattggcaacctagagcatctattgaggcttaacttgagcaagaatgatctagttggattcatccctgcggagtttggtaatttgagaagtgtcatggagattgatttatcctataatcatcttggtggtctgattcctcaagaacttggaatgctgcaaaacctgatgttgctaaaactggaaaacaacaatataactggcgatgtctcttctctgatgaactgcttcagcctcaatatcttaaatgtgtcatacaataatttggctggtgctgtccctactgacaacaacttcacacggttttcacatgacagctttttaggtaatcctggactctgtggatattggcttggttcttcatgtcgttccactggccaccgagacaaaccgccaatctcaaaggctgccataattggtgttgctgtgggtggacttgttatcctcctgatgatcttagtagctgtatgcaggccacaccatccacctgcttttaaagatgccactgtaagcaagccagtgagcaatggtccacccaagctggtgatccttcatatgaacatggctcttcatgtctttgatgatataatgaggatgactgagaacttgagtgagaaatacatcattggatacggggcatcaagtacagtttataaatgtgttctaaagaattgcaaaccagtggcaataaaaaagctgtatgcccactaccctcagagccttaaggaatttgaaactgagctcgagactgttggtagcatcaaacaccggaatctagtcagccttcaagggtactcgttgtcacctgttgggaacctcctcttttatgattatatggagagtggcagcttatgggatgttttacatgaaggctcatccaagaagaacaaacttgactgggtgactcgcctacggatcgctcttggtgcagctcaaggcctcgcttaccttcaccatgactgcagcccacgaataattcaccgggacgtaaaatcaaagaatatactcctcgacaaagattatgaggcccatcttacagacttcggcatcgctaagagcttatgtgtctcgaagactcacacgtcaacctacgtcatgggcactattggttacattgatcccgagtacgcccgcacctcccgcctcaacgagaagtctgatgtctacagctacggcatcgttctgctggagctgctgaccggcaagaagccagtggacaacgagtgcaatctccatcacttgatcctatcgaagacggcgagcaacgaggtcatggagacggtggaccccgacgtgggagacacctgcaaggacctgggcgaggtgaagaagctgttccagctggcgctcctctgcaccaagcggcagccctcggaccggccgacgatgcacgaggtggtgcgcgtccttgactgcctggtgaacccggagccgccgccgcagccgcagcagcagcagcagaaggcgcacgcgcaccaccagctgccgccgcagccgtcgccgccggcctacgtcgacgagtacgtcagcctgcggggcaccggcgccctctcctgcgccaactcgtccagcacctcggacgccgagctgttcctcaagttcggcgaggccatctcgcagaacatggtgtaggggaagacgtagacgttcggtgaggcgccttgagtgaggccgattgcagggggagtagtttgactgacattttgtgggacgcagcgcaggagattaacatgggactcagtagctagggtgttgttagctgtaaaaaaagtcatgtgacgcaagagcagcggagcttcttcctcttctttatcccccctccccatttttctttggtggtctaacttactaggaggctgtattgatccatcatcatctctcccgttcctctgcttgatgatcttttgtgactttcgcggtcctctgtattgatccatgatcttttgtgacctctgctttattttctgggatctttacctcagaac

SEQ ID NO: 22989 - DNA, 134 bp, Zea Mays
gtccatgcaggtgttcgtcaacggccagtcctatgagttcttcaacaataggcgtcgtgtatggtggctatgatagtcccaagctaacatacaacgggcatgtgaagatgtggcaaggcaacaacaagaaattc

SEQ ID NO: 22990 - DNA, 637 bp, Zea Mays
atgacggcggggcgtcgacggaggattttctgggattgcgggagcgccaatggaaggtacacatcagcaaggatgagggccataaaagaggaacttggcgataacgatgatgaagaagatgatgtggctgcactagaaagaaagatgcagaatgcaggaatgcctgctaatatttggaagcttgctcaaagggaaatgaggcgcctacgaaagatgcaacctcagcaacctggttatagtagctctcgagcctacttggaacttcttgctgaccttccttggcaaaaggtcagtgaagaaagaaagcttgaccttagagctgcaaaagagagccttgaccaggatcattatggactaacaaaagttaagcaaaggattattgagtatttggttgttcgtaagctcaaacctgatgccaggggtccagtgttgtgttttgttggaccacctggtgttgggaagacttctttggcctcctccatagcaaaggccctgaacagaaaattcttaagaatctctcttggtggtgtaaaagatgaagctgatattaggggccaccaaaggacatacattggaagcatgccagggagacttattgatggactaaagcgatcacaaaaagatttgttaggtcccc

SEQ ID NO: 22991 - DNA, 314 bp, Zea Mays
caaagactgtctgaaatcttctagaaacgacatcgaaaggaacttcaagctcaacaagcgaaagcatctatacaaagactgtctgaaatcttctagaaaaacctaaaccctatcgggaatggagacgctctcggcgaagcaggagggcaaggtggacgtgaagctgaagccgacttctaaccaatccaactcgtaggcgagcggggaagcggatgtgccaactaaaagagtggtctctctcagcgcttgcttgacaaacgtgtgttattaaccgttgtatataatgttattaattaatgtcctttattccctga

SEQ ID NO: 22992 - DNA, 1519 bp, Zea Mays
tcccatttgatttggcccactgcagcccactaaaccgtcctgtacgcagagcccatgcacggttttgagacgagagcagctcagcagcagagcgccagccgccggactcccacgcagcacgtacggacgccatcgaggaaccctaacaagagcacatcacacggggcgacggtttggcgccgcgccaccggcgactggcggctggtgccccctctcggtccccactccccagcacggtgacggcctgctgcagcagatggtaaattatttctcagactcagagtgcaagaaagttggttcgtccagggaagaggaatagaggttatggttttgtgtgagattgattagcatctaccttcaaatcattctcttggtatttattgagcactgcaagtggttgaggacttgaggtaaacatgctgaagtgcatcttgagccagtcatggaagagaggagcacatatgctacatgcaggaaattcagcaccagctgtactaacttgctggagtcaatttcacagtgggcaggccttgttagtgtggtaccaacacagcagaaacaatcaagcaccagtaggatggggatgatcgctgctgtgccacctgaatatttgcatggatgtgtgcccttacagcacagcttcatgttgaggaacaatggacattgactgtataagcactactacaaagtcgtataagcactactacaaagtccgaacttcattcgtgctggcatattgttgggaatgtcgttgatattgccagcaacattgacagacccatcaactttgacatttgcctcaacggctgagtatgcagtttggctggctcctttctaggcctggttagctgtgacatggcaagcaggctgcagggtttgcctttattctggcacggtgaactctcgtggttcttcaatttgatggtctggagttcttccaggagcttcttcggcgtggaggacttcgtggacgaggacaacagtaggccatacacgtacaagaaggagaagaggtccaagaacccccacaagcacatctcgttcaagcagcgcaccatcgcccacatggagccgttcacgctggacgtgttcatctccaagcgcttcgtctcggcgtccctcacgcaccggtcgacctgcaggcaggtcgcggtcgccgggaccaactccaaggacatcaaggcggcgctcaggtcgaggtccgacgtgccggcctgcctggccgtcgggcggttcctggccgagagggcgaaggaggccgacgtgtacacctgcacgtacacgccgagggaacgggacaagttcgaggggaagatcagggcggttgttcagtcgctgatcgataacgggatcaatgtgaaactttaccttgactgagttcggtgctgtatgagtatgagtagtagttctgttggaacttgcgcgtgggtttatctgttgccagggttgcaggtcgaattattttgtgtccttatgttgatattttttttgctcaaatgaacatcattggatacccagt

SEQ ID NO: 22993 - DNA, 5328 bp, Zea Mays
aatgaatacacaagtattaatacggcgccctggcaaaatcacagaaaacatggtcttggtcttctccccccacccgctggcggcgaagtagcacgaggaaggggtccaataaaaaaaaaaatcgccaccggcggcgacggcgaggcggcatcagcggatacagcagcgggagccgcggcaggggacaggcgttgccgatcgatcggcctggcctggcgcggcagaggtcaaaagcgaaaaggaggagccgcaggaatttcttggcaccgaggcgcacgcaaggaatccagcgagtgagggatgggacggcagttttcggattcttcctgctgagtcctaggaactcacgcgcacgagcgtggtcaggagggagaggcttacgcggacgcggcggcgctggttttgatgaggaaagctggagcaaaagagggatcaattggatccaagggtgcgattgatgtgaatagtttatctgtttccacagaaatagcaggaaggccatctgatttaatgatcaaatcttgtacttgcactggaaggttatcatcttcttcagctcataatcttacagacacatatatttcaatgacctgcaaaagctgtactggtgaatcaacagaagacagaggtgggccatcgtgtagcggcaagcttaacaatatgggtttggagctcccaaggcctatagatcttgaggttaaatggatgactgtaaaaaaaaggcaaagggacaccaggagagcaagggcttcctttggcgaagacacaagcagggatggaattggatctttctgtttatctggctgtgctacaaatcaagagatggcgcaagacgctccagtctctgaatctgagaagtttggagtatccattcttggtagacgctttagtgatcccatggaaaatgttcctataaaaaagagaagatttcatatggatttttctccatcacctccattcactccattgctagtggatccatatgaaaagataccgggaagctcttctaaagctgtcagatcatatgagaaacattataagcttaagacgcaacaaattgagtataaggtgggaaacaaaggtcgttttggtgacgatgatttttctggtattgatatactagcttctgctgcctgtgaaagtgagatgagtggtggaatattagatggggagtgctcaacgttagctcacctcccagaagaaaggaaactggagaatactactggtagcagcaaattgagtctattacataacatggaggatacgttaaatattcctggtacttcacattgcatatatgatatgcctcttgggtcttctagatctgctccagatatgaagtccttatttgttgccacaccaactatcttagaaaatcttgttgaatcggcatctgctcccaaggttaattgttcattatattctgcactgaacaatgcaaacgaaatagagattgtttctgatgctaagtctacaagtgttgcaattgcaaacagttcagacaatccagaaaaaactataggatgtttaaaggatacagttgtgcaaaccaaccatgccaatgcgactaatgccaagtctacaagtgttgcaattgcaaacagttcagacaatccagaaaaaactataggatgttcacaggatacagttgtgcaaaccaaccatgccaatgcgactcgtgattctaggctgcactgggatcttaatgttgccatggaggcatggggcactgattgcggtgctgttgaggatcctttagttgctactgtaagtgatcatgatgatgccagaaatgacatgaacaaaccagggacatctcatcattttgagtcaagagatggtagtgtagttgatcactctgttgacactcatatggatgatgcactgaaacacgtgtctgctaatacaaaggatacatgtgattctcctgctgacagtccgtctcacccttcgcgcaacttgcagctattggaatctggatatgtagggagtgatgcccttgctgaaacaatggatttgcctgaccagaagaatagcaggttcgcttcagctatggattcacatattagatctgatccagaaccagctcttatcatggagcattttgcttcagcttcacatgtggagaaaatcaatggttcgcatcccgaacctgttcaatgtgatggtttgtctaatatgtcttctgtgaatgtccatattggaagtaattcactccaaacaagtgaattgggcaccacattaaagcctttggctagcatattagtttctgaggaaagcaaaaaccttccaacagtaggcacttcccataaaaaggttactgactttggctggagtgataataagcttgaagaagcttctgaacaaagcatatctgaatctaagaaccaggagcttttggatgttgattcagaaactagtaagaagggtgaacatgacactggtatattttatgccaacgaaaggacaaaatatgcagaaaatctcattcatccagaggacaaccatggatcttctaattgtgatatggctcatgtacatgaagaaaatggtgctgttgcaatgattaattctaaagactctttaattacttgtgccaacagtagcactgtagagacatattacatttcagatgcagctcctcaggttcctgttcccagttcagaatgccacaaactggaatgttttactgatgcgggcagcactgtggattcaaaatctgcagcgcacagctaccagaatggttgcgaaaatgagcttgggaaggtcatatcaaatgttcgttcagatcaatgctatgaaactgacacatcacatattagcaaaaatctagctggggttgaaaaagtttatgtcgaggaggacgattctcaatatgaggatggggaacttagagaatctggtgattgttattgggtggatgatggttatgaagatgttaaacatgccaactggcattatcaggtatcagattacaagaatgaagaagctactcctggcctcacgtctctccatactgattctgttgcaaataatgtggttattcctgttgctaatgacaatggaccacaatctagaaaggaggacattgctgtttcacctgtgtcatctaagtgttcatggttaacaaactgcttagatggtggatctatagctgatggaaagtctcaaagtattcatttgagaggtgatactaacatgtatgggtcaaacccaagccgtgtagcagttagatctgctacaacagtaagccagtctgaaaggtgcaacgatgccctaggtgatatgttaaatatcagaatgaagaacacaggttgggatatgatgcctgaagatcaaaagcactctcaacatgatgcaagggatgtgactgattcgtctaatcggtgtgttttgagctcagatgcggctagagacgatgattcactgcaaaaaaagggactattgaatagagatcttcaaggagtggaacggcaaaaatcatttgacagaccccagaggaatgaattgagcagatctgacgatggttatggctcaggctcaaaatctggaagggcaatggactctcatggatcgcatgacatgtatggcacatcccgtcatgttcagacaagcgctcgggtggagtgggtggaaagttcaaaacgtcctcgttctactcggcacaaatcacctgaatattataattatggcacatcaggtccaaggaatgctgcagaagctgctgtggcaaagatgcagagcagtggctttgttgttgcacgtgatggcactttagtaagagctgttgatgctgcaaatgctggtcagatgcccagaaggatgcgaaatcctttaagtagctcatgccacctgatttctggatggggttccccagttgacagggatgaagcctgtgggatgtccagaggccccgtgcatgctaggaaagcatctccagagcgtcactttggtgcaaatagtaaccggtccagtcgatatggttctgaaatggagaaaaatcatactactgatgcaaatttgagttctgtccattgctcgctgtccagtagacaacgaggcaccccgacatctagagcatcacttaacctttcccgtgctcacagcagatctccttctgggtccaggtctcgatccccacatgattgggcacctaggaacagaggcaagatcatggcaaatggaggttcaactttatggaagcatagtagatctccacctaatcacatgactaaaggtgaaattggtagaatggcttcacctcggagacaacctggatatgatgatcgagctatgtgttacagtccactatcaagaaacaacacatactccaagaatgcttcgacatgggttgatggaaggaatggttcagcagtggatatttctgatgatcataataaaaggtattcaaggagaagctcacctctgagaattacctcacggaatgacagatttgatgtcatggactcccaaggacgaccaaggtctggagaattctaccgtccgacacaaggaagacttctttatggttacaatagggaaaataagcatggcagaaatggtgaagatggaagggaatgcactgatagatatgcgaataattctgtcaagcgatatgaccggagtggtgcagtaaagcaatttagaaatgatactggtgataaatttcggactcgtatttctgctcccagatcgccagatctccaaaggggggtgagtcctcggagatttgacagaagctttgagaggtagctgactagctggctgtgaatttgccttatagaactaaaatggaaaataaagacctgtctggatgattgagccaggaaatgttgcaaaaccttgatggagttcaatcataggggttgatggaggactcttggcagcactgtttttttttctgcttctgctgcatatattcaaggcacagaaatgttggaccatgcacttctgtacggggaattcagattaacttcataattttcctgtttcagtctgtaaatatttatgttggtagcagaattacaatcactcctttcagctttattatagctgttcttttttttaatttctgatactttatcatgtttgtcccttttgttttttcaatgggtattgtccctgtacgaggtccattttaacatgatgaatcaattaaattttgagctcaaacacttgtgtgctttttatacttatgtttttcatctggcattttgtatcatcttgttgccagtgtaaaatgttttatttgttgttgaatatacaataatttacagtggcctgtgaccatgttagacaacttttggatcagctgaggtgaataatttt

SEQ ID NO: 22994 - DNA, 2426 bp, Zea Mays
cttttcattcgcccgccgcttcgctcacgctcacgccgtccccagtccccactctcccccgcccccctcgccccacgcatgagaggagagcggccggacctggaagcttctccgcggcgctgcgtcgccagctcgcagcggtgactggtgtcctttcaacttgaccttcgccaccgttagctagactcgttcgtgatctcaggtatacaatgtttacatacattattcatagattatgtaattttgtttgttatggtcatttaataggtactatatagttattagttaataagtagttattacttatttattacttagtaagtttttaggcattattgagttagtaatccgtgtttgcaatagatggacaccctagtgacactataccatggaggaagcgtggagcaagatgtttatgggaatgttagtttttatgctatgaagaatgtgaccgtgatgttcgatgaaagaccctcttttggccagattttcgctcgggcttgtgaggagattagttgcaatttaaacgaccctagcatatcaattgagggtttattgtcccatgttacatctgggacagttgttcgacggttgatctccattgcctctgaagatgactgggtgaaatatgtcaaaattgtgaagacaattgttcccccatatttggatgtggttgttcgaaagttatcgtttagtcattgcgatgctccagtcgggttatctccacaaatgccaaatgcatgtcgtattgaagctcctttgcctgagcttccggaagaagtggttgttgtgccagatgctcaatcggcctcgaacgagtttaagatttctcgtcctgttcgcggcgtttgtgggtcttcgaatccggtggtaccccctcaggagatcccattgatacaggatccaatccaggatcatcctagatctccacaactagataatggtgcttatcttcatgtgcccctatcattcaatatggaacacatatgcagtgcctcaaatagtgttgatgttcagattgaggatgaggaggagccatatgaggctgcacgagccttagattctgatgatgaccgcccggttcaagaaatgaccgagcaagaaattgaactcataagacgtttgtgtcccgagcgtgaccctgcagtacatgaatctagcagtctaagtcattgcaacggtgcatatgcagaaggacgtgatgatgaattgctagaggcttcggataacgccgacaacattgatattaaggtaggcttacttttcaaagatctgtctacactgagacaatggctactggaatattccgtgaaccgcaagaggccgttcaaggtgagacactcatatgcacagcgtcgttacacagttgtgtgcgaggtgtcagaatgtaattggagggtatgtgcccgaaggcagaaggaaaccggaaagtttaaaatcacaaaaattgtaggtccacacacttgtgcccagacagagctgagctctaagcatcgtcatttgacatctaccctaattgcgaaaaggctattggggacattgaagggtcagccaaacttgaaggtgaagtcaattatgaccatgacttgggagttgtttggttacaagatcaagtatgggaaagcatggagggcaaagcaacgagcatggaagatgatatacggggattgggaggagggttacgagaagttgccagcattgttcaatgcaatgaaagctaaaaacccaggcatgcattacgagtacatccctaaacccaacgaatggaggaatggcagagagatcttctttcgtgctttctggtgtttctcgcaatgcgtagaggccttcaggcattgtcgtcccgtgctgtctattgatggtacttttctgcttgggaagtataagggcacattgttggttgccatatcatgtgacgcggacaacacattggttcctttggcatttgctttggtggagagggagaacagagagagttgggcttggttcttgcgacttgttcggatccatgtcgtgggtcctggtcgcgaggttggtgtcatatctgacagacatcagggtattcttaatgcagtgcaagagcagattcctggctacgcacccatgcaccacagatggtgcactcgacatctagcagaaaatcttcttcgaaaggatcgtagcaaggctaatttccccctttttgaggagatctgtcaacaattggaggtttcgtttttcgaggacaagttgaagaaactaaaagatgcaacaaatgctgaaggtaagaactggattgctggattgttgagggaaccccaaaaatggacaagtgcctatgacgaaggtggttggaggttcgagttccagactagcaacatggccgagttatttaacagtgtgcttaagggtatacgcggaatgccagtcaatgctatagtaacata

SEQ ID NO: 22995 - DNA, 3087 bp, Zea Mays
atcgagacaaaatatctaccggggatgtggtggtggatgctcgggcattcgtcaaaccactcatcatcccatcccatcccatccaagggaatccgatcaatcccggactcgtcctcccggccaaccctagcttcccttctcttcccctcccccgatggacccgccgccaaccagggacagaggggaggagctggagcctgaaacccgcgccttccccgacgccgacgacccggagacctcccgatctgaacgcgaagagggtatccctccaccgccaccgccaccgcctctgcgccagcagctcatgggggcttgccgcgccgacgagcgcctcaggccgctcctcaccctcaacgtctcctgcggcgcagcggacgaccgactcatcgcacacctcgcgcagcacttcgaggtgtcggaggtgggcatgctcgcgcgttgcctctgtgttcccctcgtttccctgcgcgttggcaaggttcagagggaaggggccctcctctgcccaacacacattaggttggtactctcactcaatctctacttcgcttcatcatcatatatgacactgatactcactcggtccttaagatagcagtgcccgcttgacccttatgatttcgcttgatgcactgtctctttcgtgattagcatttcgcatctcacatgatttgccagctttcctctttctcaacttgtatattcttctcgcttgcagctagcctttatacatatatacatattaattaatgttacacaggttagccagttgatctgatgtttctataactgtatgtgctcactatacgatttagcctcttctttcacatttaagtaacatgcttgtgataattagatcgcttccttggaagcatatttttcaccaccaattgagcatgaatcagcctcctatactctgtatacttgcaaccaggaacttgtcttgtggtctcataggatcctaaactctcatattgtaccatttattgagatgacaaacttgccctactaaaaaactttgtactgcacctcgatactcaacttagcttctgatttcatgtgaaagcactgtagtatgttgattatataatctggtatttcaaatcttttaagttttgcatgttattgaccaatatgtccttacatagatgctgttggaatgatgaagaagtgatcctgtagctttctctatgtctctgcttccaggaaaaaaaggtaatttgggcgtttgtcataatctctgatatatgaggaaagagaagagggaagctgaaccttgttcttctgccatcatctagcatgcggcttacctttgtttgtgatgatggttatccagagcaactagctctcttgagcaatggctttgaattttctgaagttatgattgaagaaatatcagctgataattctggacgctctttcctaatcagaatttcagaatctaaagtgttttactactggtgtgctgagaagtcgaaggaacatggaatggaacttcttgcaaagatgaaaaaccttttggacgggaggccaacactctctgatctcactggcatctctaattcacgacttgatgcttttgccactcatttacatgcttatcttcttgcatcaagtatcggtgatgttacatcattgggctcacttaatgacttcctgagtacttcaagatcacatgatcaatatttacagctccagtcagatttttccaaaacttccaggttccgtgcctcggctgctagtgcaattaagccaagctctgtctatcaagccagcctaagtccgagatctggcacttttaaagatggggtaccaagggcttcatgtgcaagggttgttgggagggacaagctgaagcgtcgtgtggaatggttaggcccgttaactgctccgcttgatacgaatcctttgacaatcaaccctgattctgccagtgagaagtgtgatgcagattgttcaaagaacaatgttagctcagttccgttggacctgcctctttcgtttcccctgttgccttctatttactcccttggcactcgtccggttcctgaggtttctttggagaaacagtttaagccttactattgctggtgcccaccatgcccatcatcgctgcaatacactgtcacccatttgcatctgccagctacacctgtagatccgttgcccctaccacctttgagttcactgctagcaagtgagcagccaccttcttcaacagtttctgtaaagctggatacaactgatctcccttcccttaatcttccgtccatactgcattcaccacttattcccctacatggtccacaagtgccaacattcacaccattgatgtccgatcccattgtgcatgtcccagtcattgatgtttgttcggcgggtcaggcctatctagtgagttgtgggccgtctataacttcagcagttcccctgctcccgagcttgaagcctctgctgccagaagcagagtcgttagtcgagagaagcgcaagggaaacactgatgaggctcatagcttcgacaccacctgcaagcaatcctctacctggaagtatatcctgggcgaataacaatgtgaagaagcatgttgatgtgtgtcccaatgaaaaagcatccggtacgtcttgtgttgctgctgtgtttggaagtgggattgcacacgctgaggatgaagttccaagcggaggtgattcacaagagccgtttgccgaatacgatggtaccagcaatgaatgtgatgtacatcattggcagaaattctagcttggctgcatcagcatggtaaatagggttttgaggattcgggggtttgatgtcctgtacgcagcagcagccttaaaagtttctgtgcccagccagcatctctatttggtttgcaaatgtaattactagtttgtactgtcttgtttttggcaaacttgctgcgagcctcgtgcttagtttggtttatttatttatgaactttaggcctgttcgaagcacccagtttgtaagaaaatggattatataaactgaagtgattccaaatatatcagtttatgtctcagtttataaaaattggattaccagtttctaaaaaaccaagaa

SEQ ID NO: 22996 - DNA, 1587 bp, Zea Mays
atacaactcccctgtcgcatcatcatataaccgaatggagacgcctcaaaagaaatggtagaatgggagttcaagagcaaggaagacgggaagatgcatgcgtgcggccatgacgcccacgtggcgatgcttcttggagcagctaggttgcttcagtctcggagggacgatttaaagggtacagtgaagctcgtcttccagccagccgaggagggacacgccggcgcataccacgtcctcaaggaaggcgtcctggacaacgtgcaggccatcttcggcgtgcacgtggacacggcgttgccggtggggctcgtcgggtccaggccagggccgttcctcgccggatcggcgcggttcacggcgaccatcacggggaaaggcgggcacgcagcggggccgcagcacgtcgtcgacccgatcgtcgcggcgtcctccgccgtgctcagcctccagcagctcgtcgcccgcgagaccgacccgctacagggcgcagtacatacgtccctcttgtgttgtgcaagaccgcaatgcagcttcaaatatgaactgcttctgcatcgatctgctgcttgcaggttgtgtcggtgaccttcatcaaaggaggaggcggagctttcaatgtcatcccagaatccgtcaccatgggcggcaccttgaggagcatgacgaacgatggcatgtcctatctcgtgaaaagaatcagagaggtgatacaaggacaagccgccgtgagccgctgcgccgctacggtggacttgatggaggagaagatgaggccgtacccggccaccgtgaacgacgaggccatgtactcccacgccaaggcggtggcggagagcatgctgggcgaggccagcgtgatgctgtgcccccagttcatggcggcggaggacttcggcttctacgcgcagcggatcccggcggccttcttcagcgtcggcgtccgcgacgaggcgacggggaaggtccaccacgtgcactcaccgcacctggacatcgacgaggccgcgctccccgtcggagccgcgttgcacgccgccgtggccatggagtacctgaacaaacacgcaccatgcaaataaacacaaggctctggccatcccgataatacatgtcattcttattgaagtgactgcatgccgcaaaatcttccctccttggagcggtaagaatttgctaccccgcatccgtgctctgtacgtcgaaaataaatgtgtccagacatccctgaaagattggtttggttgtactgcgcctgttccaccaattgtatgtaaacgcatgtgcctgaaattcatgtaatgattaatttagattgcaaacggtaatagtaaatatgaacaacatttgaaattaaattacagccccgagaaaaatattcaagggggccaattcaaatatgaacaacgatattctgaattcaagggggccaattcaactaaaaaacacacactcggactatattttgtatttttctctttattttcaatagtatattcaagcaactcaatgctcgtccctcttttctttgaaaagtctaataaatatgttcacattaaacattgaatgactcacataatttctatc

SEQ ID NO: 22997 - DNA, 3109 bp, Zea Mays
atgaggaaaactgttttcgctgactgaggaggacagctcaacagtacagtgcaaaactcaacatccaaagagcagcagcgatgttctagttcaaagttcaagtgcgtcgaagatcgttctggagaaaacattgagcaaatgcacgaccgagaacagcagcctttccatcgaatcgtcaagcgattcgtcttcctcctctccgtgcacgtccttctcctccctcgatggcaacaaatcagtccaacaggagcttccttacaccagcgaggagctctttgcgcagaggccactgaagagctcgccgagtctgagggaacctgacatgaacgccaagtctggccatcctaatgccggtttcagagacatagtgaaggactgcatcaaccgggactccggaggcctgacggtaaaaacttcggtgcacgaggcaaggagaaatgggcagcacaaggactcaccgaggccactgctgctgtccaaatcaatggatgggacctgtatcattgggatcgataggaccacaaatgttcctgcaaatgtcaatggatctagaaggtgtttgcaggagcagtcacgcttttcttgtgatgaccgaaggctcctgcgaccaactgaaacccaggaaagcaagaggtcttcctcgaggccaaaggagcttcctagattgtccttggacagtaggaaggagtctctgagtccaggctcacgtcagaaggacctcggttacaagagaactgatgatattcttctggatactttgaggcctcaagattcccctagccatagcagagctaacagtgtcattgccaagctaatggggttggaagaagcaacaaatgctacaggagtgctcactgccgatagctgtgaacccacaaggtcaccgagaccagctcagaccactcaatatgggcatccatcacgctcccccagaggcacttgccaggattcctgcagcatgcagctgaagaacgagtcctcagtactgaaaaccaagccttccccacgaattctcacagaagcagctccttggagacagcaggaaagaagtgtcaccaatatctgtcgagaagctgaagggaggccaaggattgcatctgtctatgctgatatagagagaagggttgggggcttcgactttttagagtgtaataacaaggacttcagggctctcagaatattgggtgcattgaatgtgagagatgctaagaacaagaatgacagcagtggcagaccaatggctactcacagaacaggatatgacctaaccacctctggaagcttccaggctcctattgtggtcatgaagcctgcaggaaccactgagaagcatggggtttcacttgcttctgttgcccccatagcaggcctcagaagcctcagaaagttgccagctagatattcatctttcactggcacaaatgaggccagcacaaatgagaatattcatcttcagatgtcaagagctcaattgaagtctgaagaaactgtcagcagtgccagctcaccaaggcctacaagctcatcgaaccccagaaatgtgctaaagaaggcagaacctgaaagaagatcccgtccacctgtttcaccaaaatctccaagcaagaagtccaatgaagctgtctccccaaaaggaagaacaagatcaaagccttctcaggtgaaaagccaccgtgatgaggtcttgcatagtacagggaacagaataagcttagctaagcaggttgacgtcagcgttatagattgtccaaagcctccgggtggcaactcaaccttcgttccaccaagcaatgctgctgcaacagcaagtcacaaggctccttcaattctggattcagaccaaaacattcattcactggacaacattccaagccctgtctctgtccttgatacatccttctatcataaaaggatctcagattcattcaaagatggtgagacacattcttcagaggaatgctggaacccaaacagcctgcctgacacaccacagtcaaaagcgagcagtgaagccaaccagattaaaccagaaaatttggaagttctgatccagaagcttgagcagctacagtcaatgaacgaagaagacgcaagtatcaaagaagtcatggcatcagtcactgcaaataaagatcaccagtatatctatgagatactgttggcatctggtcttttgcacaaagaacatagtatcacggcattacctgctcaactccaaacatcaaattatccaatcaatccggagctcttcctcattcttgagcaaacaaaaccagacttagttttcgcattccaagctgtcagtggaactaagaaaacttgtaagccttacacagggaagcttcaccgaagacttgtgtttgacctggtaaacgaaacaatagctcaaaagatgatcatctgcagatctggaagccagccagcaaagtttcttcaatcaaggaagttgagtgggtggcaactattcaaggatttgtgcactgaggttgacaggcaaataaaatgcaccggggaggaggagaatggaaacatgatattagatgaggatacagtcaatggaacgaaagactggatgagcttcgacactatgctacatggcatagtttgggagattgaacgatccatcttcaagggtcttatcgacgaggttatcggcggtgagactatagagaagatgcaatttgggcaaaggaaactgcagaggcagctttctttcagtagtataaactgaatatgcgtcgtagcagtcatttccatggaagcttataacaactagtaaatgtgacagtttctattttttctgaagactaaactgtacaagtataaatgatcctcaacactagtcttgctgcctgactattgcaattcgagatttgtgtgacatgactactgtttgactctactaccggtcaaggcgattgaagtgcacagtaccccgcgtgtgcatggtggacccattatatcaagtgtttataggaatgtcgggtagatgataacttgagataaagttctcgttttttgcatttattgttacggatgatgttgcggtcaaactgtatgccgcaaatgtaccaataagcactatattgtccatgcggctacaacggct

SEQ ID NO: 22998 - DNA, 1067 bp, Zea Mays
cattactaggccaaacacaaattccactcaagatctacattgccgaatgatcatgacattggtgtagggtttagtgtacttaccatataggggagccgatgatcctcttggccataatcgtggcgccatctttcttcgccactcccaccaagcgaggaagtagtatgcttcctggggttggggcttcttcaacggatctccgcctcctctgatcgccgctatgtgtaccggccaccgtcgccagcgatgaagtcgaggagatgggcaacagaggaggaaatctttaatccgcaactgggacgcacccaggacctgcactggatgcgcgatttcgggggcggctgcaactggcgcagcgcttcacttcgttgctgcgaatctcaagcagcgactgcggcgggaggtcgcggccgtgggcgacgtgtggcggcgcctggcggctggtcagagtttggtgctttaaactcgcgcggcgtcagtaatcctccaatgccaagcatgacgatgttgggggcacggtgtcccctgtatttcggggatcactaggctatattttttttttcattaagctatgtttattttattcctaaacaaagaagtagatgatcatttggatacgataagttatgtggagactctgtatggtgatattaacagagcaatcgcataggtacaatacaaaatcatgccttctttgcatatatacacacacatcaatccactgtcaaaattgaaccaaatgcttgataattacaaagcaacgttaacttttcttctccaaatcccagtgacttgatactacgctgaagctacagaatcaacaaggagagctaagaaagtacgtacaattcctaagaatcagaagaaacccttaacactaggtactatatatacctacgatgaggctgaacgaagttcaactagagaggcatagaacccatccttgatattcatcagcgcctcgtgccttcctttctccactatgacgccatccttgagaacggcgatgatatcagcgctcttgatagtggagaggcggtgcgccacgatgaccgtcgtcctgccga

SEQ ID NO: 22999 - DNA, 3519 bp, Zea Mays
ccgagaccccgacccaccccgcctcccccgccgccgcgctcgcgctcccccgcgacagccgccatacgccctatctccgccgtgcctgcgcctcctcccccgcccgcccgagacccgccaagtttcccttccttgcacggcgagatccaccatcggcgcccccttccctggcgagccacagccgtccatgttcctggccaccggcgacctcccttctctagcccttggcggcgagccaacacctcctcccatggctgccccccagaccccagtcccgtccgcgcatccgctcttccgtcagcgacgcacctattctcccctctctccccgacgtcgcccatggcgtggacggcgacctccctcaccctgcaactctgcacgtgtaagggccgtgttgcccgcctcctttccccacaccggcgcagccccctgtcgccgcggccccttccccaaacagcacggcaccacatgctccccctgccgcgcccgcactctccttccccaaataacacggccccacatcgctggttgcctcgcctcgccggggacccagcacgatggtcagggagctggtgggtgggggagacagggaggagcggaggaggaggtcaagctcaacatggacattgtgttcgtgacgctgccttccccaccgacaccaacgactcactccagaacccggatctggggcccttcctcctcaagccatggtattgggcgagggtggcgccgcctcgcgtgcttgagttcgccgagcgcgccgccagggtgctcgagcgaagaggtgagggcaccgagctcgagctcgccatgaatctccacatcgctgctggcatccactgcggactcagccaccaagccctgacattgtagccagtttcttgcaatcagaacgaatgccagttggtaaccatttaacatttcttttgctgtgtcaacttattggagttggagagaggctatcactatactgacctttatatcatcagaattgacataaatgtgatttacacgtagatacaagtttgtggcagagatttctctgacacgccaatcagtcttcgatgcgaatgcttgttgctcatatggacttgtggttgtgataatgagttcatctccgtgcacatttgtcgtccttgtggttacagcagttaactgagtagtctctcttgactgcaaaacaagcaatctgttgcctctgctgtgatggtggagcaatttcagcgccaagaatgatatctcgcattttagattgtgtcagtgcagaagtattaacattgtttttctttgcataatcagaaaggatgaggtcccttagtgcacactcaaccttcaaccactgttcatcattcagagatggccatatatgatgtgtttcagtaataattgttttgtcaggtttgagcaacatctttgccttctcattattcacatgaagtgcacgtagaataagcacaatgtgggagaatgttgtgtatgatgatatacttttcaaccaatcatcatatatattataaagaaccatctgtggttcagttgccttcagtataagatcaccaaacttctcaatcttcaagcaagcctggaaaggaagctgcagctcactgcccttaataacaatgttagggaagtcaggtagatggacctccaagggatccaacatgcccttccttgtcacaacaatttgctttggctgctcttctacaggaagagatcgaaccaatgcagcaacctcctcagcggttttccacttggccagctgcccaagacgcttttgccccgcccatacacttgtgtggataacctgcacattattatccatactcagtttaaacctacctatgttcagggttttacagaaaaacaaaatcacatgaaaactagagcagaaattcgaaaagaacaaaccttaagaaaaagttgacccgttcttggattgaaaaatgaaaatagcaccattaattggtttggtggtcaagttaccctaaaatgttttgtgaatagtgactcgatacacatttgtatcatccacgaaccatatgatttgattgctgaatatctctccatagttctgtgaagacaggtatggttcatatattcaaatatccaaacctcatttggagttgtgataccagcaacctttgacatcgattcaagatgctactggagtgttattcatatgccactgcacaaatggacgttgacacgttgtagtgatcacactgtcacgagagctgagcaaactacagcctgcaagagctacacgtggcatgcttgaccacatcatggtggagaatgcaagtgttaaagttgcattgaatcgcattgccgttgtttctgtcctggatgcacataccctgtcagtgatgtcttatgaagcttggaggctcatacatctgtttctgttggctctctctagctatatgcagtggagctgctaatatgcatgaagtttgggctaggtgagcttcctctttcacttttcaaaccagtataggtattggccgatgtcaagaagacaaggccggcgacgagaggacgacagcgtgcaagaagagaaggcccatgttaggcgcaactatagggctcaaggtcaatcagttgtggtcacacttttccatttttacgttcagctaaactgaccccctgtctcatggtgtgccagcccccatgatcctcttctttgttttatccattgtttttgctttgatgagactattctggaataatatcatggaatgcactcttgttgcttcggtaggtgcaactgtgcaaggataggcaacaagtgttcaacaatatgtctgtggatcaattgacctgcatttcagcttttagttgaggatcaaaatctcgtgtcgttcagggccctcggtagagagacattaatgtgtcggcaccgtggatcgtcgcagttgtgggtcactgtaacggcactggtcacaggcaccatctgcctctgttcgtcctcctctattggcctcctcagcacctacagggtccagatggaaaagtttctataatacatatgtaacaaatacatactccttgttcaagagatcgtaagcaagattgtaaacggtatccaacgcagaagcacctaatatggttacagagtattactgatgggcttacctgcagactgcatgctactactcaaggatgttgttgcaaatgagttgtggagaaccgtagatgcaaatggttggagagcatcttctgcaccacacatctattggcctcacataccagctgaatctgagagcaatgggtacttgtgtgtccggtgcaacggcggcttgaccttacaaatcagtgttgtatgactaatataaaactctctctctctaaagtagcatagttcaccatgcaagttttgtgtattcatggcaacatatctgaaagatttaagattacttctaccttgattttgtagatatgaaatgttgttgtcattgcacgaatcattaatgacttgattttgctctctatatgctatcttagaagtttcagagttca

SEQ ID NO: 23000 - DNA, 1776 bp, Zea Mays
attttatacttgcatatagcacagtggccattattcaatgtgcgcaaggatgtggctcagtgtagggttctgcagatcctgtaattccaagttgttttggctcctgttctttgagccacttagtattgcctttgatacgctgcagtctatcatggtgcatgggtttcagttatttgacatctggcaacgacatctaatggaaagtggtgcggactttcttgatttccagaaatcttataagcaagcagcaggatctttttctgaatggaggggcaagcttactagggactttggttttgctattgatttgataagcatgttgatgtcatttggtcattactcgatgatcttttggcttcgtggtatggcgtttcatctggttgatgcagttctcttatggaacttgcgtgctcttatagtttcctttttgaagaggattaaaacttacatcaaattacggaaggcacttagttcactcgacggagcacttccagatgctacttatgatgaaatttgtgcatatgatgatgagtgtgccatctgcaggggaccgatgggtcgagctaaaaagttgtcctgcaaccatctatttcatctagcttgtttacgatcatggttggatcaaggattaatggaaggttactcctgcccaacttgtcggagaccgctcgtattgtcatctgaagggcaaacaaggtctccgattgtggaggcagcaaatgttcagcgaatcgcagaacagcttactatggggatgaatcagcagagagtttctggtaatgaacatcctgttgaacagcagaacccttcagatgctgtttggaggggtgctggtctggatgctagctggattccaccgtggtcaagccctgtgatagataatcccagttcctctagtgcagtgaggtcagtaggtctttctggagttcagatgatgatgaggcagttggcttctgtgaccgacagttatgggcatgctgatggtacctggaacctatggcccgagcccatggcagggtcctctcttgttccatccacttcctcgatggtgcctggtagtgcatctgcttccggattgcggctccgtggtagtgcaggcacaggcaatggaagtctttcagaggtactcactatggtagatagggtgcgggaagttctacctcatattcctgacgagctaattatagaggatttgatgaggacaaacaacataaacgcgactgtgaataatcttctgctgatgcaatagtagatacgtcaatacaacatataagtatgacgtttactggctgtaaaagcttataagaaaagtatgtgtatagttaaaggcgagcctgggtgtaacaacactcttcgatcctgtaataaaatccttttctctctctttatttttgtccgcagggatttgtttgtatagtaaccatagctgtataattatcatactcggtatgctataggttagtgtatttagaaaagatcggaataaaatttgttttgggactaaatatcatgcgtctggaaagcacttgtcgacggtacgcatcatcttcaggcttctatttgggcacgcggagttctaacctgcagctatatgttgaacatttgattgaagggaaaatagtgtgtttccaatgcaatgcaaagctatctgttgtgcagtagtaatatgttctgttggtacttgaattgcatgaagtctggtgcggagtttgaaaaaggatctcctggaatatagagtatatatatgcgagcgttgggactatctatttgattgta

SEQ ID NO: 23001 - DNA, 1524 bp, Zea Mays
tctctctctgtcgctatggtttggtttggaccttcgcctgctcgaacttcggtagtgatgccgctggctgagccgccccagtggcgccgcaaagccacggatttcttctccacatctagtgtcaagctgaagcaggcagggcaatcggccggggataatatagctgatgttgctgggaaggttgggtccgcggtgaagagtcggtgggtcgtcttccaggaggctaggcagcagcagcagcagcaacggccaccgcatgagacagtgcaagagcgtatcatcaccgctgctgccaccactggtttgcttttcaggaaaggcatttcagagacaaaggagaaggttgcagtgggaaaggttaaagttgaagaggctgctaaaaaaactgcagataaaagcaagagtatcttgaacaatattgaacgctggcagaagggagtcgcaagcactgatgtgtttggtgttcctattgaagccactgtacaacgagagcaatctggtaaagctgtgcccttggtgctagtgagatgtgcagactacctggttatatcaggtttgaataatgagtacttattcaaatctgaaggtgacaaaaaagttcttcagcagttagtttctctttacaatgaagactctggcgcatctttacctgaaggtgtgaatcctattgatgtaggtgcactggtgaagtgctaccttgccagtatccctgagccgcttactacattttcgctttatgatgagcttcgagctgcgagggttagcattcctgatcttagggatatattgaagaagcttccaaatgtgaactacatgacaatagagtttgttacagcattgcttcttcgagtcagccataaatcatcacttaacaagatggactcccgcagccttgctgtggaatttgcgcctttgatcatgtggcggcaaggtgatgctggcacagatttgcgtaaccacctcaagttaaccctgaaaccgcctccaaaaattgtggatacaacatcaaatactgccacgtgggacctgtttgatgaggatggcgaggatgcttcatcccagatccccttggacgatgcttcacccccagactacaactccattgaggtcatccagtgtctgatcgagcatcataatgccatcttcactgatgcaaatgaaaccgtgtggagatgatcaaggtctcttctagatctctctggtgttagctcgtgctacgtattagttccaggtaggaaggtggattaccgtccgttattgttaggtataagcattttggctggaacatttttggagtaggtttgtatatatgccgctagtgttaattctccccgggactaagatctggtcatgttatagcaatataagtcttgggtggatgtaaaccagatggacacaggacacgattgtgctgcatttgctgaattcggcttatacactgatgttaatctagggaactgttgccctgtacgttcacggttagctggtagcgtttgtcgtcaaaacaaatcagtgtagatatcg

SEQ ID NO: 23002 - DNA, 4246 bp, Zea Mays
tcggcctcgccgacgccgaccccgaactctgctgccctcgtctcccggctagcggatgaggaagacgcccccgatgggggaggaggcggagggaagcccgcggaaaaaagctccccgcctggacgacgctgctcggactacggctcctgtggcgtcggcaccgagtccgacgcggaagacgccgccggagggggaggagacggagggaaacccgcggaacaaatctccccgcccggacgacgctgctcggactacggttcctgtggcgtcggcaccgagtccgacgcggaagacgccgccgaatggggaggaagcggagggaagcccgcggaagaaatctccccgcctggacgacgctgctcggactacggttcctgtggcgtcggcaccgagtccgacgcggaagacgccgccgaatggggaggagacggggggaagcccgcggaagaaatctccgcggcccgcggaggctctgcctgtggctatggttcctgtggaagcggcagtgggggccagcgatgagaagctgtgcaagtgcaaccacgccatcactgacagtgatatctgggaactggttcattcgctaacgaccaaggatgcgtggatttgctgtgcttgtcggcgcaaagacgagaagagggacctcttgatctgcgtgggatgctacagccatctctgctgtggggttgggtcaattgcttacccgtttgggcactctcgatcacacgccctgaagaagaagcactggtttgctgttctgtacagtgatccagaaagaggatactgcttcaagtgtaacgctgaggtgccaatgctgcgcaaatgtggagaagacggcaacgagggtggtcttgaactgatccgcgatattgtcagtcagttgccggatcaaccatctgttgattttccttcgcccgggaacacgccaccgaaggggaaggagacggagcggctggacgacgcggctcggactacggttcctgtggcgtcggcaccgagaccaacggtgcagacgccgccgaagggggaggaggcgggcttccggaacaaagctccgcggctggacgacgcggctctgattaccgttcctgtggcgtcggcaccgacactgacggggaagacgccgccgaagggggaggaggcacagggaagcccgcggaacaaagcttcgcggctggacgacgcggctctggctacaccgagaccgacggggacggcgccgccgaagggggaggaggcggagggaagcccgcggaacaaatctccgctgctgcaggacaaacggccctcggaggctctgcctgtggctaaggttgagtccaccgatgagaagcggtgcaagtgcaatcacgtcatcgatgttcttgatatccatggattggttggatcgctaacgaccaaggacgcatggatttgctgtgattgtcggagcgaagacgagaagttgatcttcaaagccaggcccgagaagagcgacctcttgatctgcgtgagatgctaccgccatctctgctgcggggttgggtcaattgcttacccatttgggcactctcgagcacacgccctgaagaaggagcactggtttgctgttctgtacagtgatccagaaagacgatactgcttcaagtgtaacgctgaggtgccaatgccggtcaaatctggagaagacggcaacgaggttgatattgaagtgatccgcgatattgtccgtcagttgccgtctcacccgtcatctgttgtcataagtccagtcataagtcaaaccgagccggaggtcatcaatccaggagaggaggaagtagcagaaagcgccccatctgggtttgttgtggctgtggatcctgcagatagatggccttgctatgagtccaaatcatctgatgcgcaaggctatgctatcaaagggataccaaatctcggaaacacatgctacctgagtgcagtattgcagtgcctgtttgtgcttggtaagctgcgagaaaggatgttaacactggatggtccaaaaagtctcattaccgaggtactcgaggagctttttttggaggcaagtgctgcaggaggcgtccttaatccgattaaacttttgaattgtttaaatctgcgtgatccttcgggatttcaaattggaactatggaagacagccacgacttgcttacggccttgcgcgctatttggaatgaaagcgacaagaataataacaagcaaagtgatgcacctacaatgatggattcgatttttaggtttgagatggctcggacactgtcctgcaaaaaatgtggtcattcgtctgctgctgttcgctatcctttcgaggacctgttattgggtttcccatcaaaggggcatccaaccaaaagtgctgcattaccacaaacaagtgagagtcccggatgggccggatctcgaaagagagtgattgctcgtcaattatttccagaagacgtgcagggaagcgtggattcagaggtgtttgatgtggaaaccttggaagttggtgagtttatgattgatcatgcacttattaaaatgccttgactgcagatgttggaggtactctagagtcctcctaggtcattccacttttcaagatcgaaatgaaaatgctggaactacggaacactctgaaattggaattcttattggttatcttgctgaacataagaaaaacgtttcattttttggaatatgtatcctacacttgttaactggagaaaatggtttgagggccctttgcacatatggacagaagaaaaaaaatcaggaaaacctttgggacgtatatacaaaagtgagcaggaactttgagaagtgctaacacaacagtgttgtttgtagtgtagtagataaaactaccactagaataaataccttgagactttgagtccttgtcgccatataataaattgttgctccacttaatcatgtgcctgggatcctcgaaaagaaagctacttcgaatttggaggataaagatcctaaaaaaatatgtagaggatgaggatgccagttgctggttgcatgatgttgatactgcagacaaaaataaatagtatatatgcttgattctgcagattttactgaagtgcagcgtatcagtcaaagcaaggatgctgtacagagtcctttgcagattcaggatgggaagcctgttgattcagagacagcagattcaatatttattgaagacttgatattgcagttttgtgatgatcatcagatgcaatggcgctgtccaaattgtgccaaggatcatgaggagccaagtgccagtgaaagtaaaaatggtgagcagatggtgggaagcggcaaagaagacacaacagttgttggggaccagattgaacaatcagacaggaaagcaaggcacagtaaagaatctgaatgtcacggaggtaatctttcagctgcaaaacagactgagctgttgggaaccaaccaaactgcagatgacagcaaacaacttatgatgcatccggagaacgtgaaggaatcagagcagaaagatgatggtggagataatattatgattcatcgttttgccacgcttccacctgtattaactcttcagcttaagagaaccagccaccacatagttgggagcaaaataagtgaccatgtgagatttatggagtaccttgatgtagagcgattcatggaccccagctgtgccgacaaaggtagcaccctctttcgtctagctgctgttgtagtgcacattggcatgggatccttgaagtccggacactacattgcgtacgttagagcaagaaagcttggatgtcagcaagaggaggcctcatggttttgtgcagacgacagtcagatcagacgagtcactattgaacaagttctcaacagtcaggcctatattcttttctatgagaggatggaagaccaggacgtttctggcatgacacgtcagaactgaagaatgcagtgatagaacaagcagatgagtgagataagcagaccttctctctcgaccgcaaggatctagtctagtcagtgttcatagtaagacaggctcttgaccaagctcatttttgtcgctgggcttgaaacttactctgtaactttgtaccaaatcggaggttctttctgatcttgtcaactcagctgatctggtctttccgttgcttcgcatttgaggatgaaactgtgaatagaatagtggtgagatcggtgatacgggctttgtaaagtttctgtcggatgatattgttacatgataatggtttacac

SEQ ID NO: 23003 - DNA, 666 bp, Zea Mays
ggagagtgccccaactggccaactgcttgacgaacaatcctctccgttctcgcagtggcgggtttcggcgacagcgccgcctccgatgctcggctcgagcgccgcgtacagtggagggagcggagctcgaagggcgaaggcgcaggggggctcgcgagtcgctatccagcccacgccgtcacgcactcacgcagggagcttgagggtctatttatacagcggaggcaggggagatctggaatgcgactttgcagcgcttctccagcgatgcaaaaacctatctttccgtatagtcgcccaggaatgcgcatgtgcagggtgagctgatgattttggatatcgataccatcccgagctggcatatgtagcacagcaggttgttgccattgtgattcgcggggactgcgtcctgaagaactttggttttgacgccttgtatttgtacggcaatgattgggatgaacatggccggtgagaattttttattttacattttctgtcctcgtttgccacgtgagtgttgtctgattctgatgtaaaacagcaacgagtaaaaaaaaagtataagtggaacctgtaatgtgggattgtaacaaatatatatattgcatggcttattataacagcacacgggctgcggtaccatgtgtgtggcatgttttatac

SEQ ID NO: 23004 - DNA, 679 bp, Zea Mays
cttggcccatctgttgtctcatgtcttggcccatcttccaccatctctttacttacattctggtctgcggggcagccgacctcaccgacggcggaatgacaaaaaggacaatatcaacgacgccgcgcgcttcaacgccacagcccatcctctgagacaaaataggataaggagacccacccggcacgactgctctccgcacccgcaacgcccatggcgttcgccgccgtcctccgcgcccgcctcctcccggtgcccactccgctatccagctcctcgccgccgccattcttcgccccttcggcctacgtccgcgtaccgcgcctcacagcagcagcagcgcgcaccgtacggtaccgacgacggggcgggcggcctcaccgcgcggccgcggcgattacagcgtcactcgacctgaccgaggacaacgtccgggtggccctagacgaagccaaatccgagctagggcagctgttcgacacgtcggtgggcatcacagggcaagttgacctcgcggagttggacgggccgttcgtgaagctccggctcaagggcaagttctggcacacccgcgccaccgtggtcgcgcggatcggaaactacctcaagaaccgcattccggaaatggggagagtgttgtttaatcaaggtgtaacatggggcccgcctattgttattc

SEQ ID NO: 23005 - DNA, 4077 bp, Zea Mays
atctcctatgacaactggtgacattgatcctgcagtattggcttcccttcctccatcgatgcagttagatcttcttgttcagatgagggagagagtgatggctgaaaacaggcagaagtaccagaaaataaaaaaggaacctgcaaagttttcagagcttcaaatacagtcctatctcaaaacagttgctttccgtcgagagatagaccaagttcagaagtcttcgtcagggaagggtagtggaggtgtccagacatcaaaaatagcatcagaagctaatagagagtttattttctcatcatcattcactggtgataaacagatgctggcacaaagaggtgaaaaggagcataatgttgaaaacactagatcaaaaaaggaaattcattcttctgtcttcgcatctaaccccacaagtagtttgggaacaatgaagcctcccaacagcaaaactttgagcgattttgggcctgatgttgagacctatcgtgatgagagaggacggattagagtaagcagggtcagagcaatgggaattcgtatgactcgtgacattcaaaggaatttagattttattaaagagaatgaacaggttaaaagtaagggacagacacagaccaattttcacaatggatcaacaggcaatgaagagcctccagattttccagaacatctttttgaaagtaacaagctccagagttcttgtagtcctgatgtggatctttctgaaactgacagagacaaccatcagacctcgtcacaaataggaacagatatcatttctgagagttcttgttatggaaacaaggaagcaatagagatatctttctcggttgatcaaactgaagtgaaggatggcgatgaagatatatttttgcaattagtgtccgggatggcacccaacaacatattttctggaaataattgtttggttaaaaagatggaagaatctgtagattctgagtgtatttgggaagatggtgttattgaagcaggaacttctcctgtgaaaattgacatgaaggatcataagtcatctctgccagagaattgcagcgatgatgagatggagtgggaggaaggtgatagctttgtacctggagttgcttctagtagtgaacataatccatgtaatgcaccaaagggggatctggaagaagcagctcttgtacaggaagcaataaggaggagtttagaggattttgagaagaaggcatctgagaatgtgagtactggagatatacaagcatctgttgaagatagatctttgcagttctccaacaatgttcctaagatatctgaatctcttggtgaaaatgattcacattctggagtacctgttgttgacgagataaacaatgaaacaagaacagaaatcaattatgataaggatgatatggtacaaggcactggactacttggaactgagagacaagaatctgaatcacaacccccactggtgaataatgattggcatgccgatatgcacagagctcatcctctggggtctgtgcctccatgtactacattcacgagtgatctggctgaaaaaccatctgtcagtgcagaaactaacggtgaagatgtaatgatatttacaacaaaaattcctggaacagctttaggcgattgtgataaaacttccaacctaaacattatgaattctgatcaatcaaaatgcagcaaagatattgcttcaactggagaatccttgtcacaccaaaagaaccttttaattgatgaactactagccgtcactgccgaacaaaaagaaaatgctacccaggtagatttgaagtttgccacatctgaggtagattatacacaaatttgtggcaacgatgacaaccatacaatatcagcgagttatgttgacgcggagctatctcgtcttagacaagaacagatatatcttggacatgaaaggcgaaaacttgaaagtcatgcagagtctgtaagcagtgagatgtttgccgaatgccaggagttgctccaaatgtttgggttgccatatattattgcaccaatggaagctgaagctcaatgtgcatacatggaaataaataacctcgttgatggagttgtcaccgatgattcagacgtatttctgtttggagcaaggaatgtttacaagaacatatttgatgataggaagtatgtagaaacatattttatgaaggacattgagtctgagcttgggttatcacgagaacagttaatccgcatggctctgcttcttggaagtgattacactgaaggtgttagtggtatcggcatcgtgaatgctattgaagttgtacatgcatttcctgaagaagatggactgcagaagtttaaagaatggattgaatcaccagatccatcaatatttggtaaactgcatatggaaataagtggtagatcgaagaaaagaaaactcgatgaaaatgattcagatggaaaggggaaaggcctggaacctgaatgcattcaaggttctgatgataaacaatcttctaatgaggatgaacatgtcaaggaaatatttatgagtaaacataggaatgtgagcaagaactggcatgtccctgcaacttttcctagtgagaaagttgtaaatgcatatatttctccacaagttgacagttcaacggagcctttttcctggggaagaccagatttaggcctactacgtaggttatgttgggaaaggtttgggtggggcaaagagaaagctgatgaactgctgcttccagttttgagagagtataataaacacgagactcagctgcgcatggaggcattttattcattcaatgagagatttgcaaaaattcgcagcaaaaggattaagaaagccatcaagggcattacaggcaaaagctttcttgacgcagatgaatctgagcaggataatcccagtactagcaagacgatcaagaagaaagaggccagctcctcaagccatgccagaggtagagaaaaaaggaaaaacgattatggagtcatgggaagtcaagaagataatataattgacaataccaacagtttggcagagacagttgagaatactagagaaaataacaatactactaagataaaaagagggagttcctgtggtcgccccaaaggtagaggacgaagcaggacaactgcgggaagtgatgcaacaataaatcaggaggattatgaaatagaatattctacttcagcttcagatgaggattcatgtaaaaggcattccaacagttacggatcggaaggaagggcattgcgaaggtcaagtaggaaacggaaacaggtgacatacatggaagatggtcacgaagcatatggcaatgatgttccaatgcatcaaaacgatgaaaataacccaggccaacctgctgcagccgcagacgtggctggagaagacacaggatttaatatttaccatcaggatacaagtgaactaaacagcagtcagatgcatacaggtgcaggcattaccgaagatatcaatgaagattcccagcgttttgagttacgggaggacaatcaggtggattcaacaccgaaagactatttgttcaatggtggtggtttttgtatggagggcgagggcgatgaacaagaaccagcgtgtgatcaatctggtgcagaagtagaacctggaccaagtggtccatgtggcgccatggatgaagtttcagagagtgcaagcatatcgacggctatggagtgtaccgagaatgcaagaatggaggcacgcggtgcatcttcgtcgcagcaaagacgcaaggcaagccgaggtttgagtgccatgccgacgcttatcaagcgtaggagaaaatcgtgatttatttgcagtttcactgcatgtatagcacgccattacggcctctgtttggttcaagcgcttatgatttcgcatcagtctttggccaccagtgacgagcgctgtttcgcggacgcaaaatgcacgtctgtgctgtgatttagttccgtctttttttctcgtctgattggttgctcatcgtctcatcctgagcgcattgattttatctgagcttctgtttggttaagagcctgctgggttcgccttttacttaacacgcg

SEQ ID NO: 23006 - DNA, 4558 bp, Zea Mays
cacaacgcaagcgcccccttccttctttctctacaccctgcaggcgcaggcacagcgcattgcccccctccttgtccagcgcccccaaccacaaggagtcaaggaacaggtcggggtccagccatccgaccccttgaatccgcttgccctcctgcttgatcccgccgccaccatctcaaccgcccactccttcctctccctatagggttccctgccgctcctgcgaatcgagcaatcggagacccccgggccgccctccaatgacgaccatgagcgacgatggcgaccgaacctgcccgctctgtgccgaggagatggacactactgaccagcagctcaagccatgcaaatgcggctatgatatttgtgtttggtgctggcaccacatcatagacatggctgagaaggaggaaacagtgggccgctgccctgcatgccgcacatgctatgacaaggacaggatcgtcaagatggctgccacttgtgacaggacggtggcagataaaaatgtagagaagaagcacaagacccaaaaggttaagccaaaggcagcacccacagcagcagcaacatcaaccgtagaatcaaagaagcatctggctagtgtcagggttatccagagaaatctggtgtatataattgggctacctgcacatttatgcaacgagagtgtgcttgagtgtagggagtactttggtcaatatgggaaagttttgaaggtttcagtttcccgtccgactgggcctccctctcagcaggcatcagcaaccagcaatattagtgtgtatattacttatgcgaaagaagaggaggccatccggtgtattcaggctgtacacaattttgtcttggaagggaaagtgttaagggcatgtttcggtactacgaagtattgccatgcatggctgcgaaacatggcatgtgggaatccagattgtctctatttgcatgatgtaggcagtcaggaggatagttttactaaagatgagatcatctcagcatatacaaggactagagtcccccagatggcatctagtgtttcgcaaagacgtacaggcactgtgttacctcctccaggagatgatttctctcacagtgcggtggtttcagccaagcatacattcaagaatggaacacttaataccaccagtcagcccagactttcacctccaaacagtagttctgggaggtccacgcttccaccagctgcatcatgggggcagcgtgatttgaatgccaggataacagctactggagcgacatcatcacaatctcatacaaaaccaaaatcagaatcacagagtaatccattttcaagttcttcagcaatttccagtacaaaaacaccctcttcatggaatgatgatacaagtacagcagcaaaaatgcctgaaggacagcaagtgtcagaaaaagagtctaaaaccttgcagccgtataagcctggtatttcaaaggaaacacaagctctatcgtcactggagtcatcactggacatagacttctcaacaataccttcagcttggaatgatgatgacattgtagtatcagatgggatgccaaaaggaagcgatgaaaatcaagttccaaataaaaatggtgagctaacccatccagcatctaagtcactggttttatctaagaaagacatagaaatgaacattaccagcaaaaatccttcagattttttatcaagtctagcaatatctaaattagatgtaagtactagtgatggtgaccactcagataccaatattactcctaaaagccttacttcaaatgctgtagaatgccaatcttgtcatgctgctggggagaaaatgttggaggatattggatccaaggacatcgacatggagaagatatcttctcagatatcttcagtaacattaggtggcaacgataagattcagagtatggcaggaaatcagcaaccagatgtaatgccatgcacatctattgatgtgcccatggatcagaattttggcagagaccgatctcatctcaatcttaacgagcttttattgccttcagaaaataaggatagtagtctttcttgtcaatatagttctgataagcgtcttgcttggagtttgaagatgcaaaattgtagcgttactcctttaaatgatacaatagactctgcaatgctcactgacaaaccttatagtatactgctggaaggttcagagaaaccatcatatccaccatttgttgaatttcctagtacatgggatacctcattgtggaatgatacaaaaaataacgctgcatcgacgattgacactataacttcttcacagatgcagacagggttttcttcaatcgataacacttatgccttgctaaatggaggtcaagatgggctaggtactgtatatacacatgataatgtttctgtatatacacgtggacgtggtaatgtttctggacatcctggaatgggaagtcatcagcatagagcaatgggttcagtaagaactgatagtataggaagttttgacaagaccataagcgtaaataaggatgagagcagaataatttctgatacgttgtcagagtttaatccatgggatgattcatattcgactgctaacaattttgttaggatgcttagggaatctgaaaataatgatgttcagtgcactgcgccttcatggaaatcaggaaccgggagcaaacagtccagattttcatttgctagacaggataaccaaggaaacttgttggattcatctctcagaaactgtggtattggtactgagcagaatttcagtttgctaccccagaattctcgaagaaatatttaccagaatggtcttgcattccaatctctagagaatgaattttcaaatagtaactttcctggtctattagatatggcaactactggtacatcaatgtctaaaatatctgctcccccaggattttcagcaccaacaagagtaccccctcctggattttctactgcatttccatcccaggatagtttgaaccccactcctgggtttccttctgggattttgtctcatgatgggtctatccccctttctagattcccttcattttcttctggagtttcagctcaggaagtgtctaagctccctactagactgccttctccattttcttctagattttcatcacaggatggtcctgatcccccttctagattccctttttcttctgggttcacatcacaggatgggtctaatcagttgtatggctcaacaaacccagaaaatcttctcgggggtactgttctgggtgtcgacggtaatcattatcaatctcagtttggaaggcactcaagtgacatggagtttgatgatcctgctatattagctgtgggcaaagggctgatgcctggaattggcgattcagggctggagatgaaaaatactcgtgcttcacagttgcaaccagcaagtagtgatccaagatttcagctacatgtacagccaaatgtgcagtctcatcaaaacatgagattcacagaccctgtgcaagatggtttgaaccatatgaatgataattacctggcatccagatttttagctcagaaccatggtcctctatctccttatgtgcagattccgcaacaacccagaaactcgcaggttacaaatggtcactgggacgggtggagtgaatcgagacaagggaataacattcctatgtcagacatgtccaggatattatatccaagtgaagtgaacaagttgcacatgctgggttcaaacgatatccataacagagcctttggaatgtgattgtctcctgggataatgtgtgactttgagctgacatattcgcttggggcgttttgtggaagtaactggttgcacaaaacatagtatacctgaggtggttaatggtgttgtgcttatgagctggcacacaatatttattgctattggagttgaccaaaatgaaccttagttttggtccagccagttgaaattaccaggttcattctcgtctatgatttgtgacgcttgaatgaaaagaacgagaagaacaaggcagctgaagttgaaatagatatagagatatgtctatcatgggatttggggcgacctgtgagtgaaagaagcttaggtgtggcagtttgtttttcttgtgtctgtacatgatgatattggtcggtggttgtagtataatttggtgatcggcggtggctgtattaacttgtagtggttgctcttgctccctcttgcttgtttatgttaattaagggaattgaggtgaaggtctagtgttacccatagcataataatatacgatacataactggtttctttgctagcattacttcatttgtttcaacaacagcaaaaaagaaatcccttaacctttcttaaaaacggacactttgttaccgtgcattgagaatacccttggagaagcttctgaactacattacacataggtctatgtggtgcttgaggccagaggtttgagttgtattgtcaaaactccttcgggcctccgcactctgtgtactaggtcggcgtatcaggtctagtttgacctagccaaaagctgccctgggggt

SEQ ID NO: 23007 - DNA, 282 bp, Zea Mays
caggaagcgaaggcatgcgacgaggacgaggtgcgcatgaattctaaacatctgggatttccggagaaaaaaaaaggccatgccccgtcgtctcacggtaccaagaccaattcctcgtttagcctgcagtctggagcccagcaattaaccccgctggccctggcctcgcagtgtgggatggcggaaatcatgggagagatctgaattagcatatattgaaatcaaatgtatgtcacaatctatatcttaaaataatttaagcttatttaaactttttattcg

SEQ ID NO: 23008 - DNA, 3608 bp, Zea Mays
gaattttgaaaaaatgggaaaaaagagcccatacaggcgttagcgttacaggcccgtaccgccctcctctgtagtccttccctccgccactccgcggctatgcccagcaattcaaaagaaaccgaacacccttccggaaattccctcgggcaatggcgtcgggctcgtctcgcccccaaatcgaccagttcttcccggccaagaagcggaggccctcgtcgcggaagggcgagtcgccgcgacccgggacgcagcatgagagccccggcggcgccaaggggtccctggaagggtacctcgtccgttcgccttgcaaccgtgccgtggcagcggcatcggtggtccccgtgggctcgcccaggggcggggacccgggcgccaggcgtagcctctcggccgcaatggatgtcgacgtcggttcctcggcttcggtggctgcggcggcaggtgacggggcagactttgatctcaggaggagcacggcggatttcttgtcccattcctgcagtgctatcctgcctttgaggggtgactgtgattacagcgagcagtgccagatgaagcagaagcggagtgcgtcccagtcattcttggttccttgtgacaacgactatgtcaagaagcagcgagttgcccattgtggtggctttgaagctctaaaggagttagatgataatgtagcttccatgaagcaatgcatcaatcaccatggtggctcagaggctgtggaggaatctgttgagggggaacatgtgagttgtgttgggttttcggccttgcaaagatgtagctttaccccaagtactgcacagataaaagttgggttttctctagcacctgtggaaaccctaaagtctgtatcgaggaattcccttacttcacctggtgaggagttctggaatgcagcaattgaactcgctgatgggatatctgcccaggctgataaggtccgtggaaggccagaatttgatgcagcagaagacaagtcatcttgtgcagtagcagcattctttaagactcttcctagatcaggaagggatgagcttgactgtcaaaacacagtaggcagcaatgatacacatcatatagagaaattgtcaaataaagttgaatcactggcagtaaactgtcagcatataattagctcacctttgcctgtgaagcagctagatttctttcatgaggatgatattaaagtttcaggttcaaaatttgaaacaaaaggcagctatgaaacttgtaatgcacaagcagaccgtgttccactgaaaggcagtggccgcctagaaaaggaaaatctcatggaccctgtggatgtgttgaagagaagtgctattaatttgcacactgattctgcagccatgagatgtcagggtgttttcaagtcaacaactgaagggaaggttcatccaactcaagaggctgaaagagattctaatcttattaggagagatctcaatcagccaacccacaatgaaaataaatcacttgctgcatattcaaataatcgcaagacttggatagattccaagagtaaagttgcttctcaggaagtggaagctagcacacctactagctccattcctctaaaggatcactcaaagatatcaagttggcttcctcctgacctttgtgctatatacatgaaaaaaggcatttcagagctgtacccttggcaggttgaatgtttacttgtagaaggtgtcttgggcaaaaggaatcttgtgtattgtgcatccacgagtgctggtaaaagttttgttgctgaagttctgatgttgaggcagatactgtcaactgggaatatggcaattcttgtccttccctatgtgtcaatatgcgctgaaaaggctgaacatcttgaacaacttcttgagccactgggtaggcatgtccgtagcttctacggaaaccaggggggaggctcacttcctaaagatacagcagttgctgtatgtaccatagagaaggcaaactctttggtaaacaagttgttggaggatggccgcctctctgaacttggtgtaattgtcatagatgaacttcatatggttggtgaccaacatagaggatatcttttagagctgatgttgacaaagcttcgatatgctgctggtgaagggactttacagtcatgtagcggagaagtttcaagttctagcagtgggaagattgcaagtcatgggttgcagataattggtatgagtgctactatgcccaacatcgctgcggtggctgattggcttcaagctgctctttatcaaactgactttcgaccagttccactggaggaattcataaaagttggtaatcaaatatttgataaagacatgaacgttgttcgtgtccttcccaaagtagctgaccatggtggcaaggatccagatcatattgttgaattgtgtaatgaggttgttcttcagggccattctgtgcttttgttttgctccagtcgtaaaggctgcgaatcaactgcaaggcatgttgccaagttcttgaaactaccctctgttggaacaactgatgttagttcggagttttcagatgctgcagctgctattgaggccttgaggaggtgccctgctggattggatccaatattgggagaaacccttccttttggtgttgcatatcatcatgctggtcttacggtcgaggagagggagattgtggaatcatgctaccgtaaaggccttgtccgtgttctgactgccacttcaactttagctgctggtgttaacttgcctgctagacgggttatattcaggcagcccaagataggtcgtgattttattgatgggactcgctatagacagatggctggtcgtgctggtcgaactggaatagacacaaaaggagaaagtatacttgtatgcaggcctgaagaggtcaagagagttacaggtattattagaagcaattgccctcccttggagtcctgcctctcagaagataaaaatggaatgactcatgcaattatggaggttgttgctggtgggattgttcaaactgcaaatgatattcatcgttatgtgcggtgtacgctgcttaattccacaagaccttttgatgatgtcgtgaagtcagctcaagactcccttcgttggttatgccataaaagctttcttgagtggaaccatgagaccaagatatactccgctactccccttggtagagctgcttttggaagttcactcaaccctgaggaatcattggttgttcttgatgatctttcgagggcaagagaaggctttgttctggcatctgatttacatttagtttacttggtcacacccataaatgtagaccttgaacctgattgggaattatattacgagaaattcatgcaactttcttctcttgagcagtcagtaggcaatcgggttggagtaattgaacccttcttgatgcacatggctcatggggcgtcgataccttttcgtgcaaggcctgagagaaacaccgggttaagtaacaagtctgcacaagctgctggaaatactcttgttagtgagcacacaatcagagtgtctaagcgcttttatgtggctttaatgttatcgaggcttgctcagaatacacaagagagctatgtatcatttcattga

SEQ ID NO: 23009 - DNA, 1965 bp, Zea Mays
aaatagattatagagtccagtttcaccacgttttcattcttcctattgtcagcatcgctctccaaatcccaaaaccctaacctatccatcgtcgccaccgtttaccgtcgctgccgccaatatgggagcaagaggaggaggaggaggcggccgcaaggcccgcaactttgcgaccttccgcctcttcccgcgcgccggcgccgccgaccccaacgaccgcgtgttcgtacgcgtcgacaacaacgactacactgtccccgggttcgccgacgaggactccttcgacccatcccggtccgacccttccgccggcaatggaaacttcggctccgcatccggccccctcccggagcacgtccgccgcgagatcctcgagctcggcctccctgacgacggttacaactacctctcccacctccgcgagctccgtcccgccgccgccgcagcctcatccttcgtccccagctccaccggtcgcccggagcccctcccgctcgatgtcaaggcttatgatgcaagcagggtacgcattggtctcagcgagggtgaactggacgaggggaagacgatgtgtaaggtggctgccaagactgcgccagtgaggcgaattgagaaggctgtcgacccagatatcgccaggttgctcgatgagagcgatgtgtctcatgttgggtccgaggatgaggggctggaggaggattttgtcatcatagctaaccaagctgaggaggaggaggaggatgaggatggagacatggaagaaaagcaagagtggaatggtgtcttcagtgatgttgaagaggaggagttcgattttgaggaggatgagccaaagccaagagtgagacgattgctggatgaacaatttgatttgcttgctttagaggaatatggagacagtgatgatgatgacatgggtgttaaaggtggggaatatgaactgccaaatgaggctattgatgaactgaaactgttccaaaatcagaatgtatgtgttgatgaagaatatagaacaccagcagattttgttcgtcaaaaactggattcaagcatggctgatgaggtggatgaatctgctcgtgtgataaaaaaatgtgctgaatatgctgaaatatatttaaatgaaactgcagaagaggaggtggttgtgcttgtttcggaaagcagtgatgaatctgaagtttgggactgtgagaccattgtttccacattctctaaccttgataatcatcctgggacaattgaaactccaggaatctccagagcgcggttccctagggttttccctggagaaacaactacaacaaatggcatcatcaagcttcatgggaaagagaaactgccagtagaatacctgccacagaggagaagaaatggtgaaaaggagaagaaagtaaagcctgtagaagcttctgtcactgataaatttaaaaaaggagctgagaaggaaacaaaagaggagaagaaggcaagaaagcagtgaaagaagaaaagagagaagcccggaaagcaaagaaagagctcaaaggcctgtataaatcagaaacgcagaaggctcagaaagttgccgctgttactggaccttcttccattcgactaatgtgatggttgatctgtggcacgtttactgatgagcgacgactatgacagtcttgaatccaaaagatcgcctggacaaatgcatcaaagctacgaacgatgtatgataccagttcatatttgtgctatactcatggattttgtcgacaggatacccaatgcttgcttactatatattagttagttgaaggagaagataattatacacacttatcgaaagcatgaaagatccttaaaagaaactttacgtcagaaacaggtcatgatggtaaatccttgaggcttacttttcatccaaaacacgtttgaccttcttactctcactagaaactatgcaatcctacaaaatataacgcggtttctgat

SEQ ID NO: 23010 - DNA, 1911 bp, Zea Mays
attgtaagttaatgggccgaagttgtacagtgaaccatctcccacctttgacacttcgcgctccccatccaaaccgtactgatccgccggccgccgttctccatttcaaattgcaaacctatactccttttccgcctcctcgacgcaactcgtcgccgtcttctccaactcgcacttcgtccctcgccccacccaggggcggatctccacccggggctgcctgggctgcagcccctgtcggcagtcgcggcccagtccatcatcgcgcgacatgacctagcagtagcagcagacgtcctacgtccagccccagccgccgccgtttggctcctgcgttcgatctcgctgcgtcctggtcctgcgccctgcggtccagcctcctctccaagactccacttctccagcgcgctcgcccgcgccagccgccagggccgccaccggccaccgccattgggccccaccatttgccgctcccgcctacgatgccgacgagtgaggtgtggagcttgtccgattttgaaatcagcaagtacatcgctgagggcaggttcggcaaggtctacctcgcccgcgagaagcagagcgggtacgtggtggcgctcaaggtgatatttaaggcgaaactgaagaagcaccgcttccacgcgcacctacggcgggagatcgagatccagcagagtctcgaccaccctaacgtgctccgcctcttcacctggttccacgacgaagagcgagtcgtcctcgtcctcgagtacgcggcccgtggcgagctctacaaggtccttcgcgctgctggccgcttcaccgagcgcacgtccgccacagtaaaaaaccccccgttttccttttgcttcacttttatttcccggttgtgcctacggctggattgccattcctcctactgttattaacctaaatcatgttaacctgaaccataataaccgatgcaaagtctcatgtgacagcgactgtgtacatacaaagttccctaggcagctagaccatgagccgagtagttatatggttggtaattctgtgatattacttctattcaggtcatgaatggtagcaagaaagttttgagtaatggcctaacttgattttactggaatcagatatcgtgtatgacaggagtcatcaattgctggtacattgtgtgcaatggtcaatggttacaagttacatcaaaggcagttgacattgaacaaaattcgatatttgcaaattcttagtgccatttaataagctttcaaaatgatattttggattttatggatctttgcattatctgattgcagcattaagtactctttagaaactcttaatgtatttcctaggagtataagttaagctgaaccaaatgtttatgtgaactgctaatcatgtgtcacacatgcagtgcgctctgcagtttatgactttattgccgtgaacccatacatttatacacaaaacatagagagaatgcatgacatctcttttaacatgacactgtctcagtctcaacttgtgatgatgccattattgccaagaacttgtgctgccattggcataccacaccctagagcatggtgtgtgtgtgtgtgtatgcaggtttccttctggtttgccattcttttgttagattgtgataaccatgaatcttatgtgttttagtatgtagcgagtcttgctggtgcactggcatactgtcacaaaaagcaagtcattcatagggacatcaagcctgagaatttgctaatcgacatcgagatggctttaaaaaaacttgacatgtgggggtaaaactgccacacgacattatattaagaagaccatctcagcaggtcgagaaaacccctgccccacccatacacggcgaaaccgtagcccatataagaacgaccgcgactcgggctagaccttagacct

SEQ ID NO: 23011 - DNA, 2096 bp, Zea Mays
aagccaattggcgtcacgtcgtcgcctctgcggaaaccggcggtccacgggaaaggaaagaggaaacagggaggcgacgccgtcacaattcgttctcgcgatttgcccttctccacctccccgtccatgtcgcgggaaatcacgcgcggcgacgctggattcacttagatccaacagggtaatcggcacggggcagcctctccacccattcccgcagccggttgggcgagtcgtcggttcagataatagactgggcgtgtggatccaagaggtttgatccctttaatttggattgaagtgccagctttcggtcaggaaggtgatgctggatgatgctgacggactttgaaagcataccggttcaaagaagtgttgcctgtcaccatgaggctcaacgttgggctcctagtgcccttgatggcacaatactccgcacccacatgggctactttagttgctgggttcttcatgctgcttgcgctttcgctctccacgtacctgatatttgagcatctctcagcatacaacaatccagaggaacaaaaatttgtactgggtgttattctcatggtcccttgctatgcaattgagtcatgtatttctttgataaatccaagtacaagcgtttactgtggcatcctacgtgatggttatgaagcatttgcaatgtactgctttggaagatatattactgcatgtttaggtggggaagataaaacaatagcctttttaaagagggaaggtggctctggttctgggcagtctctactgcatcacacgtccgagaagggaatcatacaccatcattttcctgtaaattatgtattgaagccctggagactggggacgcggttctacctgattatcaaatttggaatcttccaatatgtgatcataaagaccctcacagccaccttatctcttcttctagaatcttttggtgtttattgtgatggagaattcaatttacgatgtacccttactttgctgctgttctcaactttagtcaatattgggccctgtactgtctagtagcatggtatacagccaccaaggacgaattggctcctataaagcctctggctaagtttctttctttcaaatcgatagtgttcttgacttggtggcaaggtgtggtgattgcaataatgtatgctttgggccttcttagaagccctttagcccagagcttggagttaaaatcaagcattcaagatttcattatttgcatagagatgggcattgcttcagttgttcacctctatgtgttcccagccaagccctatgcactcttaactaatcagtcacacggaaacatttctgtacttggggactatgtatcctctgagcccgtggacccttttgaaataaaggaaagcaaccggcctaccaaaatgaagcttccacagttggaaccagatgagagaagcgtgacaaacataaaagaaagtgttcgggactttgttgtcggcagtggtgaatatgtgatcaaagattttaagttcactgttaaccaagcagtgcgaccagtggagaagcgcattgataaattgatgaaaaagaatgataagagtaagaaaagccaggacgacaactgggtgagtgcagcaacaccagagaggcctgttcgtgggattgatgatccattattaagcggaagcgcaagtgacagtggtgtcacaaagggcagaaaatatcgcagagttgtgagctcagttactgctgtggacagctggggaggtggtgatcaagcttctgacggatatgagatcaggggtcgccgctgggctgtaaaaagctaacgatttacatagcgagatggtaaattcgaaccatatcgcgtggggggaaaaggacttttaggtttgcaactgtttctgcgatactggccatttaggagccttcgcaagttcagattgtctttgtataggtacttaggtagctgataatgatatgtaacctttttgcgtagattgtttaattttcttttctttttcttggtcgagtcgtactgacatttggtattgcaaaatttgaaagtacaatagtttttttcattctttggaaatggaaacagagttcagcgaaaaagaaaa

SEQ ID NO: 23012 - DNA, 2546 bp, Zea Mays
gcagagacagcaagggaacagggaagggagagagagaggaacagctccgagctctcgcctctgccctagctgccaaggttcttgattgattccaatccaaaacaaaaatctgagttctctcatcctctctcctgtcccaactcccaagagtgattactgttttttgtttcgtggatgcgatctgttttacgcgacgatctgcttcgctgttcgcgtgttcgttaacggcgggcgccgacggattggagctgtcattgtcaggcttcatctttcggttttaattctcccaggagaagttcctgggctgggagtaaatgagcggcgccctcccctgtcgatacatgccgtttctctgggtggaatttatggctgctcggacgccacgctgcttttagtagtaaccaatgcaggttcctcttcttccacagggcctggctgtggctggaagctgcaattttttttttggcaacgagatttggtccctcgccagtttccaccctctgtttcttcctgctcagatctgtccgtgtcgcaggactcgcactcctgcccgccagctccttttctttaatggttgctgcagcgaactgatcgttcgtggtatttcttttctcccgcagacagtggcggtagaagattgggtgcgggagcgcgacgtctcagctgggctatccaggaatccagaatttacttcggtggcgaggatgtctgtgagccatgcgcaggacattgaaatatcgctgtgcgacggcaactcggaggacgagcggcggcggcgcaagatcggctcgctgcggcggaaggccatccacgcgctcaagaagcgagggaggcgtcgcgtcgactcccgcttcccgccgccggccatttccatcgaggacgtccgcgacgcggaggaggagcgcgctgtcgcctccttccgggagcggctcgcggcgcacggcctcctccccgagaagcacgatgactaccacatgatgctaaggttcctcaaggccagaaagttcgaagccgagaaggcaatgcagatgtggtcagagatgctgaaatggaggaaagagttcggaactgacaccatccttgaggattttgattttgaggaactggatgatgtgctacgctactaccctcagggctaccatggtgttgaccgccaaggccggccggtgtacattgagaggctagggaaggtggatccgaacaaccttatgcagatcacgtcagtggatcgctacatcaagtaccatgtccaggagtttgagagggccttcagggagaggttccctgcctgcacattagctgctaagaggcacattgactccaccactaccatcttggacgtccagggtgtggggtttaagaatttctccaggactgctagagaacttgtaaaccgaatgcagaagattgatagcgattattatcctgagacactccaccaaatgtttgttgtgaacgctggcagtggattcaagtggatctggaacagtgtgaagggcttccttgacccaaaaacttcatccaagattcatgtgctcggttcgaactaccagagtaggcttcttgaagtaatagattcgagtgagttgccagaattccttggtggttcatgcacatgtagtgacaagggtggttgccttggatcgaacaaagggccatggaatgatccttatatattgaagctgatccacaatttggaagctggatgcatgagggaaaccaccaaacccgtttctgagggcggagaaagaagcagctcttcctttcggttggaacagatgaaatggcagggcatgttaagcgatacatcaaatgctgaatcaggatccgatgttgatgattttggtccatcatttgttcataaagtttcaggctatggttgcttgactccggttcgtgaggaggtaaagggcacagattgtgcaacatacttgagctgcgatgatcaaagtcacccggatatggttcctgaattttaccatggagtgcaacggactactgaaatggtgcagaaacaaatggctgatttcaggcaatattccaccaacagaaggcctcgtgaattagggaacggctctcttaatgccaatggtacagcagctgctcagaggggctgggaagacgtggcgaagctagtagtcacagccttgatcaagctcttctccttcatccggctgttcctttccagagccgccgagagtaggctagagaaggtccgtcgcactgccccaccaccagcagcagagaagccaaagccgccccgagccgtcagcgaagaagaggtgcgcgcctgcctgcagcgcctggacagtctcgagtcgctgtgcggccaccttgccaccaggcctgcgcagatcccggaggacaaagagcgcgttctgctgagctcgttcgagcggatccggtctgttgaggctgacctcgagaggaccaaaagagtgctgaacgcgaccgtggcgaagcagaaggcgctggtggaggaggtggctctggagtctgtgcaggagctgcctagagccaagtcccagcccaacagcctcctccct

SEQ ID NO: 23013 - DNA, 783 bp, Zea Mays
gtaagggacacgtccttgtctggcagacgttttatgtatttgccaagacctacaaaagagaccaggaaaagaaaaatgctcagactactgccgctgcagcattgtcatccccagcaagtacatctgccaaggctccagatcctgctcctgcacctgcgcccgaatcggttctcccacctctatccgaagatgagcagtggaatctgtacaaatggattctggaagaggagcggaagatcaaaccacgcaacgccactgagaagaagaagatcgacgaggagaaagctcttctcaaggagataattcgggacaaatctctccctcgtttgtgatggttacatcggctgtccttctgatcttgattttttttcttctctctccacctgcagtccattgaggacaacatctgaaactatgtgccctgttagttagcaaaaccgttagcatttctttgcactatcacatctcttcatttgacaataagaaggtcgagttgttttgctctgatgagaacttattgtgttcggggatgcttgggagatgttttggaagaagcttattgccttgtgaaacgttctaattgacctgctgataatgggcccagctagctatgctctgctattcttatgtaagatgtgaattgagctattcaactgctagtgtttttacatattccttgccccttttcatatggatcatccagaccctgccaatgctcctcgccttgctctgttagggcatgttcggtttgatctggagtgagggagattagagggattaaat

SEQ ID NO: 23014 - DNA, 1918 bp, Zea Mays
cgtccctaccctctcctgtcctgtcgttctcgtgcaagctcacggtcccccacgcccacgagcgcctccgctgcgacgaagagaatcatcaggcagagcgggggtggggcggggcgcagatggatctagagaggtcaccgccagcgtcgtcggcggaggcgcccggggacggcggcgggggcggggccgcggcctgctcaatctgcctggatgcggtgctcgcccgcagcgctggtcgctccgtcgccaagctacaatgcggacacgagttccacctagattgtattgggtctgcattcaatgcaaaaggagcgatgcaatgccctaactgtcggaagattgagaaaggtcgctggctttatgcaagcggacatcgcgcctctgttgatattgatatgggtggctgggtgaccagtgacaactatgatatcacctccgagcttccttttggatttcaatggtgcccctttagtggattcacccggctagcatccatgtttgaggagcgtgaagctgagcttacttatcacacaactggagatcgctcaagtgctgcaagcagttcacttgtttgcccatatcttgccctgcgtggttttctgcatcctgttcatgtgccttctacatctaatcctggtgctgaaagcacttcatttcgtcggcatgcaactggcttggaaggccatgccactcttgatttgaataatgctcaacttttccatgcgattgagtcaataaatcatgacagtgagcacagacatttgagtaatcttcctgtatcaggaattcctgagtattctatgactccatttggtataggactaccaagatatgacagtggcagccaacagagattcagatcatatgcacatcatcatcccctaatccataggccagcacctcgcagtgggagcaatttggtggcaccaccattggggtcggttccagctgtggtggcggcggcggagaccgcaagaggcagccacatgtaccaacgctcgtccgtgcatggcagcccgttccctcctaccaccactagaagggtgaggccgagagccttgacgatcacatcgttcatcgcagcgacgtcctcagacccattgaccggccgtacaatgcatggggccgggagggcttcgctccgttcccctggatccccgctgaaggcgagtctcactggtggggcaccttcaaccctgtgcagaaccatgcgcatggaggctttagcagaaggcctgctggggagcggatgccgccgcagagccaaagccacccggagaacagctatcaggctgtgccgccgtcacagaggatgccgccgttcttgtgattcgacaaggctgttcctacgtccgatcgctgtgtataaaatgaagtattcggttcggggcctgagagagcacattgagcgaagatcgactgcactgcagtctccagcgttgggacctgtgtgatgtttatgccgctggtatttcagcgcttttctttttccctccggtccagcagcactctggtttcattgagcgctgtagactgtctgtcctaactgatgttgtgttgcgttgaggaggacgatttggaaacgtgagccgaagctgaactgcatctctggtctccgggactaaaaaatgccgtttgctgctatgaaagttgtatcgatttgcgaccgcaggtcgcctgcaaatttgttagaacaggtgaaatttagtgaacacaaatgttggagacctgcggcgtttacattttttttgttggttaccgagattgtatttaaaggtcgtgatgcgccatcaagcgattgtgatggatcaatttatctccctattgtagcaatgggttttttttgaaaccgatggatgtatatgtcactagaagtaaataccagacaaatatagttgtatccatgctaatttgacca

SEQ ID NO: 23015 - DNA, 1864 bp, Zea Mays
gatagacggtccagagcgattcactcaacaccacatgcgctagggtggggatcttttgtggctgtggatcccatgtgccaatttatgtcccttcatgcggcgaaattccaatcggtagtatcgcgccacgtgtcaacggatgtaggcgcactaggatgtttttcattccaactatcggagtctgctagaaatatcccgtggtacacatccatgtaagaagtatcacaaaacagtccaaaactttataagtttaaccctgacttttaccaaaatagaagtcgtcgtcctttcaagaataaaaatattaaacataaattcaaaattctcaataatgctcctggaattattttttacatgtaaaattaataaaacaatacctagaaactcagataatttataatttattcgtcttaactccgattttagtggttctcaaacctatgatctcttagcgacgcatagaatattattgtgtagtttgttctcatgatttggtgtaatgttatcatatccattattatagaagtgaggtcacgaggagattcgaagcccaactcggttaagtacctggaaacacaagtaaaacacaagttgtgtccttgatcactttctttgacctaataatgttctcttaatcaccatggcactgttaggttaagatgatgggacctaataggttacctagttttgtttatcctataccatgcatacaaattaattattgggtagacttgctactgttgtacctggttttgggatacatggtacttatgattcatgatcatgtaccatgatgatttattattgttggctttattatgatacatgataggatcattttgttaattggaacatggagcgaccacccgagataacagtgctaccacaagggtggaatgggacacccttggctgattaattagggatgctagtgagagattaccttaccctaaagggcaagcaaggaggagttgctgcaagtataggaaggttctcggatcgaatagtttgtgatagcttttcggacgagggattcctatacccccctctacctaaaaccgcagtgggatttcttgagctagtggaactttgtaagggcctcgtagtgaaccattgccaactcaccttggaagtgtttaagggtctgtacaacccaggtgaaaagggaacacaacttatgggtaaaaatgcgcaatctctacagagtgtaaaattggtatatcagccgtgctcatggtcatgagtggctcgaaccttcacatgagtaatttgttgaattaaacttaacctgtcatacattgcattgcatgtgggttttattcattattgtgatcaattatttaattgggtttgtatacagttatactagtaattgctaataaaattttgaccaccactaaaagcaatgcttagccttaaccattctccttgccaagccttacactacacttttccccacacttgttgagcaatgactatatgggagatcactctttctataatcacaccagatcaagaacaagtactgcaagatgaggagcatgaaggatgttacgatgagttcggagaggtctaggctgtcgtctcctagttaactatggttacggaggattgttgtcatgatatgatgtatttatttagctattttgtatagaacctctattatgcaataaagatgtgacattaatttatgtaccatgagtcatcatatgtgtgagacttgatcctagcacacatttgagacacactcaggtttgccattacatccaggtatgaaaaatacatttctttcagatcctgatacttcttagtacttccagggtgtatagagtatgctgaatcatgagcctctctaagaataagc

SEQ ID NO: 23016 - DNA, 1471 bp, Zea Mays
ctcactctctcttatccaaacgcccccgtgccccgtctgcgtcgcgtagggttttggcaacttgcacgtacgagagcgtccatggacgacggcagcagcaacaaggtggttgaggacgtcgcggaggaggaccccggccgccgcggcggtccatggaggacggatgaggccgacgccaacgagaaggcgcctcgcccgagcaggcgggtcgcttccctcgacgtcttccgcggcctcaccgtcgcgctgatgatactggtggacggcgccggcggcgagtggccggtcatcgggcacgcgccgtggaacggctgcaacctcgcggacttcgtgatgcccttcttcctcttcatcgtcggcatggccgttcccctggccctcaagaggatcccggaccgtggccgagccgtgaggagagtggtcgtaaggacgctgaagctgctcttctggggcatcctgttgcaaggcggttactcccacgctccggacgaactggcgtatggagtcgacatgaggcacgtgaggtggggcggaatcctccagaggatcgctcttgcgtacctggtggttgcggttctagagatggtgacgaaagacggcgccaaggttcatcaggaccagccgccaggttcttcaggccgcttctcccgtgtattcagaatgtatctctcccagtggatcgtcgcgtgctgcattctggtggtctacctgtcccttgcctacggggtctacgttcctgactgggagttcagagtgcgaaacgctgacagcccagactacggcaaagttctaacggtgaggtgtggtacgaggggggcgttggaccctccctgcaacgccgtaggctacatcgaccgcagagtcctgggcatcaaccacatgtaccagaagccggcatggagaaggcacagggcctgcactgatgactccccacacgaggggcctttcagagaggatgccccagcgtggtgtgtcgcgccattcgagcctgaagggatactgagctcactgtctgctgtgctgagtacggtcgtcggtgttcactacgggcatgtgcttgtccacatgaagagccatacggacaggcttaggcagtgggttaccatgggcgtagctcttctcgttctcggaatcattctgcacttctcgcatgcgatcccgctcaacaagcagctctacacgttcagctacatctgcgtcactgccggcgccgctggggtcgtcttctcagcgctctacttcttggtcgacgtcgtgagcctgcgctacgccttcgcgccgctgcggtgggtcggcatgaacgcgatgctggtgtacgtgatggccgcggaaggcgtcttcgagggcttcctcaacgggtggtactacgagagcaccaacaacactctggtttactgggtgaggaagcacgtgttcgtcaaggtgtggcactccaccaggatggctgacaacatgacaactttggccaaac

SEQ ID NO: 23017 - DNA, 728 bp, Zea Mays
gacccagccagccccacaggcaggcactggccatgcgtttttttgaccgttcatgaaaagccacactgccttctggcactggcgctggtccgctggacagggtgcgcagcggctgcgttggaacggagtgcactgcgtccctcccgtcccgatgctacgggacacgccacccacagaactgggcgctgtccaagctgctgcatttaaatcctcctcctcgtcacttgagttcaaggcttcaagggaagcgagactgcgagagagagagagagagttgtacaaggctcgtcgccggccgcactgtaggggtaccttgagcctgttcaccgccgtcgcctgccgcctcacatccacagcatccatggccgacacagctcgcctcttcatgctggtggcggtggccacggcggcgctcgccggccgctcagacggcgcgtggtgcgtgtgccggtcggacctggcggacagcgcgctgcagaagacgctggactacgcgtgcggcggcggcgccgactgcaagcccatcctgcagagcggcgcctgcttcgccccggacaccgtcaaggcccactgctcctacgccgccaacagcttctaccagcgcaacggccagaacccgcaggcctgcgtcttctccggcaccgccgcgctcagcaacgtcgacccgagcgccaatggctgcacgtaccctgcgaccccaagacgataggtattggttccgggaaatg

SEQ ID NO: 23018 - DNA, 2908 bp, Zea Mays
aaaagcgttcgcgcccctgcgcccctcactgcgcatccgcatcactgcgtgtcctcctcctctccccctcactgcggcgcatccacatctgccaatttctccacctcctcctcctcgcccctgtgcctcgacatctcgcatccgctccatctatggaaggccaccacgcgccatggatcgccgctctctaccgccacctcaattgaaggttcaccgctctctacgcggatccgccacctcctcctcggccgccgtcaatagaaggtcccagatctcctctcccattacttctctccccattaccgcgctcgaggtctgccatttttggaggtccgccacttccgcctctgctcgccgtcaatggaaggtcctagatctcctctccctattaccgcgctcgagtcagtgggaggtccgccatttttggaaggtccgccacctcctcctcgacccgcggcaaaaatggcgtgggagatccgccacctcctcctcggcccgcggcaaaaatggtgtgggagatccgccacctcacctcctcccattctcacgcccgcgcctgatatggaaggtccgccgaagggactcggacgtcgaggccatggctgagccgcaccccttctccccctgcctcgcgcgcggcggccgagatggtgttggctgggttgttcgggatggtggtcctacctgccctccctgctatcctcgccccaaatcgacgagaatcatgcagcccaaatctgaggtggaggcgcctgcactgtcgatggaggtgtcgagtctgcggtggtgtctgtagatgggaaggcatggtgtgcagcagcagtggccaggtggtgtcgctgagcctgtcctcctacgggctcactagcacgctctccacggccatcggggacctcacgttcctacgtatgctgaacctgagctccaattggttccacggggaggtcccagcgaccatcgttcgccttgcgcatctgcaggcgctagacctgagctacaacgccttcactgaattccagagatgcaattcccgaggccatggagcagcagacaatatcaattgccaaagcagccattacaatagtactcattttagggacttcatttcttgcagctgccaatccaattacaggatgctatgacgctcttaagtgatcatgaacttatacattgaaataatggtgggcctcgagaggccaggaggtggagaggagttcaacaagtactacatcttgtctgctctcctatccgtggattgggtgcctgaaatatcctatagatgtctttagtagaggatccaaataatggcctgcaaggtttattgaatcggatcgcacaaaactccatctgcttcagaattgagctaagcgcatcctaacatcttgactcctatatcgatcaattatttttgttacacatttgattctttagtttcgtagagggaggaacatcgtgggatgcaggccccacggaacaccagatattttgaggtagaccgcggcgaggtgcccaagggcagcgcctagatcttcttctggatggtcaagttctgtaacgacaatgtggcagaggagatgccctgatcttcgtacgtatgttacttactcccactctcaacatagcagtagtaagtgcttgtttctgatgaatgtatcaatcaatgctatgcgtcactgtgaaatgttcttctcaaacattgtcatttgatctgatgtataatgtaatgtggcatgtcctccatatcagagttctccctgcttatttttgatagttttgtgtcccagttataggtgttatgcaatgacctgtctttccctaatgcaccaaagcttggatgggtccgttgaaggttgtgtggtttatgtatgcttgtttgctccaaatataggtgttatgcatgaataaagttcccgtgggatctgaagctttgttggcttaaaatggttttttttgtatttttcacatgagataatttatgacgagctgagcaattgtcgattatcttagtgcaattgatgttggagcagaagttagtgtctgtttctattttctaggtttctgtgtttcaatggcctcttgaaaattgaaaatggcctcttgtaggctgaaggatgtatgcatggaatagaagtcagataaatcttttgtgcaacaggctgaagtcattcttgttgatgggaaattaacagaggctaaggctaaccagcttgctaaggtttaaatgcaggtcagtttgcctactaagcatccacaaaatctcattataagttctgagaaggccaagtcaattgttcagtatattacaaaagtcaggttggagaactcccttgttcaggcttttgtctttcttctgcagaaggagagatgacgtgctgcatgacatgatggcatgtgaggcagcaacctcttctccgcaacccttgtcatggcctggagttggtgttctaggaaggagcacaattttattagggtagccaccagagttgaggtcccttttcaatggacgaacttggtgctgtggacgacatctgctattgtagctaggcgcatacatgttttcctataaatgctagctctgcaatcaccaaaggaaaacacaagagtactcttggaggaaagtttagcattcagtttaacaaaccttaccaactcatgccttgtttgaatgcaataatgcatgttatgttgccctgttgttgcttggacacatgcttggcatggctattttctggttatgtcacaactcacatctcccatgtaaatttatggctatgatatgcatcaaacaagcttatattttgctcttaagttggttcaaacagttctaattcattttaataattatctaaaattggtttgataattggtgcaataaggaactcatttgaaaggtaagagttatgtgttg

SEQ ID NO: 23019 - DNA, 5354 bp, Zea Mays
tccagctccaccctccactgcagcagcttgcttgcctttgctccactcccatacagagtccagacgcccgccccgtcgccgccggcactcagctaccaagccgccgtcccggaccctcgattttcctcgccggagcggagcgcccacccctcttcgctcgcctcggatctcgcccccgatttgctccgcccgctcatccccaaccactattctctcgtctcgatccagcgcaggctactcgagattcagctgccgccgccctctggatccggccacacaatccgcttccgctcccgctgcctccccgacccgaccgcccatctcgctcaggctccctcctagtccctaccctagctgctagctaccactaccactaccatggccgccgggagaggccacgcggaggacatgctgggcttcaaggaggacgacgccatgcgcttcatcttcggcgaagacatcatgggaatggaggaccacggcgccttcgacagatccctcatggagcttcaggttttcaaggaggtcttctgcggggccgcccataacgtcgccgccaccacccatctgcccaccgagatggaccttggattcgtccacaccagcgccgccgctgcccacctcaaggccacggagacctcgccctctccatttgtctcccatgcgcagcagcagcagcctgctgccgctgccactgctgatccacagctcacaatggatcgtagccagccaaactatggacctcgccacgaccttcacccccaggttcaggagcacgcgcacactcgtgcgcagcaaaacgggaccgagctggatgatgctgcgttcatgcacagattcatgggttcctggcagcctggggataagcacgcgatccatctgctcggcctatccgatgaccaacacccattcgtcggcgcagatttggatgtgcacgcgcaagatattggagctgggatgtgcaatgctcccgggctgggctgcagcagcagcactagcgcggttgatgaccccatgccttccttcatagaagcgctagcggagatttctgaattccagagtgccactctccttccagatccctttttgcatcagtggttccaggagcagcagcaattccctaccaatgcatgcttctcttacgatcaaggccagatggatgacaccacttatcccctatgtgcaagtacaaaggatttccctgacagagagcagcatctgtgttacagtgaagaagctcatagtactccaacaatacctcatcagtcccatatttggttcagccctggtcagttcacccagctcgatggcaccaccatttgccaggaaggcacgcctgatgcgaatattagttgcccggatgaaattgatgttcatggatgcggcagcagcgcggtacactttggctcggcagctgctgtttccaagaaggccttgggcagggatattcctgaccagctggaagcacatgcgcatcgccttttcaaggacgctggatggactattaagccacggaaaaggaatgacagggctaagatggcgtcctacttcacagctccaaacaaggaagcggttcatacctcactaacccaggcttggaagttttgtggcaaaaagttatatgaagcttccccagatacagaaaggggaaggtatccaaaggagtggtcagatgttgattcgttttggaaggatctcacagatgcaatgacctatgttgataggatgcttgcaaaccagcaaaatgcactcacgcttctccaacgttggcagattttggatccttttgtagctgttgtgttcatcagtaggaaaatcactgctctgcagcaatataaaactcttagagctgtcgacagttcaacctttgttcttgatggcagctcagacacatcatcggtaagtaagatcatgcacaaagccagtgagcttttgacaagccgaatgatccggttgactccactgatcacagactctgattgcagcacacttgcaactgagagctacaacgggcatcaatctttacagagctgtcatgatgtagaagacaacaactatagggatacggacccaaagctttcctgcaatgagagtctgaattacaatgcaagtgacgagacaaaacatcacatcgatgcaagtaatgatggaagacaaacttatgctcaaccaaaaactcttaatagctctgtaaaaatgtcaagcaagaaaccgaaaagaatatttgatattagtgcagatggactggacgagaccaatgtagcaactatggacatggctgacccaggagacactaatgcctttgaggaacacattatgtattcaggtgttagcacactaaaagacgatatgaaagctgaaacaaaatcagaaaagctagataaagatgatcaaagcagcaagtgtgacatgctcctctcttcagtggtcaagcaacttaaggattacagtacattctcagatacccattgtactacaagggagtcacagtcagatgccacaacattctgccatgatgacaaggtctggaaaaagatagtcccatcccatggagaattttatgaggattcacagagtgagccaacaggaaatactgcacctgttgaattatcccatgatgttctgggaacttatctaatctgtgactcacaaatctgcgagagaggcactgccaaaatgaaaacgaaggattggttgaagtacatgaagaaaagacctcgcgagttgcggatcaatgatgaggaccttttgatgacagctatagtgaaaaacaaggaccttggcacctgtcacaaatttgcttcaggttcttcagccgcaaagaagtttaagaagctgaagagccacaagaaaggtaacaagctactttctaaaattgggaaagctggcacaaacctattgggtggaaagagagtaagtttggcccgtaaaactgtaatctgctggttgcttgcgactggctttctgagcgtaaaagatgtgatacagtaccgggatccaaaaagtaataaaattataaaggatgggatggttacctgggaaggtattgtttgcaattgctgcaaaaaaaacttatccgtatctgatttcatggctcatgctggtcgtagtcacccacagtcctcattgggcctctttctagagtctggcaagtcatacactttgtgcctggttgaggcttggtctgctgaatctatgagcaggagaagcaatgcatggggtagaaaagttgaggcaatagatgaaagtgatgacacctgtggtttctgtggagatggtggtgaattactttgctgtgacaattgcccatcgacatatcatcaagcttgcttgtctgctaaggagcttccagaaggtagttggtactgccataattgcacttgtcaggtttgtggggggccatttagtgaaaaggaggtttcaacattctcggcgattttcaaatgtttccaatgcggagatgcataccatgacacttgcattgaacaagagaagctacctcttgaggatcaaatatctcagacatggttttgtgggaaatactgtaaagagatattcatagggctgcgtagtcatgtcgggacagataatattcttgacagtgacctttcatggtccatactgagatgcaacaatgacgggcagaagctacattctgttcagaagattgcctgtttggcagaatgtaatatgaaattagcagtggctcttactctattggaggaatgtttcattcgtatggtggatcctagaactggtgtggacatgataccccatgttttatacaacaagggatcaaactttgctcgtgtggattatcagggattctatactgtaatcctggagaaaggtgatgaaatattatgtgtggcttctatcagagtacatggaactaaagccgctgagcttccttttattgctacttctgtagactttcgacggcaaggaatgtgccgaattctaatgagcatcattgaaaagatgctctgttcatttaatgttaagatgttggtcctttctgccatcccagagttggttagcacatgggtgtcaggatttggcttcaaacctatcgaagatgctgaaaggaaacaacttcataatgtaaacttgatgttgtttcctggaacatccttactaacaaagagattggatggatttattatggccacaaaaccaggcgaggaaaaggatatacatgaagtttctggagtgcctaatcttaagcgtatgcctaatgggaaagcaaatgagcatttcaaactccatgaccttgatttgtccgggacagagtttaaagctgaggtttccgtgaatggtccattcagaacactgaaacatgaatgtggttcagcagcatggtttcagtctactaagttagctgttggggaagtgtgatattcttacacaaattatctgggctcatgctctgcatcgatactagctgctttgtgttggccaatttcgtcttcccacttcatggctcaaattaatttgcagcagcaaaatcattcgaacacttgctgctgcatgaactcatccttttcaagtaaagttctcacaagactactgggaaatggttgggatgacgcaggcatccatgaatttgggttgagcaaagttgaagaaaccacagattggtgtggtctgttctgcatcgagaaaatggaaattataactgtctctcctgggtgaagtgctctcctgagactgggtaaagtacgcaacacctgagttgatattgcttgcacgttgaacaaagaggatgtatttgcactccaacgtacaaagtgtaacgcattcggccccttttcaaagtaagccatgataggaattaatctaagctgtttggtatatacatcaaaagggtactgcagtaacatgtttggtaccttctcttgcgagttttattttgatatatgtgttttatatgtgtctagattaatcatcatctatttaaatatagacataaaaagaattatattctggaacggagtgagtattattttgccatatgtgctgttaggttgaggcccaaatggcaatgcaatgcatctgtcggcagttgattttcctgagtgccagattggttttgtaatccttgcggctatggaacgattgttcgtcaagtccttaagttattttggtttgtgattaaataatcgggcgtccgatccatggtgggcaccgttctctctacctgattttcttctgtcgctgcctgcaagcaacagagttttggttgccgtcatttcggtctgctgcaacaaagtttcttcttcgccaatctctgtattattattatattgtagaaagaaacaacattggagaaatagaaaccacgtcatattgcc

SEQ ID NO: 23020 - DNA, 1409 bp, Zea Mays
ggccgtgcgtgcatgccggcgacagcacacgcgacaagtcgatgatccggaagcggtacatgcacctgacggaggagttcctgtcggagaacccgagcatgtgcgcgtacatggcgccgtcgctggacgcgcggcaggacgtggtggtgacggaggtgccgaagctggggaaggcggcggcgcagaaggcgatcaaggagtgggggcagcccaagtcgcggatcacgcacctggtgttctgcaccacgtcgggggtggacatgccgggcgccgactaccagctgaccaaggcgctggggctgcgcccgtccgtgaaccgcctgatgatgtaccagcaggggtgcttcgcgggcggcacggtgctgcgcgtggccaaggacctggcggagaacaaccgcggggcgagggtcctggtggtgtgctcggagatcacggccgtgacgttccgcgggccgtccgagtcgcacctggactcgctcgtggggcaggcgctgttcggcgacggcgcggcggccgtcgtggtgggcgccgacccggacgggcgggtcgagcgcccgctgttccagctcgtgtcggcggcgcagaccatcctgcccgactcggagggcgccatcgacggccacctccgcgaggtggggctgacgttccacctgctcaaggacgtgcccgggctcatctccaagaacatcgagcgcgcgctggaggacgcgttcgagccgctcggcatctccgactggaactccatcttctgggtggcgcaccccggcgggcccgccatcctggaccaggtggaggccagggtcgggctggacaaggccaggatgcgcgccacccgccacgtcctctccgagtacggcaacatgtccagcgcctgcgtgctcttcatcctggacgagatgcgcaagcgctccgccgaggacggccaggccaccaccggcgaggggctcgactggggcgtcctcttcggcttcggcccgggcctcaccgtcgagaccgtcgtgctccacagcgtccccatcaccaccggagcgcccaccgccgcctgagtcgtccatctatcctcgcgatcgctccagacatgaacgacccgacctacgaataatgtatctgcgtaattaattactatctgtcttgtgtcctagtagctgttttaaaacccttaattaattttattatgggcgagctagctcaagagtggagtcataaaaccgcatggatggtgaggtattgtatagtacctgtgtaagacaagcttggctggtttttttattttatattttaatctgtttgctcaagacaaaacaaaaaaaaaaatgaattgttgagctgtcattaatttgcagtgcaccagctcaagttggttgtactcctatcctatgtatgaaatgaaatcccttctagtagtatct

SEQ ID NO: 23021 - DNA, 579 bp, Zea Mays
tttggttgtttcttttgttctctcggaaaatgacaagatttatcaggtcaaacaatggacttcagaacacagaacaacaaaagatatccaagtatatcaacacacatgttacagaggctttccctatgagaaaagcaggaaagtttggtaacgaaaattgcaagaactttaggggtcatggcgactctgctaagttggacacttttgttccatccatggaggctgcaaaaccaggtttcaaggaagttgagaaatggagtgaaaatgctttgtggagtgtatctgagcttcatgttggcgatgagaagcagactggttctaacaaatctgatatggaaagagtactaaaagggtttggagcttgtgatgcttttgtggcttctaggctcaacgcccctaatggacaagttggtggtattacgtttaagtcttcagacattgcccttctaatatgattgttcgtaggaaagaaagctcctctggattttgcctcaaagactagcttgcagtttgtttcattgtcaccagtcaagtggagtcaaggtttcctcaattgcggatgctcgcttgctgctatgt

SEQ ID NO: 23022 - DNA, 2471 bp, Zea Mays
ctgctatgctatgcttaccccgttctctctctcctccctttctttctcatctactactactagactactagtaactccgcttcgcttcttccgaagcggcgcgggcggaagcgagggcagctcacaccaccgtgccgcgcgcgcgcgctctccacccaccacctaattccgccgccgagctcgccgacgcggccacccgcgatcgggcatttggacccgtccccgctcgccgcccgcacggcggctcgttgcgggaaaagtttctcgaggccgtctgtgaccccgctccctcggccgcgagatcccgcccagccgcggtcgcagaatggcgcagagcaactgggaagcggataagatgctcgacgtgtatatctatgactacctgctgaagaggaacctgcagacgacggccaaggctttcatgaccgagggaaaggttgctgctgatccagttgggctgaaccaaggtgtaagcggtttaccactgaagggctggccattaactggaattgaccagttaaggccgaatttgggtgctcaaatgcagaagccatttctttcaacacagtcacagttccaacttatgtccccacagcagcaacaacaatacttagcacaggcccaagcacaagggaaccttggaaactcaactaattatggggatattgatccccgcagacttacagcattgaccaggggtagtttgaatggtaaagatagtcagcctgcaggaacggatggttgtattagttcccctatgcaatccagttcacccaaagtcagaccagaccaagagtatctcatgaagatgcagcagacatcttcccagcaaccccaggaacagcttcagcagcagcagcagaaccaacagcagcaacagagccaacaacaaatgcaacagaacaatagaaaaagaaagcagcctacttcttcaggaccagcaaatagtaccggtacaggaaacactgtgggtcctgcaaactccccaccatctacaccatccacacatactcctggggatggacttggaatgggtggtaatatgcgccacgttccaaagaacttaatgatttatggtgcggatggaactggacttgcctcctcttcaaatcaaatggatgacctggagcagtttggtgatgtgggctctttggacgataatgttgaatccttcttatccaatgatgatggagatcccagggatatttttgctgcactcaaaagaagtcctgcagagcctagcccagccgtttcaaaaggttttactttcagtgaagtcaactgttggcgcacaagcaacagcaaaattgtttgctgccacttctcttcagatggcaagattttggctagtgcaggacatgaaaagaaggctgtactttggaacatggaaaattttcagacacagtatacaccagaagagcatgcccttattatcactgatgtccgtttcaggcctaactctagtcagctggcaacatcttcttttgatagaactattaaattatggaatgctgccgatcctggattctctttgcatacattcactgggcacaacggccaggtcacatcattagattttcatccaaagaaaacagaccttctatgctcttgtgatggcagtggtgaaatccggtactggaatgtgacccagtttgcatgcttgcgtgccataaagggtggtagtgcccaagtccggtttcagcctcatgttggacagtttttagccgcagctgctgaaaacgtggtttccatatttgacattgagacacatgggaaaaaatacactctacagggccataacactgatgtgcagtcagtgtgctgggacaacaatggggaatatattgcatctgtcagtcaggacctagttaaggtttggtcaatgtcaactggggattgcatttatgagcttagttccaatggaaacaagttccattcttgcgtgttccacccgagctattccaatctcttggttattggaggctaccagtctctcgaggtttggaacatggtgaaaaaccagagcctaaccgtacaagctcatgaaggtctaattgcggcgctggcgcagtcaccagtcacagggatgatagcttctgctagccatgacaactctgtcaaggtgtggaaataacagtaacaacgattatgatgcatctaggtagttttttttccagggcaagtgaaatttctcctgctgaggcataaaataaggaagagtagtaaattagatggttgccggtcgcggttcagctgtccaagagcagtgagtttgttgatgggttgtattgtatttatgctgataggctgtttgtgtagctcagaaacaaaaaagaatacattggctgaaaaggtgtccgcctgttttattttttgtttctgccgtatcatatgtaaccatttaacgttccctgttttttaattggaactcgctgcgattggcatctggcagaaaaaaaaccagagatact

SEQ ID NO: 23023 - DNA, 3179 bp, Zea Mays
agctgcttgctccgccgccgccgccctcttcctcctctactggttgcagcctattccaccaccgacgctgaaggccatacgcccccaatcgaatcgatcacatctatgccgtcgatcaccagaggtgggcgtggggggctcttctccacgcaccggggcgcgctcttgtggctccgccgttgccaaagcccactcttgtcgacactagccggcggcggaggccggagcgacgcgccacatctgcccgtactcatcgtcggagctggccctgttgggctcgtcctctcattcctcctcaccaaattcgcactatagccctgatttgaacaaacagatctactcaatgttaccaatccatcaagagcactcgggtttgagtaacactttcaaacatcaaaacccatccggccaccatatgtaacccaaaagttccaagcttcatcggaactgctaaatgtcataccaatttgtggaattcaaaaaggaattgcagcaactatgcggttgtaaataatgcattcagaacacgaccaactggatgttctcatcatttaaagtagaacttcaaccatgcagaaacgaataactaagtaggagtagagcacaaaccttgcaggtgattcctcgagcagctgctgggtgttgtccatcgcaacatcaatagcttgttgggcacctgccggcgtgcttggtgctcttgtggagattgtacaggatctcgggtagactgcacagcgccaactttcttcaccacggacatttttttagtaccagcacagacaccttgctgcctccacaatcaacgaattgagagtgcaggaggacatcagctccagcacgtgcagggcagcacaggtgacggtgccttcatgcttcgtgggaagaggcattggggcaacgaatggaggagcaggcgaggaggtgcacacatggcagaggtggccccggaggttccaaggtgatgcagctctccagcctccctccactccgagcaaagcgaaaagtggtgccaaagcttgtgtttttttgcctccaaaggagcagagaaggtggcgggggcttgtaaaatgtggcacaatgagcatgaggtgctttgcccttcgatttgatatggacgaccaagattgtgagactgctacagttgcagtctctagctactgcaccagatccagggatcaaatgtgcggtgatagagaagaatgtggagttcactaggcacccacgagcgcacttcatcaacaaccgcacaatggagatcttccgcaagttggatggcttggccagggacattgagaggtcccagccaccagtagatttgtggaggaagttcgtatactgtacttcactctccggttctgtccttggatcggttgatcacatgaaacaggaagattttgacaaggtcattagtcctgtatccgttgcacatttctcacagtacaagttagttgatttgctactcaagaagcttgaaggtattggtttccagacatgctttcccagtgagattggtaactcaacacaagatttggtactggaaagcaagatattgatgggacacaagtgcacatcccttgatcagactgatgagggcattctggttggagcatcagttaacaatggagggatgataatagagagaaagctacactgtggtcttcttatagggacagatggcgcaagaagtacagtgcgtgaattggcaggtatatctatggaaggtgaaagggatttgcagaaactggtcagtgtgcattttcttagcagagatctaggcaggtatttgtccagtcagaggccagggatgctgttcttcatttttaatccaggtgcaattggtgtactagttgcacatgacctagagaatggggaatttgtattgcaggttccattttatcctcctcagcagatgtttgaagattttagtgctaaggtatgcgagcaaattattttcaaattagtcggatgggagccagcagatgttcatgttttagacataaaaccatgggcaatgcatgctgaagttgcagagaagtacatctgctgcaataatcgagaatgaacaccggtgtccaggatgtacataatttggcttggaaattgggcttactgctgaatggtgtcgcctcaccatcaatattacaaacttatgagtcagagcgccggcctgttgcaattttcaataccgaacttagcgtggagaatttcaaggcagctatgtctattcctacaacccttggccttgatccaactgttgcaaactcagtgcatcaagttataaatagaagcctcggatcaatcattccaagaaatgtgcagaaggcagttctagaaggattgttttctcttggtagggcacaagtctcagactatatcctgaatgagaaaaatcccattgggtcgttgagactagcaagattgagaagtattctcgatgaaggcaaaagtcttcagctgcagttccctgcagaggatcttggcttccactatgcagaaggtgctctagttgttgaagctagttgtgagaagactcatgaaggagaaaaactacagcattctaagagggcatcaagagagtacatcccatctgctaaggttggttcgcggcttccccacatgctagtaagagaagtgcctgcttcgagtgagggcgcgttctcaacactggacctagtgagtggggataaactcgagtttgttctcatcattgcaccagtgaaagagtcatatgagattgcccgtgccaccctcaagatagcagatgagcttacgctatcagccagagtatgtgtaatgtggccacgaggttcgactgatgctgaagtggaagagagcagatccgagttgacaccctggacaaactacatcgatgtcgaggaagtgcctagggtgtcgggtggttcatggtgggagatgtgtcgtattagtaggaagagtgtccttttggttaggcctgatgagcacatagcatggctaacagaactggacagggtgagggatgctgagtcagaaattaggagggtcttctctcatgttctgtgcctaaatagccaccgggtgtaagaatttataaatttccttccatttaggctttgtttagatactttggtattcactttaatccacatgtatggaagcggattaggttataaattaaattaatttacatcctaatccac

SEQ ID NO: 23024 - DNA, 1474 bp, Zea Mays
ctcatgtggtcatgctcttcatccccatatgcatcctctctctctccccacaccatgtgtgtgcccagattcccctaaataggtgtctcgcctctggcatcagtcccctcttccccttccttctcctcggtccctatccgctgctgcgaacagcagaagctgcggcacggaggtgcgctcttcccggcggtggagttgcagctgcagggggaagaagcgagctagagctgcagggatgataagcgccaagtccaacgccgccgtgtacccgtgcccggagtatgcggaggtcgaccccaccggccgttcagcgacgttcttggcaagggcgcgtccaagattgtgtacaaggcgttcgacgagtaccaggggatggaagtggcgtggaaccaggtgaagctgcacgacttcctgcagagccccgaggacctggagcggctctactgcgagatccacctcctcaagacgctcaagcaccgcaacatcatgaagttctacacctcctgggtcgacgtctcccgccgcaacatcaacttcatcactgagatgttcacctccggcaccctccgccagtacaggcagaaacaccggagggtgaacatgtgggcggtgaagcactggtgccggcaaatcctcagcggcctgctgtacctccacagccacaatccgcccatcatccaccgggacctcaagtgtgacaacatcttcgtgaacggcaaccagggcgaggtcaagattggcgacctcggcctcgccgccatcctccgcaagtcccacgctgtccactgcgtgggtacaccggagttcatggcaccggaggtgtatgaagaggagtacaacgagctggtggacatctactcgtttggaatgtgcgtgctcgagatggtcacctttgagtacccgtacagcgagtgtacgcacccggtccagatctacaagaaagtgatctctgtaagaagatccctggaccctatgagccatttggcagcaattgtgattctggtgtgcagtctgaaatgattttcgtgatttcagctacctgtttgatttggtagggtactaagccagaagctctgtacaaggtgaaagatccaatgctgaggcgctttgtcgagaagtgcctagtatcgtcatctcagagactgtcagcaagagaactgcttgaggatcccttcctacagggcgatgacgtggctgtttctttggatggtggagattatcatgtaccgaccaagtacgtacggcagccttcatatctagggcatacctatagcaatggctccatggtgagtaatggattctcagaaagcatggatgaggacgctctgagtgaagactgcgaggatgatgacatgaaaggccaagatggcattgacctgttcaacgagaatgaggatgaacctcttggcaatgtggacataacaatcaaagggagaaagagtgaggatggaggcatacgaatctctagattccg

SEQ ID NO: 23025 - DNA, 823 bp, Zea Mays
gtcggagttcccacattcatgcctcagacctccataaatctctaatccaaaccatgctacactaagccaaaggtagggcgaacccgttgggggcgaattacctcggtatggtgcggcgactgctctgcccgcgcgacggtgcggctctgcggccaatcctggcgatgacgacaaattacgcgcaccacggacggattcctagctcgccaatggctcctacaccttcaacgagcactagcgaaccactgagtccccttgggtcgagcacagatagtaccggcggcgagttgatatgcagcggcacccacttcccctttttctcgatggcaactccctctctccctctcttttttgcaccaggcacgactcggatgcatgggttcttgcgggcaggggcatggggtccatttttattgcgcatgcgagggtgattcgaccgattcggcccacctcgatttcggctggttccgttggctattgacacgacctttgtttcagttgagaagaaagtgctgacaaggtggccccacatgacagtggcagaggtgagtctccgcaccggccctcagcgcctgccccaatcgtttcggaaggattgggtaagtgggtcacgcggaatttggttcagctgggccgaaaggaggagattaggcccagacgccttttttctaatttccttccctgttctttttattttccttttaaatttcatgttttcttttcttttaaatttcaaatttgaatttctaattctatgagttatttgtacacaaattgaatgtgtaatttgaacacaccaaattgggatgaacttattttttta

SEQ ID NO: 23026 - DNA, 3014 bp, Zea Mays
gccgaccagacgttggactgggctgtttggtttggagccgaccagcgtttcctagccaaggcagcaggcgttggattttgagtgtctgggggctgagattgtttgtctggcagacaagtgtttgaacgcatcacatctagtgaattggccggagtagaaccactagcatccacactagctgcgacatcttctgttggcacacgagtgccaatgcagagacctgactgtggtggcgcattatctcaagcaaaggtcaaactcttggtgaatcactttattgtcaactaccaaaaggtgtcaactatttttcactatgacataaacatcaagcttgatgaagcttcctctaaggcttcaggcaaagaactctcgaaggcagaatttctttctgtcaaggatgagctcttcagggaaagcagtttacggcgtctttcctcatgtgttgcttatgatggtggaagaaatctcttcacttctgctgaactgccagcaggtttatttcgtgtgagagttcgatcaaaggcctacattgtatcagtagatttgaagaagcagctgccattaagtcaactctcagatttacctgtacctagagaggtcttgcagggtcttgatgttgttgtgcgtgaggcctccagatggcgcaaggttatccttggtagaggattttactcaccaagcagcagtatagacattgggcagggtgttgtagctatgaaaggaacccagcagacacttaaatacactcaacaagggttgaacctgtgtgttgattattcagttatgccattttacaaagctggaccggtgatggaccttgttcacaaaatagtggggtaccttgattatcgaacaactctgaacaagaggcaaatggaaaatctggttgatgagcttaaaggccgacgtgtaactgtgattcatcggaggactaatcagaagtacacagtgcaaggcttgacacccttacctgccagccagatgacctttgtggatgctgaatccggacaaacaaagtgtcttgtggagtattatgctcagaaacatggcattgtgattgagtatcagatgctgccatgcttggatttgagcaagagcaaggacaaaccgaatcatgtcccaattgagctctgcactcttcttgaaggacagaggtttccaaaagcaaacttggataagaattctggcaggatactaaaaggaaaggctctaattcctgcatccaatcggaggaaagagattctagacttggtgaatgcttcggatggaccttgcagaggagaaattgcacagcgatttgggatttccttggatttacgaatgacagaagtcacgggtaggatccttcccccaccaaacctcaaactcggggcatccaatggccagacctccaaattcagtatcgatcagaactgccagtggaaccttgtgaagaagagactcgtagagggccgggatcttcagtgttggggcattgtcgacttcagtgctgagccgtctgacccccagcaggagcccctcaatggaaggatgtttattgagaagattgtgaggaagtgctgtgagcttggtatccgtatgaactccaacccatgcttcgtacacaaatctaagatggcagtgctctccgatccgcatcgactacaggaggagctaaacaaggcaaaacaggctgcagtgagcaagaagcagaggttgcagctccttttctgcccgatgtccgagcagcatccagggtacaagacactgaagctgatttgcgatacacagcttgggatcatgacccagtgtttcctgggcgaccgcgcaaacaagccgaatgggcaggaccagtacatgaccaaccttgccctcaagataaacggcaagcttgggggcagcaacgtccagctgttcgactcgctcccacgggtcggtggggcacctttcatgttcatcggtgctgacgtcaaccacccgtcaccggggaacgtggagagcccatcgattgcagccgtggttgcgtctatcaactccggtgtcagcaagtacgtgacaagaatccgtgcccagccgcaccgctgtgaggtgatccagcagctcggcgagatctgcctggagctcatcggagtcttcgagaagcgaaaccgcgtgaagccgcagaagatcatctacttccgcgacggcgtgagcgacgggcagttcgacatggtcctgaacgaggagctggcggacctggagaaggcgatcaaggtgggcggctacgcgccgaccgtcaccgtgatcgtggccaagaagcggcaccacacgcgcctgttccccaaggaccccagccagccgcagacgaagaacgggaacgtgccgcccggcacggtggtggacacgggcgtggtggacccgtccgcgtacgacttctacctgtgcagccacgccgggatcctgggcacgagcaggccgacgcactactacagcctggtggacgagcacggcttccggtccgacgacctgcagaagctggtctacaacctctgcttcgtgttcgcgcggtgcaccaagcccgtgtcgctggcgacgcccgtctactacgccgacctcgcggcgtaccgtggcaggctctactacgaggcggccatgatgccgtcccaccagcgagggacggggtcggcgtcctcgggctcctccgctgggacttttggcgtcactaacttcccgaggctgcacaaggatgtggagaacaacatgttcttcatctgacaccagtattttcttttgtgtgtacgcgtcttgccttttcttttgtgtggttatgagtttttttaaaaaaaaaagcgtacgctgcagtgtgcaaagttcgtactgggtatacgctgcatgactgtagatgaaggaaaagaagcaggtttgagttgtgaagaactgaagatagcgctgtaattgttccagcacaaggtccggttggaatgcaggcgttctatttcgagcgcatgtctggcgggcactcccaggcgtggttcaggcctgtcacaagatttcgg

SEQ ID NO: 23027 - DNA, 2157 bp, Zea Mays
tcgcactaaaaatgtcattacgcacccaatccgcttgtcgtaattcctaggcttttcagttcagtgcagtgtaccaagattctctgttaatttgtgtatgagatcagttaactgataaagacatgtgaagaaccagtgatcagtaatctgtacgcttcagattgtagtatccttgagatggatggaagagaatcaggcttatggtaaatcctggtgaatattcatgggaggtcagcaagttctggcctgactaagactagtaaaaatacggtgcttcatctcagatcatcaatggtgagaatgaggttcccgaaacgttatataatagtattgttgacattcatctgcacaaatgtttgctacattgagcgtgtgggtttctcaattacctatactgttgcagctgatgccatcggtgtgaatcaagccaacaagggcatgatactctctatgttctattatggttatgttttatcacagattcctggtggatgggcagcacagagaataggaggtagacgtgtcctgctactgtcatttgtattgtggtcaatgatatgtggtttaattccacttgatcccaacagagtaaccattctggtcctttctcgcctattcgttggtgtagcacaaggtttcatatttcctgccattcacactgtcctggcacaatgggtgccgccgcaggagcgctctcgctcagtatctcttactacctcagggatgtatcttggtgcagcctgtggcatgcttttcttcccaagtctggtgaagcacatgggaccccagtcagttttttttgttgaagcagtgttgggagcagcatggtctgtaatatggctgaaattttccagtgacccaccccgtactgatcttccaaaggtatcaatgccaaaagtgccatctcgagacatgattaaggcacaagcaggaggggttgtggcacctcgcacggtaaagatcccgtggcgaaggataatattcagcctacctgtttgggcaatagttgtgaacaacttcacgttccactatgccctctatgttcttatgaactggctccctacctattttgagctaggccttaagcttagcctccaggatatgggttcctcaaagatgcttccctatttcaacatgttcattttctccaatatcggcggtgtggttgctgatcacttgattacaaggaggattctatctgttaccaagacaaggaagcttctgaacaccatcgggttcatcgtctcagcgtttgcactcatggcccttcctttgttcagcacaccgtcaggcactgtaatgtgttcagcgatatccctcggttttcttgctctaggaagagcagggtttgccgtgaaccatatggatgttgctccgaagtttgcagggatagtgatgggagtctcaaacacggcggggacactggctggaatcgtcggtgtcggcctcacgggcaatattctggaggcggcaaaggcttctaacaaggatctaacggactcggaaacctggaaaacagtcttcttcgttccagcatacctttgtattttcagttccgtcatttttttgatcttttcgacaggcgaaaagatcttcgaataaagggtggctattactttttttgccaattcttttcttacttacggtgaggcaggattgtgaaacgggtatcttacatgtatctgtagcatttgttacaaaattttcagattttagactgcatcacatacacgatcagaggctatgtcaggagatcttgcattttcgttatgatgaagactcggttcattggcagtcacactcacactccaatgcagctaacagaatttgcttctctcccaggttaacttcttggttttggtacatagtcccaccacaaagtttgtcaagttcccttacctttgccatgcaatgtaaacatatatggtgccaatgagaataaacggcattgctattttcttatctgcatggcccttgttgaggcaaattcacttccttcgagtctctcaaccatttttctggatcttttttttagttgtggtcaactggttatatagttggtctttccagcgttgacaggatttatgatttttttgttgctcttcaacgagacaaggcttaacattcatagatatgactccattattactggtcttt

SEQ ID NO: 23028 - DNA, 800 bp, Zea Mays
gctgattcctcgtcgccagcttctctttcccccaccacaaccccccgccggcgcggctcccggtgtcccttccactctccaccctctccttcccttcggcgccaagtccatccgcccctccgaatctccgattgccgccgtccagttttggcaggtgccggccgacagttgagaatgggactgaggcgcctgatgagatgctgctgctgcattgcaaagcagcacgcggacgacggcgacaagatcgatttcggaggtggcaatgttcatgttgtcacaagcaaagaggactgggaccaaagaattgccgaggcaaacaaggatgggaaaaccgtggttgcaaacttcagcgcttcctggtgtgggccgtgccgtgtcatcgcacctgtctacgccgaaatgtcgcagacgtaccctcagctcatgttcctgacgatcgatgttgatgacttgatggagttcagctcgtcgtgggacatccgcgcgaccccgaccttcttcttcctcaagaacgagcagcaggtggacaagctggtcggcgccaacaagcctgagctggagaagaaagtggccgccgtcgccgacgcggccggcagcaagacagtgtagtgtaggcaaagacccgcctagcttgttgacctggccctgtacatcgttatatcctattgttgctgtgtgtttctttcttggcaccgtgcgcatgcgtcgatctgtcggcggtaatgtcttccgccatgtgctgattgtaagagttgcccggtaatggtaatggtaatggtaatggtgtcttacggtttctg

SEQ ID NO: 23029 - DNA, 855 bp, Zea Mays
ggatactgtttagtggaagatagaggtgaaagcagcatggttgcaacagtacaaaatagtggagatgaagcttctagcacaacaacgagaccttcaggcaaagattcctgatatagagaagtgtttggatattgtttcaacattacaagctaaaaatgatttggctgattttgaattatccgaggggatatactcctgtgcgaaaatcgaggatactgactcagtgtgcctgtggttgggtgcaaatgtgatgctggagtactcttgcgatgaggccaatgccctcttgaagaaaaacttggaaaatgctaaggccagcttagaagtccttgttgctgatcttcagttcttgcgagaccagcaaaccatcactcaggttacaattgctcgggtattcaactgggatgtacaccaccggagaagcaaacaggctgtaaaggaaccttaatcagttagatcacgaggtcaaccaatgtgattgggacaaattttttcgtaccttttggtacctctggcagattagtccatcatagcgagctctttgtttgttgatggtttctttgctgtgtaacaatgtatcggtttattctctttaatggtgtgggaacattagtagaagatggaacattttactgcctttttccccactggatgtccactggatcacgtcgcaaaatattttttttttcatgattcatgcataattcctgctttccaaagggcttcctttatgtttactgcattacagtccaggagatagacggtccattgtcatgttgagcaaagatagaagaaaatcgacaacaggtgaggtgactcgtttttacatatgtagggctttactgcttgacactt

SEQ ID NO: 23030 - DNA, 893 bp, Zea Mays
tttctccatgcccctacccagccattcccctaaaaatctccagccgtctgtcttgctgctcgttcctgcagctcagacgtcgcctcccttctaccccttgctcctcagccaggcttgttagccgagcccctccaactagcgtgctagacctttgacgccgtttccccgtcgtccaagctccaccatgcccacacgtccgtcctgctcctccatgcacacgcccatgcatccttatctccctggaaacttcactcgtgtacggctccctggtgataatattcagcgatgcttcgccagggcaccgttcccctgcgcgctcgctggacgccgtcgcacatgctccctgctcggcctccccggcgtgctgctccctcgccttggtgcccctgcgagctccttctctctggcccggtttccagctcgggcctcgctagatgccgatgccgcttttctgacctcgtctcgatactcaatcgctgcagcacgccatgccgtgtgtgctgcactgtcatcattcgctatcctcatttttgctaatttttctcgtcgtttctcgtctacaaccttgtcagctcctgcgtgtcgtgcgcgtcttgtgttcgggtcgagccccaggattttgaggaaaaggaagctccagtgcattggccggtgaaatgaataaaatggattttgaagaaaaggaagctccaatgcatcagccggtgaaatgaataaaatggtggtaattatggtccttgtgaaatctgagatcaacttagtcgcgggtctcgctgccgcagaacgttgtcgcagaccgcttcaccgtcgaccctttgaactgcgtcatccccggttaatctcgcgcgcgtaccgacagcttcgaaggagataagtttacctagtgagagttg

SEQ ID NO: 23031 - DNA, 2699 bp, Zea Mays
cgcttcgcacgtccccgccgtcgcgctcgcctccctcctctttgttgcctccgcgtcgacctccaccccgctctccgacgcgcttaccgtcgtctcggatttctggtgcactctcttctctacgacgcgagcaagggcggcgcttgccatggcatcgacgggaaccaggcatcactctccctatctctcgggaggggagctgtttgagcggatgcccaccaggaacaatgtttcctagatcacgatgtttgggccacttttggaagaggtcagggatgacatgttttcaagcttggaggacatcaccaacgcaccatatgcagatctgctctctattaattcaatgaggaaaggaaaggggtcatagaaattagtcttggcagatggaggggaacgtctcaatgactgaggcacattttttcttgttagttagctcatggatttttatggtccaagaggagttgctgctatatgaatatgacaacacccattaatcaacataactatatgaatacaatctgaaaggaaggtcggtttggtcagaaacacatggaggtactgatggaggctatgaaacatataagagacatgccagtgaggagcaggagtagtttagtcggttcttgctttatgaagtggatgcaattagaaagacgtacgagcaggccaacatctcgcggtggctcgccctgggcaaccggacctgcccgaccacgatgcaggagctctgggacgacgccctcacccccaacgccactctctgacagctcatcgtcacctggttctcccgcctggttctgcattttgttttcttatctgtcaatcatgtttttccatattactgcaggcgggtctgattaattatttaaatgtagtttatcttagatactgtttgaacgtatgggatgttggaggacagaagacaatcatgtcttactggagaaaattctttgagcagactaatgggttagtttggtttgctgatagttcacacataaggaggcttgatgattgccgtgctgaactccacaatctcttgaaagaagagagactagttggagcttcattgttgatttttgcaaataagcaagacatgcaaggagctctaaaaccaactggaatcgcgaagagtcactctccgacagctcatcgccgcttggttctcccgccggtacacaaggtttaagaagcgctccgcggacttccacggccgcgctgccgatctcgtccacagcctccggggcacggcgatgcccaggagacaggccctcgaggaagagcaatgtagagaagagaaaggtatctcgactgttccaaagcacaagtatgcatccaaagcctgttccccaaaagacttaaacaatatgctgcatgaaaatctttactttattcacaacacacctgagatggactgggcttgggcagctaaccggttaattgagaaggttagccaactttgcgattctgctattttagttcttgtccatattggtccaagggatttatcttgatgctaaactaaattctggaataggatgaggcataaactccagacgatgctcctttaaattatttgccgcagaagaggctaattttgacaagccagttgatccagcaacttctccctgctataccagcgaccattttgagaggacaagctgtgtctacttacggaagtgcgacatacactctatcaatgttgacactaagggatgcatgcagcatggtagcatcattatcatcatcatataactcttgctcacctgtggaggatgaaaataacccatctgaacaaacaagtgctaagaaaatggaagacagagtatcaaaggttgtggaagtcttcgctggaagaatccagaagatggaaaatgactttataagtttgaacaagagggcctcgactaatcggacgactggacgattagtcgacctaatcgggtcggatgccctggtcgttccactaaaaccgactagaccgactaatcgcgattaatcgcgattagtcggacgacttgaaatcattgatcagtgattccctcacggttgtgtccttcacaaaggaaggatgtgaagccacactattatcaagcaacaaagccaaagttgtgtgacacaattataacaaaggaatcatcacccattagcacactaaaattggcgcatacagataacgcacctgcaaagtgggatcatttgaacatagttcagcaaagggccgacgcacttgagtcactcctcaagctctacgcaaagcttctggaggagaggctcgatgagctcgccgacgtttttcgaccatttggtgagagagctgtgtcatccggagagatgagcatacaatgatgtctgaccataagcctgatgactccaccgaagttttgagagtccccaacaatgcttttgtagcagcgattcgtttcaacatttttttgtttttcaaataccatttcgagagtgtaaataacttcaacggaattcaaaattgatgtacttaggtaggcctgagccctgtttatttttgatgtatatggtttgcatgtcaccaactgttgtgagcgatgattgattatttatcgtcttgttttatctgtctgtactcctttaatgcagcaccttcgtttgtcatgtgtcgtctcccctgtaagatgttgattaatattcattatatcattgtttattttttagcaatgaaaaag

SEQ ID NO: 23032 - DNA, 278 bp, Zea Mays
cttaagtcaagtggctgctattgttcacaatgacttttaccatttgtcccaagaaattctgggccttgcatttcagtaccgtgcagattttcctagtgatctacagaaacaggttgtttttgtggatttagccccaatcttctcccagatggcggatgctatattgagaagacaaatacaactcactgttgatactataagctatagatggtgctgaaggttttcagaacacacaccaacctcagcattatgaatccgcaaaatttagtattgagcag

SEQ ID NO: 23033 - DNA, 5939 bp, Zea Mays
gttaaaacttgtctcgtggtatcacttattcagcgccgcaaatgtcaagttagtgatgcacagaaagtccagtctttcatagaatcatatgagctgggaacaagaatacttaaagacctcccggaattaacatgttctatgtttgatgaaaagctcatgcctgagcacctatttcgtgtttgtcttgaataccaacgatcctgtgcaaaaacacatcaagattgtagtggttataatgcttacaaggatccaaatcctcctgtcttgtttaaaatggttgagtcactaactacacttcaggagagagttaatagctatctggatgaatggcctgatcatcctggtctcttgaaaatactggacctaatcgcttcccttttagcgatgcccctaagcacgccaatttcgaaggtcttgcttggattgcaattgctggctgggaaagctcaaacattgcaggaaaatgactccaagttctttgtaaaagatcatcttgcatcgatatttttgcttgtgtattcatggcaaaggctcgagttagattgttggcctatactgcttgaggaggtccagacaaagtatgagttgaatgctgcaaagctgtggtttccattgcgagccttacttactcaaacttctggtattccagtggatgatgatttgtctattatcagaagtgttgaggaatttgttcaaacatcaagtcttggagaatacaagagacgattgcatatcctctttgccttccatggtgagatttctgctggtgctagcttgggtagttattcaagtaatgcggtgaagaaaatccagaatattctgtacagtgtgtttggttactatatgcagtttttgtcactcgttcatgggaaaattgaagaaggtaaaaaaaacattgagaaggagttgaaagatcacgtcaagctttacagctgggagcaagcaccatatagcagcgcttctattgaaaattttaaaaggactaggcaaaagatttttaagcttctgcaacggttcaatgatattttgaaaagtcctgtcatctttctactgaatgaagaagccacatcaaggaagattccatgctggcttgatcctcagaggcctgaatcacaccttcctgttgactctgaaaaatttaacaaaaggtttctgtggtaccacaagtgggcaagtgagacgtctttatcattacaaacattgcagcaatcaaatggtagtactgttggagttcctactgccaaagaatatgcagatatggtatatgatgtgaagcactggcagaatgaaattgagctcaatgacagattgcagttcttctggatctcacttgagagaatatgtggggcagctaattttggtagtacagtgaagcatgggaaaaagaatcagaagaaaacagctctatccaatctgttcaagactcttgaggaatgtggactatctaagcacaggccaatgagtcatgagtggggagatgagctggcagcaccaagtccattgttcttggagcagtcatatgattctgcacatttattacagcaaataaactctcagaaaatgctggaagatgttagcatcaatcattccacactattgaacacagataactggaagcatgcaaatcagcaatacttcaaatgtttagcaatgatgcaacaacttcgacaggtttctttgaagtttaacaaagatctaggtttggaagaggttaacaaggctatgtcatttatgagtcatctgttgactgtgttgtctgaacaacgacatcttgcttataatctatttgatcaacggaaccaattcaagcatgctattttcttattaggttctggaggaaagagtaaatctctatcatcaagccaaaatgtgctgctgagttccatgtggcagcaaaagaaattgtttgatgctgtaatcactttgataacagactccaacttattgctcagaagcttcaaggattgccattataactcttgtaacaactttatagaagttgaagggatctcatctctccttggaaagttcatcttgaatttttctgaatccaaggagttgttagatgaatgcttgcttggatccactaatatatttgctggtgcatataagagcatgcctcattctgcaacagagatggaacaactttttactgataattgccagcatatagattcattgttggatggatacttgcctggatccaataatatatttccagatgcatataagagtattcctcttgctacaacagagatggagcaactttttgctgataattgccagcttatagattcattgagagaagatatgaaggttctatgccacagggatctttcagtgggatctgttaagaaagttcttatctctcgtttggaagaattgttggagaagggcaagatggcaatggagaaccgaagacatgttgaagaaaatcataagctatgcttaaagcttgaagcttcgtatatagaaattttgaaggaaactttcatgttagttgttggtgctgtcagaaagctcactgatcatgaagtatgcagtaatggaactgaaaaatcgccagttggtaatgttgcatcatggaaagatactttgcagacatgcattatgaatcttaaattggatgatatttgtgttgctggtgaaaagattcgtattctagtgaggttgctggttgactataaacctgatatacgtactagtatagagctgcacctaatgcatcttcatgcttggctgagtgtgatcctatcatcagcagaagggatactttccgaacttttagaagcacacataacaacttctgaaatgactcttgcacttggggacctttttattcatttatttacggatgggtttggttccactgaagatacagccgaagatgcagatgaactacagcaagatgctgttggaagtggaactggaatgggtgagggggatggtcaaaagagtgtaagctctgatatagatgatgaatcacaacttggtgacagtaaggacttgacatgtaaggcagatcccgctcctaagaacgatgataaagctgttgaaatgcaagacggttttaatgcacaattatctgatgtttctgaggatcttgaaggcaaagactcgggtggcgaagatgaggataccttggataatcagatgggtgatactggtgatgcaagtgaagtggttggcaagaaatcatgggataaggatgaagatgatgatcctaagacatctattgagaaatatgagtcaggctcatcagccaagggaacacaacaggatgatagggaaatgagagctaaggatgatggttctattgaggaggaagatccgatggaaatggattctgaggaaggaaagaataataatcttgaacatgatcctagtacccatgatgaaaccgaactgaatactgatgaagtcatggacaaagctgatgcatatgatgaccggactggacctgaactccctgaaccagagaatgattccattgatgttgacatggtggaacaagaacaaacggatgaaataaatgctgacaatgaagatataggtacagaagaagctgaacaagcagatcagaggttagatgcttcagatgatatggaggaaggagatatggcacaacatagcgatggtgtggtagataatgaaggggagcatgttgaagatgcaaatacagacgcaggtgagatggattcacaccaattggacaaggcggattcacttatgcctctgtcacaaggcctacagcctgacaatatgcaaataaattctaatggagaatctgaagcgaacttggccaacagcagtgatatgcatggcgctgttgctccttcagtaaatttttcaggaaatgaagtgcccaatatggaaatatctatgcccaatactggtaacgattcaatactatcgtctaactccaagccagatatgcaaaatgatgctcagcagcacatcaagcagacaaatcctttcagaagcatcggagatgcattggaggactggaaagaacgggccagagtctcagctgatactcaggatcatcaaccagaaactggaaaagatagtagtgagaacactactgaatttcgttatgtgcctgagggtgaggagagcacctctcaggcattgggtgctgcaacagctgaccagatcaattatgacaatcagattaatcaatctttcttggaagatgaaagctgtatcaggaatttggaacatagtgatgagagaacacctgataaccctgaggtgccttaccttcaaacttcacaagcacttcccaacaagtctgaaaatgccaatgaattggatggaagagaaattcaaactgatgcatccgttcaaaatttagttgaaagaacagatcacactttccaagatctagtttctttcaaacaacccccggcagatgataaaatagctcttattgacctaactactgacagggaattgccttctcagatggatctcgacatcactgatgcagagacaaaaagatctaatgcggtctggaaaaatcttgagctcgcaaccatgaaattgtcccaagaactggcagagcaattgcgcctggttatggaaccaactcttgctagtaagcttcaaggggattatagaactggaaagagaataaacatgaagaaggttattccatatattgcgagtcatttccgcagggacaagatatggttgcgccgaactaagcctaataaacggaattaccaagtggttattgctgttgatgactctagaagtatgtctgagggcaaatgtggaaaatttgctatcgaggcattagttactgtgtgccgtgctatgtcacagcttgaggttggacaatttgcagttgcaagttttgggaagaaggggaacgttagtgtgctacacgattttgatcagatctttaatagtgaagctggagttaatgtgatctctagcttgtcgtttgagcaagataacaaaattgaggatgaaccggtgtctgatctcttgacacatctgaatgttatgcttgatactgccgttgcacgggcacgcaccccatcagggcaaaatcctctccagcaactgatactgataatatctgatggaaaattccatgaaaaggaaaacttgaggcgccatgttagagacgttctaaatcgaaagaggatggtcgcgtatgtgctcctggatagccccgaggattctattattaatctaaaggaagcatgcttcagagtaggggagaaggtagagctgaaaaaatacatggattcctttccgttcccgtattatgttatgctacagaacattgaagctcttcctcgcacattggccgacctgcttagacagtggtttgagctcatgcagagcgccaacgagtgacccttgggagttgggagtagtgccacgcatttagctgtacagcaaactacattctagcttccatttttgcttgggcctggacagttctgtggtggcaagcttgattgtgcacaaatgccttcacggttcaaatcgctttcctgaaatatgatctctggtcgcaggcttgattgtctaaaagcatcatcacaattcaaattgtttttgggaaatttgaatagaatttccgctttcctgaaatatggtctctgctcgcaggctttattgtgtaaaaacatcatcacaatttaaattgtttctggcaaatttgaatagaatttccgtgctcaagagttatagtttgttttttttttcaatggagaattgttgctcacgtgctacatgcgacctgagtgtgattgatccttcaatcttgccctgctgttcatcttgtgttgtttgtcatgtttggctttgttgatgtacatgtttcttccactgcatgtgctacgcgttgacgatgtacgcaactgtcgctgccaacgcgaccactttatatatgtgacagtgacacatgccaggggcag

SEQ ID NO: 23034 - DNA, 3610 bp, Zea Mays
ctccgcccgagtcccgtgatcccgtcccgtctcatctcctcctcacatcacagccgaggaagcttccaaggacaaaaacaaaaaatgcggcccaccacgtcctgccatcgcttccccctgctgctcgtcttgctcctcttcctcctcgccggcgagggccgctcccagcccgccgccggcggcggccccagtgaccgcgacacgctgctcgccgtcaagaaggcctggggcagccccccgcagctcaagtcctgggaccccgccgccgcccccgaccactgcaactggaccggcgtcacgtgcgccaccggcggcgttggggtcgtcaccgagcttatcctgtccaggcagaaactcacgggctccgtcccggcaccggtgtgcgcgctcgcgagcctcacccacctcgacctctcctacaacaacctcacgggcgccttccccggcgccgcgctgtacgcgtgcgcgaggctcaccttcctcgacctctccaccaaccagttctcggggccactcccgcgcgacatcgaccgcctcctctcgcggtcgatggagcacctcaacctctccaccaacggcttctccggagaggtgccgcccgcggtggcggggctcccggcgctcagttccctgcggctcgacaccaacaacttcactggcgcgtaccctgcggccgagataagcaaccgcaccggcctccagacgctcacgctggccaacaacgcgttcgcgccggcgccggtgcccaccgagttctccaagctcaccaacctgacatttctctggatggatggcatgaacctcaccggagagatcccagaggccttctctagcctcgaacagctcactctatttagcatggcttccaacaacctcaccggctcgatcccggcatgggtgtggcagcatcagaagctccagtacatctacctgttccacaatgtcctctctggcgagctgacgcgcagcgtgacggccttgaacttggttcatatcgatttgtcgtcgaatcagctaaccggagagataccgcaagacttcggcaatctcaagaacctcacaacgctgtttctatacaataaccagctcacgggcaccatcccggtgagcatcgggcttctaccacagctgagagacatccggttgttccagaacgagctgtccggagagctcccgccggagctgggcaagcactcgccgctgggcaacctcgaggtgtgccttaacaacctctccggcccgctgcgagggtcgctctgcgctaacggcaagctcttcgacatcgtcgccttcaacaacagcttctcgggcgagctccccgcggcgctcggggactgcgtcactttaaacaacttgatgctctacaacaacaacttctccggcgacttcccggagaaggtatggtcgttcccaaatctgaccttggtgatgatccagaacaacagcttcactggcacgctgccggcccagatatcccccaaactgtcacggattgagataggcaacaacatgttctccggctccttcccggcctcggcagcagggctcaaggtgctccatgcggagaacaaccggctgggcggcgagttgccgtctgacatgagcaagctcgccaaccttactgatctgtcagtgcccggcaaccggatccctggctccatcccaacatcgatcaagctgctgcagaaactgaattcgctcgacatgagaggcaaccggctgaccggcgcgataccgcaggggagcatcgggcttcttccagcactgacgatgcttgacctgtccgacaatgagctctccggcaccatcccatcagacctaaccaacgcgttcaacttgcttaacttgtcatcaaaccagctcaccggcgaggtgccggcgcagctgcagagtgcggcctacgaccggagcttccttggcaaccggctctgcgccagggcgggctcaggcacgaacctcccaacgtgcccaggcggaggccggggcagccacgacgagctttccaagggcctgatgatcctctttgtgttgctcgctgtcattgtcttcggcggcagcatcggcattgcctggctgctcttccggcaccggaaggagagccaggaggcgacggactggaagatgacggcctttacccagctcagcttctccgagtcggacgtgctcggcaacatccgcgaggagaacgtgatcggcagcggcggctccggaaaggtgtaccggatccatctcggcagcggtaacggcgccagccgcgacgaggagggcggcggcgggaggatggtcgccgtgaagaggatatggaactcgaggaagggcgacgagaagctggacagggagttcgagtcggaggtgaaggtgctgggcaacatccggcacaacaacatcgtgaagctgctgtgctgcatctccagccaggaagccaagctgctggtgtacgagtacatggagaacggcagcctggaccggtggctgcaccgccgagaccgggagggggcgccggcgccgctggactggccgaccaggctcgccatcgccgtcgacgcggccaaggggctcagctacatgcaccacgactgcgcgccccccatcgtgcaccgcgacgtcaagtccagcaacatcctgctggacccggacttccaggccaagatcgccgacttcgggctcgcccggatcctcgccaggcccggcgagccccagtccgtgtcagccatcggcgggacattcggagtatgggtacaggccaaaggtgaacgagaaggtggacgtctacagcttcggcgtcgtcctgctggagctcacaaccggcatggtcgcgaacgacagcggcgcggacctctgcctggcggagtgggcgtggcggcggtaccagaaaggcgcgccgttcgacgacgtcgtcgacgaggccatccgggagccggccgacgtgcaagacatcctgtcggtgttcaccctcggcgtcatctgcacgggagagagcccgctggcgaggccgtcgatgaaagaggtcctgcaccagctcgtccggtgcgaacagatcgccgctgaggccgaggcgtgccagctggtgagctacggcggcggaggcgcaccggtcgtcgagtcatggaagagaggcagccggcgacgcagcacgtctggctccagccggtggagctacgacgacgaggacagcggcgacttcgttgcgcacgtggtgtagttgtcggttcggacagtatatagctagctactgggcgtctggctgctgcaagcagctcatccatggaggaattttgcagaggtgccgcgccggcctctaccgagcggcggcgagaaggcccatgaagcccgaccccgcatgggcgccgcgcaacgcaagaacaaaccacgaagtgctttggttcgcgtcctgccactactgcgtgtaattacgccgtgtatgatgtatccagtgtttgaccggcgccggcggtaaaccagtttaattgacgaactagctgcctcgctgtagatggtgtaccggtgcagcttgcagatacaggatgttgagtcgcttttcggttttctgaaactgaaagactgaaacttttggccactctttggggattcagaaaacttgagaccacac

SEQ ID NO: 23035 - DNA, 6005 bp, Zea Mays
cccctcccctccgccctccgcacgccgcctccgaaccccatcgcccatcctcactacggcgacggctattgccacagccgccgccatcttgacgcgtacgagattctgaggccttgatctgaaacccgcctcgatcccacagccattcacccaccgttccaccggtcacggtagcggcgatccctactctcaggccgtagctacgacctagccggcgccatgcgacacggaggcggaggcaggggaggtggaggtaaaagaggtcgaggaagaggagcgggctccggacgcagagacgcgcgccccggcaacgattcgtaccgcggcgaccgtggtaggcgccacgactaccgctcccgccgcaccgcttccccggaccaccgcccacgccgcccgaggggcgaggacaacgaccgcgatccgccccgcggcggtcgcatcggctacggcgaccgtagccctccccgcggcggccgcaccggctacggcgaccgtagccctcccggcggcggccgcaccggctacggcgaccgtagccctcccggcggcggccgcaccggcccgccccggcgcgagcgcgctggctacggccaccttgacgcgtcgccccgccgcgggcatgcgccgtacaaggacgccttcggctcgccgggcggcgaccgccacgcttctccccgcgggcgcagggaatacggagatagccgcgtctcgccccccgggggtagggactacgaaagggcgccctgccgcgaggagcgcgaccggtacggccgccctggccgcggtgccgatctcgggcacaactccccgccagcccacatgctcccagaccacccgtccgacctgggacgttcagcatccctacgcgctgacgaccatagccttctcaaggacgactaccctaggggaggccctcatcggagcatcagaaaggagaacgagttgtttgcgaacggtgacctgactctcagaataagtgcaactgaaatgggaaggactagcgccatgtactcccaagaccgcaggctctcacctccaccacctatttatccctatgtgccacgtgagacgggattcttgacaggcggatctgccatgaaggccagtgatggttatggtgctggaactggaagcgcccagcggctgcatgatgatgacgattttaagtaccacaaggatgccccacacattgagaggagtagagatattgataggcattattctggcagtagggacttagttgttgagaaaggtggagttgctgaaaggtatgcttctgctgatgatctgccttctgggaggattcgagaaacagagagtctttactctagtagaggtatgctggagtctgacctggtgccgtgtaggcagttgaaggttcttggtgatccttcctcagctttgcctgccaaggaccaccatccatacaggatgtacactgaacctggctacgagacaagcaacagatacatcatggagggccttggcaggtcatctcatgactcactggggcatgggagtgaccatcctcataggttttcaggaggttcattagagcatgtaagcggtcatggtgatgaaacattattggatattgcaaggcaggcacactctaagcatacaccaagagctgcatcattggagtacgatgtacatgatacgcatagtgaaccagagaacttacgtgggaatgtctcaatgacttcaaggcacacatctgtctcaacatctttgagaggtcttagggatgaaaggattaacgacaatctgaggttatcccgtaggattgaagaagatgagggtagcattgaatccatgcatcaggacacagagcacttaattcgtcattgttacaacggtgacgcttctgtacagtaccaaacagcaaggggtggtgatgatcactattcccactcccctggaactgaacctattggaattgcaaggcggctagctcatcaacatgagtttgattcctttggttactcaagtgatcaagaagcttcccttatggtttctaggaaaagatgcaggagtcctgaatatcatgatcatgagattgatatgtatcaagctgatcatgggtttgcaggacatgagcactatgatgatgatgttgttgatgaatatgatatacccccaccaagaatgtcacggtttgatgatgaatatgatgaaatacatgatgtgctagctaatcgtgatgttttctcaaggatttctttgccacatgaaaccaatcaggaatggactgatatggatcaggggaaccatcctcattctaacatcttgggttacgggtgttcaaaacacgtacctatgcatcagaggttgtctaaacccaattaccactcacaatttggggaaactcccatgcatggaagaggaagaggaagaggaggattgactaaaagtgccaaaaagggactgagaactgctcctcatcagttgcatgatgggtacccatcaggtagaaatgaatttgttagaccaaataaattttcaaagtcgtcaaaagatgaacttaatggttctgaagtgaagcatgaagatgctccagagtatgaggatgttcctctgcagaaagatccaccagaaggttcagaggagttcagtaaacaggttgatgaagcctttcttaagtacacaaagatattaaatgagagtccagctatgcagaagaaataccgggaggcgccaaaaggatctttgccatgctgtgtctgtggcaggtttgtcttcctttgcctgcgaactaaacagttcctcctctaacttcgttagcagttgcctacttgctggtatggttactggaatggagaaatccaaggaaaagttatgtcttctgtagtcacattaaaatgcacctcatactgtagataaactttataatttaatcatacagtttaagctaacatactgagttattgacatctttaggaaactggcataatattatgtagctttaatgcccattctgcccctcgttaaatcgaacctacatgttttatgtggggtgcgttactatctatatgtgcgattagtaggatgaaatggactcatgggcggacgtagtcacaaagttcctgggacgattaggtcgtggaacaggggatgaggaacatgatatgctccttaaaaaaggtttttcacttcggggatgatattgttcctggaacggaaacggcgttcccggtgacgaacatgtgatggtgctcatgggattgagtatgcataatgaaagattttgaggaaccatcatgtggatgtgctggactatggcaacattctcggtttaatgtccaatcacatgtctaaagcatgctggtgatttttataagaattcagacataaacattggcgcccaaaggtttgagcattggtctttgttgtgaactgcattctatcctgtggcgagatcagatggtgatgcagtttgaatggagttctgcattgcagtctttcaggtatatttgtacaatatggctgaaaggaagtaaaagtaacagcattgttctgttgatgaaaaaatagcttcagaattcagaatgttgtgccatgagttagttgggttgtcggatcttcttgttgataatgtttgacaccaaagacgaccgtgtcctgtgaagtcagctagctacattggcaaactgctctttctccatggtaacatggagtgaacactcggcaggccacatgtgcaaatttggagaccattaacatgtgcaaatttggagaccattgtgcaagtttggcaatttctttgtaggaataacattatggcaattttatcgagccctcaagcatgtttacttctttaggtcgtacctagcctaccagtaccagcgtattagaattttgctagcacagtttgaaaaccatgcgtgtgcaggtttgccaaatcaagattgcaaaggctgctgcttacatatacggtctggagaggtagagcagcctgagctatgcatgggctgtatggtggcatgctgctacttatttcttgcaagaatctgtaggttgaactattcgtctgaactaaccaagggttttgtttaaactataagtagggttttagggttctatttttatatcttacatatattgtttccctggttattggaacatgaattctcttgcatttgaaatccatgaaatctaattagttttactatggtattctatactaatacagtacagatcagctccatgtagactgctgtccttttcatgtcctatgttttaaatagtgtttgtagtggcatatcaactagtgccaagacaccacaccacgtatacatgtgtatcacttggttatagttatctatttataccaattttctatgagtgattatcgtaacctttgttttatcaaataaaaatgtgtttgctttattttttcaacaataactttagattactaagtgaagtatgctgttaatttgatttattttgcttgtgcaaactagatggcactgcattttgattaatttacatcaaatataagctcaggcacaggtccaaatgtttttttattggagcaggagcagtgtcccattatttcttctagttagtgcggcagagacttggggatcaatttttaacaaagttttatcttctgatgatttagtttgctatttgctctttgtgttccacttgatttttgtttgtgaaaattggtgactacacccttgtgaatcgttttaaatactgggatgtgaatgaccatgatcatggtgccctcaggaggattgttgaaattgtagcgaggaaatttctggaccttgatgcattgctatcacatgcttatgatacatgcaaggccggtttgaagacaaaacacttggggtttcacaaagcactgtgtgttctgatggggtggaattggcatgttgctccagacacatctaaatcacatcactccattccatctgaggaagtaaatgccatgaggggagacctcatgctgtggcctccagttgttgtgatacataacagctcgactggtcatgaggcaaaggatactgatgcaaagattgtgtccatagaagaaatcgaaggtgtattggcagatattggggtagcgcatgagaaggctagggttagccatggaagatcagccaatcagagcgtgttcctggtgaagttccagccaacaatatctgggttccaagaagccatgagagtgcatacccatttctccaccagaaaccatggcaaggaagagttccagctgatgaaaggcagcaaaggtaagaaggctgcctccactgatagcctggaagagctgctgtatgcgcatattggggtcgtggaagacctggggctgctggatgagggaacaaagaagagatgcaaggtcatgaggaagaaggaaattgaggcaaatgcagaggcaacactgaatttagaagtttattaggtctagtactaggatccgaaccatttgaagtggtcctcttttgcttcatcttgcagctgcttgcttgtccttgcggctgtaacgtcaaaagaagaaaagaagtgtaaattctgcttttgccattaaagagtgacgaaactcagttggcttctgtctgctggggaaggcctgcctcggtttgcatggcatggcaaggacataattttgtggctagatggggacaccttaacggcaaaagcagaattacctggtcgaagaaccgagtttaatctttatattatggaatcccttctttttttaagtcttttgctgcgtgaagttatgcataattcgttgaagtgtctataggtttgatggtggactagcatgtatgtatagtagcagctgcagtgagtgacttttctcaggtgttgcatgcatgagaaacgcaaactctattcggcgatggtttgcgctccagcttctcagttgctttgctctccatctccgacaggctgagtctgctcatcagcttgagtctgcttcaaatgaggacttaatataagcgagcaaacatcgctagactagtaaataattctggacaatt

SEQ ID NO: 23036 - DNA, 1794 bp, Zea Mays
caaacaggctgcagacagcaggggtgcccaaaagcagggaaggaagagcggaaaagtccaccagtccaccaccaccttcctcggatccacaacccggacgcccgagtgcagagtgctccacccgggtcctttcttcctccttccccagtcccagtcccagtatcagtaccagtccaagccccactccccaccccgaacctcgcaagtattttagtcttactccattcgagccctaccactaccagtggcaggcgagcgagaggcggtggaggaggagcggacggaaccgtcgcctgctgcgtctgcctgcgagatctaggcgagcgcggccatgggtgctcgctgctccaagctctccgtctgctggtggcctccccacttcaaatcgccaatgctcggggagacaaatccattgagttgggcaatgaggatgagggctgcgctttatgtggcacaagcgttggactactgcagtagcaaagggagggcactctatcatgacctgcatgcatacagggttgtctttgatgtggatggtaacccaagattatcatgttttggtctgatgaagaacagccgagatggaaagagctacagtactaatttggccttcacgcctcctgaatatcttaagacaggcagagtaagtcctgagagtgtggtttacagttttggcactgtcttgcttgatctcctgagtggaaagcacattccaccaagtcatgcactcgaccttataagaggaaagaactttctagtgctgatggattcttgcttagaaggtcatgtatccaactcggacggaacagacttgatgcgattagcatcccgttgcctgcaatatgaagcacgtgaccgtccaaatctgaaaactgtggtatctggtctcacaagtctccagaaagatgcttatactccttcgcacactttgcttgggattcaacatgataagaacaactcaggtcaagtttccttatctgctattgggaaagcttttgccagagcagacctgaatgaagtgcatgaaatattgctgcatgatggatataatgaggacgacgaggctaatgctgagctatctctccagtcatggaatggtgatatatctgagagctttgttgttaagaggcgtgcagacaatgcctttaggtctaaggaatacacgactgcaatcgagtgttactcaaggttcctcgactcaggtgcagtggtggctccaaccatgctgggacggagatgcttcgcacatgtggtggccggcaacccacaggaaggcctcgaggatgcaaagagagccgagattattgcatcggactggccgatgggacactacctgcaggccctggcacttcataagctgggtagggaggctgaaagccaagaagcactgaagaatggcactgccttggaagctgcaaggaatagtagagctagaactgtatagccctgaatttgtgataccatgcccttcctgcttgtacctagatcgcctgcatttcgggtgcctacctccaatccaatgctttgccaccagtagggttgtttttggtattccctaacttgtatcgttatttcccgtggttttacaagtcgaagaactcctaggtcagctgttattacacctccaatatatccatgaatacaggaatgggcaactagtctgctatagcattctgttgatgcgagtttgtaaagtgacaggatttcgatttatttcaacaaacccatgtatatacaaacttttgaactctgcaacttaagatatttgaggccaggcaaccttcaactgttgtt

SEQ ID NO: 23037 - DNA, 2675 bp, Zea Mays
gtagattcgccgggcggccggtggcgaccggcacatcaacatcagagagagggtggaacagacagagaaagagggactgtggtgtgcacatggaggagctctccaacaaggctctggcaccaagcttgctttcgctgtgcctggatgcggtagctgatcgtctcatcagcgacaacgccgccgcaggcggcggcgtgggccgaacgggttcgtcaggagggtgcagcggcggcggcggtctcgccggattctcggaagatgatggaggggaggcagacgaggaccgcctgcatccacaggagttggcggaggggcttccctgggagcttctccatcggctggcgtcccggctcccgcctgtcgtacttgagtcactccatcacgctgcacatgcccgatactgttctgctgaaactacttctggacttggagtgcaagatggagaaagacgtggggtgaaacgttcaaggtgtgaagatttcaacagcacttggcagttgttgttcaaacttcgctggcccctgggtggtaatactggacataataatttggtcactgtggattggcagcaaaagtattgggaaaagcatttacaagagtgtttaaatgaagctgcagaacatgcttttcttccttttttttgtgggagtattggtgagctgagtatatcagctaaaatcatgaattccatctaccagagcatgggcacatctcaacaacattcaagattagcatatcaatgcagcaaatttggttgctatgtgaggagcttgagactgcaaggtgttctttgcactgcagaaacttatgtcttgttgcaacaatgcaagctggaaagattaatgttcataagaattatatcagacctagaggttaatggtgcatgtttgcttctgagctggcatgcagagacactgctttctcttgaattcatccattgtcagctttatcctaccgtcatggataaaatttgcatgagtgtgtacctgaagggatctcaaagccatggaatccaacaatttagtattaagtcgtcacaaatctgtgaaaccaagcctctgaccatctcttctggtctgttcaaaattttgtcatctggcaagtcgttgcacctgctgtcacttcgtgatattaagatgcagtcaccatttgctcggatgattattcacactcttctcgagtcgtcatgtgatttacacacacttgagatatcagaaaacaatattgctggctggctttcggaattgaacaaatgttctacaaacttattagcgctgaaatcagatatttttatgaactccctgtctgttcttaacctgagggaaaataatttgcaaaaggatgatgttgtagatcttcacaaaattctaataaaaatgcctaacttaagagatttagatataagtggcaatccagtcatggatgaaggtatcagatcattgatccctttcatttcatggtctattcaaaaggaaaatccacttctgagattaacagttgagaactgtgagttgtccagtattggtgtgattatacttctggagtgcctcacaaatgcgaagcaactccttgatgtgctatctattgcagacaatcatctagggagttctgtggcagctgcattggccagattcttgggttcacatgtacgggctttaaatgctacagatatcggcttgggaacagtaggcttccaaatacttgaggaaacattgccaacagaagtagctctttcccacatcaacatcagtaagaatcgtggtgggatcagagcagcatattttgtttccagattaatatgtcgagcaccagaccttgtctcagtcaatgcagcagggaaccttttaccacctgaatcattggaagtcatctgtaactccttgaagcaagggacttgtaatttggagcgagtggacctgactggcaacatgcatttatcaagcaatatttttcctgcattccttgaattcaagaagcatggaaagccaattctggtagtaccaccaaacttgagcacttctgctccatatgatgatgacccatgactactatgtaccgtataagccctagtgctgctcaagtcacttcagttggaactaaataaatagtgatagtatttttttggatcattcccaagaatcctaaccactagatcaaaacacaacacaaattgtacatctgtttagattcgacacggctttcgtcggtgaagctttgcgctagggcagcgacggtcgggaaagcgagcttgatgtcgacggtggactttctgttgctgacagacttccctctagatcggttaaggtttgaggtggagatcgaaaatgattgtgaatcttgtacctttaggtgtcggcctccacctctttatttatagggctacgcaacagatgctcaacaaccttgatgctctcgatcagggcgtgaggtcaggggtctagttttcggttgggtcaagttgggtcaactagtggagatcaattctaacattttcccctttaatctcattttataccttcagctttatacctttaatttttttgatattccattatagataagtgcatagagcatgtttcatcgtcacgattaatcaccgatagacttagcaactacagtacatatctctatcctgaaatagattctttaactttgggccttttattgttcggaaa

SEQ ID NO: 23038 - DNA, 2239 bp, Zea Mays
actactactaaaactggtgctgctgaccaactctttcttttactgaaaaatgaatgcaccgcgctgaaaaaggacagaacaaagaaagatcttcaaatcaaagctaaagaagcggagattcaaaatctgaaaaaagctaatgtcagctccatgaaagatgtttgcagtgcagggatgaacattgatcagtcctttcacgcccctgcaaatgaggctttgcatactggggtttcttctaggcgaacagacaagatgagtggcaaagataaggatgcccattcattgcgagacgatctctatctaaagcaagggcatcaaactgatttacttgaggctttagaactgaggcgtcgcaccatgattgataacggaatgagtacatctggagtagtgtctctggaggaggacacccattttgaaccaagaaacgctacatgcaaggaaattaaggcgataggagtccagacagataacacatctgacaatgaacatcttgactgcaagaaattattggttgagcgtatatctggtaacctacgtgcaatgtggggcatgtcacctaacagtttatcaagcaggaatttgatatcaaagatcaatgtttcttgttcagaagaaattttgtcacttctccagcatacgagattgtcagacaactgtgaaccctcttctcaagcaatctcctccatgaatgaagctatttcccaactgtatgacacgttcattaagatgaatagtgggaagatgtcaatacaaactttccttgaagcattgctaaatctatgtgcttttgatgatgctgctatagtcagtagaactttgagggtattcctcaaagttttacagcacttactgcaacatggagccaagtctagtgaaaggaacaatgtttctgttgaaccatatgttaacgtactcatggagaacaaccacaaagactgttcgaccttgttgagaccagtggatgcagaagattcattgagactgcataatatgtttcttccttttactttctggagttcacttttcactggcatgcttcaaattggggtcaagtactcacaagagacaattcgtactgatgcattatccataatgattctcattgtaaggacaacagatcccatagaggaacgccagaaaaagagaacggattgcttgttaagaagcattctgtgcgtctacttttcttgcttctgaattgcccagtgatgttgaagttgctgtgtagtggaggcaaagacggctccaaacagatgggatcggaagcttgtgaaagtaatagatcacaagaagtcataagctcagttcttgtggatttatctgattgtttgacatgtggggaaacttgttctctggggattgagctttgcaggctcgtcatcattctgctagcttatatagcttccagtggcaaattgggatatgaggtgcttttagttccagtgagtgcccgtggtgccagttttttggagatgataatggaagtccttgcatcgcagatgcaatatgaaacacgagagttactaaaagaaagatgtttggtgatgagagaagctcttatcctgctaaaccggctggcatcacacgcaaactattcgaaaccaaccttggaagtgctgacgagaagcaagttatgcgcgacctggacgatcgatgttgcgaaccggctgccccatacgtggatggcaaatgatctcgcggagctggcccagaaattcaggtcgcgagtgtatgctttcatagaggagaaacccttgacaagcgacggtaccaatctgggcgcttctaataagagatgagatacccaggactggcgcagcctgaggtagcttgggtagtaatatggaaagcatattgctagcggctcgacaagtttagtttcttttttttcccttactgacactagggttttgtttaggagttagactggcttggctggggcgagtcgctagcttttgctggcggtgtacagaggcgaatgcttcctcgccatttttgagggggagggagaatgtagttgtactacggcaagtccttgggaacgtacatcataattgttgtttggacatcatctcatggctttggcattgaccatcgcagcttttttgaattgaaagttttagtttttttcttaccaggatgatctgactgtaagcaattgaggatattggatgggtttgttggttgtgaagtatgggtggatgcctgtttgaatgtactagttaatagatagttg

SEQ ID NO: 23039 - DNA, 4588 bp, Zea Mays
cagagatggtcctggcgatctgcctgctgaaactgtgaaagcttctgaagacaaatcagccgagcgagcgtgcgtgcgtgcgagacaaccaggtccgatccgcccccgccgagccgaggacagcagcgggggctctcggtctcctcctccagatcttgcacccaatccagatctcgcgccctctccgttcctctcctatgtccattccccctcctcggatctaaccactccgtccctctccccgtccccgcgtccggagctgagatccgtggtcatggccggcgctgcaggtgggttcgtcacgcgggcgttcgaggccatgctcaaggagtgcgccgccaaccgcggcaagttcgccgcgctgcagcaatccatccagtcatacctcgatagcatcaagggggctacggcggagggcgcggtcatcacggaggcgctcgcgtcggctgggcgcgtgctcgacggaccgcaggccgagctggtgctgcagccgctccgcctcgccgtcgagaccaagcacgtcaagctcgtcgagcccgcgctcgactgcctccacaaacttattgcttatgaccatttagaaggcgatcctggtttagaaggtggtaaaaactccccaatatttacagacatcttgaacatggtatgtggttgcgttgataacacatcctctgacagtactgttctccaagtcttgaaagtgcttctcaatgctgttgcttcaaataggtttagagttcatggagagccattgcttggggtcattagagtatgctataacattgctcttaatagcaagagccctgtgaaccaggctacctcaaaggctatgttaacccagatgatcagcattgtattcaggagaatggaatctgagcaggtttctgtattgcctgcaagctctgtggttaaagatacaccttcatctatcacaaatgaatctgaaaatggagaaatatctaccgatggccaagatgaggaaaaagttactccgggagatgcattgtctatgaatcggccttctgaagcacctccaacatctgttgaagagcttcagaatcttgctggtggagcagatattaaggtattgcattggttccatctaattacaagagatcttttacaggggctggaagctgttctagacaaggctgttgaacttgaagatgggaagaaagtgtcacgtggaattgacctggacactgtgaacataatacagcgggatgcactattgctctttcgaactctttgcaagatgagcatgaaagaagaaagtgatgaagttgctaccaagacaaggctgctatcacttgaactgctccagggattgctagagggagtcagcaacgcattcacaaaaaatttccacttcattgattcggttaaagcatatctttcatatgctcttctgcgagcatctgtcacttcatctccagttgtttttcagtatgcttgcggtatattttcagttctgttgctccgttttagagagagtctgaagggggaaattggtgtcttctttcctctgatagttttaaggtctttggatagctctgatagctccctcagccagaaggctagtgttcttaggatgttggagaaagtttgcaaagatccccaaatgcttgcagatgtgtttgtgaactatgactgtgatcttgagggaccaaatctttttgaacgcacggttagtgcactctcaagaatagcacaagggtctcaaattgctgatactaactccattgtgtcatcccagacagtttctgtaaaaggctcgtctctccagtgtttggtgagtattctgaagtcattggctgtttgggagcaacttcgaagatattccttaaagcaagggagcattgttgaatctcatgaaggggatgcttcaaggagcgtgacaactgatgagatgaagagccaagaggatgttcggaatcagtttgagagagccaaagctcataagtcgacactggaggctgcaatctcagagtttaatcgtaaaccaactaaagggattgaatatttgttgtcaaataaattgatagaaaataaggcatcatctgtagctcagtttctcaagagcaacccgggcctggataaggttatgattggtgagtacttgggacagcatgaggagttccctcttgctgtgatgcatgcctatgttgactccatgaagttttcaggattgaagtttgatgctgcaattcgtgagttcctgaaaggatttcgccttcccggtgaggcacagaagatagatcgcataatggaaaagtttgctgagcggtactgtgctgataatcctgagcttttcaaaaatgcagatactgcttatgttcttgcttatgctgttataatgttgaatactgatgcacacaatccaatggtgtggcctaagatgtcaaaatcagattttgttcgtatgaacactgcgagtgatgcagaagaatgtgccccaaaggagctcttggaagaaatttatgattccattgtcaaggaagagataaagataaaagatgattctcatgatacttcaaaaaccacaaagagacctgaaacagaagaaacaggccgtcttgtcaatatcctcaatttagcccttccaagactgaagtcagctagcgatacaaaggctgagagtgaaaagatcatcaaacagacacaggcacttttcaggaaccagggacagaagaaaggtgtttttcacgttgcacagcaggtggagcttgttaggccaatgcttgaagctgtaggatggcctttgcttgcaacattttctgtgaccatggaggaaggtgacagtaagcctagggttgtatcatgcatggaagggtttcgtgctggtatccatcttactcgtgttcttgggatggacaccatgcgctatgctttcttgacgtccttagtgaggtttacatttttgcatgctcccaaggagatgcgtagtaaaaatgtcgaggcactgaagactcttcttggtttagctgacactgatatggatgctttacaagatacttggaatgctgttttagaatgtgtatcgagactcgaatatatcacttcaaatccttcaatttctgcaactgtaatgctgggatcaaatcaaatatcaagggattctgtagtccaatcgctgaaagagttggctgggaagcctgctgaacaaatctttgtaaacagtgtaaaactgccaagtgattcaattgttgaattcttcaccgccctttgtggcgtttctgctgaagagctaaaacaaacacctgctcgtgtctttagcttgcagaagcttgtagagataagctattataacatggctcgcatacggctggtgtgggctagaatctggtctgtgttggcccagcattttattgctgctggaagccaccacgaggagaaagttgcaatgtatgccattgattcgctaagacaacttggtatgaagtacttggagcgtgctgaattaaacaacttcacatttcagagcgacatactgaaaccctttgtcattttaatgaggaatagtcacaactcaaaaatccgaggtttaattgttgattgcattgttcagttgatcaagtcaaaagttggcagcataaagtcagggtggcgttgtgtattcatgatatttactgcagcggctgatgacgaggatgaatcaattgttgagagtgcttttgaaaatgtagaacaagttatcttggaacattttgatcaagtcgttggtgattgcttcatggattgtgtcaactgtcttattggttttgcaaataacaagtgcactcctcggattagtttgaaggctattgctctcctgcgtatatgtgaagatcgtttggcagagggattcattccaggcggtgctgttaaacctattgatgttgttccagaggccaattttgatgtgtctgagcattactggtttcctatgctagctggtttgtctgatttgactttggactctagaccagaagtcagacattgtgcactggaagtgttgtttgatttgttgaatgaaagaggacataagttctcttctcccttctgggagagtatttttcatcgtgtactatttccaatttttgatcatgtaaggcatgctgggagggatggactttcttcttctggggatgattggcttcgtgatactagcattcattcactgcagttaatctgcaaccttttcaatacattctataaggaggtatcctttatgcttccacctcttctcagtttgctgcttgaatgtgcgaaaaaaacagaccaaactgtcgtttcaattgctcttggcgctttagttcatctgattgaagttggtggtcaccagttcagtgatggtgattgggatacattattaaagagtattagggatgcatcatacacaacacagcctcttgaattgctcaattcattaagatttcagaaatcaaaacaccagcagttactttcaagagaagaaagcaatgcacaaggcaatagttaccttgacagccagggggaaccctccatcagtgacagtaataatggtgagcataatcatccagaggcagattggaacatgaaaggtttacaaaatttatgcatttatcta

SEQ ID NO: 23040 - DNA, 3626 bp, Zea Mays
gaaaattcctaaaatgaagactggagacccagcaggtacgcggagcgtagcaaattcttcacgacaccccgatcgagactctggagcgcagagacggcagagagcacagtagccaagcgactggagactcatcactggagactggagagcatccggagccagtgctcgcaccaccgctcccgattcccaatcgccttcccgccgccgaaggggcgccgcactgtcccccggcctcgatctctctcgggccagccgtcggccgtggccctgcgcctcctgcgttatctggctggagatccggccggagtgccattcctactctcggtcaataagtattctggaatgtttttccgagctgaaatagatagcttctggagctggatctcagtattctgttagggacatgctccaaccgagggaagctgatttgcctgcactctttcttgtcttcattgtacttcctgtggtagcttattttcttctcgggagatggcatgatgctgcaagtaagaaggcaagggtaagtgtgcttgctcagcgagctgcagaagaagcctatagagaggaaacaatggcgtgcccagacattattctgccagggtcttccttgagaactatgccctatttcagacctatgcctgcattaagacaggaataccatgaatgtgcaacttgccatgcccctgcaaagactcgttgctccagatgcaaggctgttagatattgctctgggaagtgtcaaatagtacactggaggcaaggacataaggaaacatgccaaaagtggcttggtagtggttctagcagctttggtggatctagcactgaggctactgaacagatgccgttcttgactaacttaaattcacctcttccgggtggtgacattcacttgcgtgacttgaacttcgatactttatcagaaccatcctttcccacaactgatggttataatctagatactgatccatttttggcagacagaagcaacatgaataaatcaaatcaaggtattcatatgagcgaaaatggtgctgttggtgtatcttttgaaaagaataattataatgctgatgatgaaatccactcaccggaaaatttatctagaaacaaggtgtcaaacaactattttggttcagatgcaataagtggtaatggggatgcaatttatcctgccaaaagtaatgcacagcagcctagcagctgtgctcctgacatgagaaaacagccaaaagcaagcatcacagtttatcagcctgacataggtgtctatttaacttctgacatggtcagttcttgtgaggggtcatatgcttctgccagtgagccactgcaaaggagcttgtcatctggaagaactattgggaaagcaaacgcggtgaataagaggcctccatacccatcaagtaaggtggtttcagcacaaaagccacaggatagggtgtctacatcatatcaaaatgatggccatgagaagaatccttgcaacaaaaatgaccaaagatctacccccaaatgtgaatcaagtcaatcaacaagcagcaatctacaaaagtttggagcatccaaggttgaagttttaaagaagccttcaaaatttctcaaaaccagccttgtgggattgatcaatgataataagaggaacaaggtattgttcccatatgaagatcttgtcaagttttttcagtatgaagcccggggtatttcccctagaggtcttttcaattgtggaaacagctgctatgctaatgctgttcttcaatgtctcatgtgcacaaagccactgatgatctaccttcttctgagattgcattctaaagattgttcttcaaaaaaatggtgccttatgtgtgaacttgagcaatatgcttcaactttacgtgaaagtggtgggcccttatctccaagtagaattctttctaatctgaggaatattggatgtcgcttgggtggtggaactcaggaagatgctcatgagtttttaaggcatcttgtgatgtctatgcaagcagcttgcttggatgggctgggtggtgagaagcatgttgagccaagtttgcaggaaacaacactgatacaacagatgtttggtggccgtcttaaatccaaggttaagtgcctcagatgttatcacgagtctgaacgatatgagaatataatggatcttactttggagattcacggctgggtagagtccttgcaggatgctttgacacagttcactgcccctgaagatttagatggtgataatatgtataaatgtggaagttgtgctgcctatgttaaagccaggaagcaactgagcgtgcatgaggtgccaaacatattaacagttgttcttaaaagatttcagtcaggaaaatatggcaagatcaacaaatgtgttactttccctgatatgttggacatggttccttttgtgactgggtctggtgacaatccccctctttatttcttgtatgccgtggttgtacatgtggatacagaaaatgcatcattctctgggcactatatatcatatgtcaaagatatgcagggtacatggttgagaattgatgattcagaggtccaggttgtatcagtgaatcaagttatgtcagaaggtgcatatatgcttttctacatgaggtctttcccccgaccaccaagaatatacatcgagaaggggccgactgttccatccgcgaagcgccacacatcaaagtattccaagggctctaaacacgagcgcgagcagacagagttactcctctcggcgaacgatccagcatacggtgtttatgactttagacctgatggcgagggctacacgcaagatcagcaagcagagttgagatccagggatttccatcgcgccgacgatgccttcgcagactcggtcagcgcggacttctcggaggccacgtcaagcgaatggtcgctgtttaccagctccgacgagtcctcattcaccaccgagagcacaagggactcgttcagcgttgtggactacggcgacaacgctggcctggacccaatctcctcgatatttgggccaagctatgctccggagcatcatcccggtccacctggcagtttcgccgcgtgcacgaggctctcgccttccaacccacagacaaggtacttctcggagagcacagggttcgtctcggactactcttccagcggcattgtacatagaggaagggatccaggtgaaattttagagcgcggtggagctgctccggttgaagccatcccccgaggcccgaaccagtaaattacgccgaatccggcagtcgtatggccctgcacaccagtgctttgtgaaaagcttgcagattcatcaattgacgtgcacttgccttttatatggacgctgacgtatggaggtgcacactctccacctccgtatatctcgccacctactctgtttatattagaaggttgattgctgacacacaacacctgctcgtacttttttgtcgaaatcatgacggacaacaacgctaaacatatagtacaatcttcttgtcttgctgatctgctatgcccctttgtgaaatctgccggtgacatcagcgatggcgtcttgctgatctcgtggtatacctgatgtttcctcggtctcagcttttatcacgcag

SEQ ID NO: 23041 - DNA, 699 bp, Zea Mays
gccgtagggcggccttatctgtatctgggggtcctttttggactttttttcccttcttaatatattttcgcgcagctctcctgcgctttcgagaaaaaaaataattgcatttcagcaggtgttacttcataaattgttcagtaggaaacaactggctcatcaatcatcaggaatgttctggagcttaccagatatctatttaaaatagttgattcaccaaattttcttttcaatgatgtatatcagcagatgtttgagagggagattggtcatcttagtgcattgttcctgaccatggaggaaggcttcctcgccctcgtgtcaagcctgtgggagtcccagtcgaacatcaccacggctgggacgtgctgcctcgtcagtgtcatgcacgacaagacccttttcatcgctaacctcggtgactctggggcccttctcggcaagaaggatgttaaggtaggttggctctgaagtagtgcatcctcagatgtgtcatttgtgcagaactgctctctgattatgtagtggaaaaatgcttgtggtcaatagttggtagttgccaaaactgacaattatggtagggttgagatggacagaaagaacgcagatgtaacaagccagccttgggaaacaaagataacctttctcatattgcctcttatattaactcgacattctctaatattcatgcacgcaacg

SEQ ID NO: 23042 - DNA, 3491 bp, Zea Mays
cctgtcaccgttctctcttgtcttcctcccttctcctttgtctttaaagcccgagcaccccctctccagccccgtctccgcctcctctctccctctctacactccaacccaccaccgccccgcgaccggtcctcggcctcgccgtactctccactcgctccaccctgcggcgcgctgctccgtgttcttccctcccgcaaaccgtcggtgaatctcgccgctcctaccgtccggttcagattctcgctaccggtcgggggcgtctgtttctcgtccgggaggccggagggctcctcgtggccggagcctgggggaggagccgccagcgcggcgtgcatggaggctaagatggagtctgaatcactcgattttgaagacaatggagaccaccaaccttcatcagaagcttctcttgcttcagatgtggtatatgatgactcgcttgtatgtccatgcattggaagtgagcaccaggcagaaatccccaatcttgctacagaggatgagtgccgtaagctcatggccagttcacataatgattccatattccatggctatggttaccctgttgtggttgggttagctttaccaattacgtgggcatcaccaagcgaagttgataagacggaagaggtactacaaacgcaaaaatgttcagaatttggaacaaaaggcagcactggagatgtgcacagtcaggtgacctcaacttgtgcaactagcaatgacactggcatatgtgctgcaacattccagtatccacatacagtagtgcctgtagttcaaattaaatctgacagtaatcaagcatacgatgaaaaaatggtcccttgccccactcaagaaggacagaatgttaccaataattcaataatgcagcagagagaaaccaaacaattaagtcctctaccttattcacccgttgctctttggagtgatcttgaggcagaggtatttctccttgggctctacatttttggcaagaatctcaacctgctgagcaggtttctgggtacaaagactgttggtgatgtgcttgcatactactatgggaagttctacagaagagatacatacaaaagatggtcggactgtagaaaggcaaaaactaggaaatgcattcttggggaacgcatttttcaaggatggcgacagcaggagctaatttcacgtctgaaatctaaaatccctaaagaagctcatgattcgttaattgaggtatgtttcattggcactggttttcaaatctttcagtgatagccaaacatctttgaatgaatttgtcttcagtctgaaatccactgtcggagcagaaacttttgtggaggtggttggggttggtaaagggaagcacgatttgactggattcgttacggaccaatctaaacctaatcatgctctctctgttcatagtgacttgcctacaggtaaagactgttcttcacttgcttcagaagatataatcaagttcttaaatggcgatttcagaagaagtaagactagatcaaatgatattttctgggaagctgtatggccccgtttgcttgcaaaagggtggcactcagagcagcccaaggatgttagcacaactaagagttgccttgtatttcttgtgccgggtataaagaagttctcgagaagtaaactcaccaaaggtactcattattttgattctgtcagtgatgtccttaaaagagtggcagcagatcctgttcttcttgagttaaaggtagatgcgataaacaatggtttaactgctgaggaaaatggcagtatcacagatgtgaaactgaaccaggatagtccgttagatggatatcaggagcttcctaagttcacaataatcgatactagcttagtcgaaggggaagagccattcaatatacgggaactgagaaacttacctgcagatgcaaatattacttttctcctttcacaacattcatctaatatggtgagttacagctcctctgaagaggaagctgccaatgatagattatcagatgaccaggaagattgtggacgagttaaagctgaggccaaggaaattgaaatggtttcagctggttcattgcaaaacatggttactgctaatggccactcttctaatgtcaatgataaaattgatctgacaggcatctatggcatcaaaacaaaacctgaaaggcgcaagtatttgtccccagtgtcaaagcgcagaagattaaatagctgtagtaatgaacaggccagccggcgcagtttttctttctcaaaaggtggtggttttgagaaacagaaaagcaagccaccgttgatttcatccaaaccagctgctgttgaagttggcgacacttttcagagtaaaacaatttcaagctgttctacaaaggagaagccatctgagcacacagcagatgcattgaactcccttatcgatgatgagcaaaatgcgagaatggttatggaggttgaagcagtggctgaagttcactcaaaggtcattgccgttcagccaaaatttgtcaaagaaagagctgagtttattggtccagttgatttgaataagctggaaacgctacatgatgataaggcaagtcgaagcattgacaccacatcattgggaaatcttggtagcatgaaggttgatgaagctccctccagttcagacaagaacatggcctgtgatccttcaggggcagcaggaagacctgttagcgaggcacctgatcctgctttgcaggtgaatgctcggaggcacggaaccagaaacaggcctcccaccgcaaaagctttagaagctgtcgcttttggacttcttggaagcgggaagcggaagggtgacctgaaaaacagggcgacaagccggccttctcagcgagctcgcaaatctgccaaagacttggttcccgtggcttctagtggtgacgcaaaggcgtcctgcatagatgcagaagaacagcgatgagcagatttctgtggtgacatatgctgacaatcaacggcaccatgacaatgtgcggatgatgaatatcaagcaactacatgaggcctggagctaagctgtccaaagctggtggttaccttaccattgtctaatgcctaccattcaggaggtcctgaaggtgacaatggttttacagggtgcatggtcaccgttcgtgcggaggaacccatccttagtttttttagtcaacagtcttgtgtctgtcaaggcttgcaaaaccaacttgtaccggagagagggagggaaatcgccaaattggcgaattaagttatgcgataccgggattaatgtttttgtacattggtctatcgactttccatgggtgaattcatctatgagcttcttttgcagggaaagaaggcattcgtcagcttcataaaccacaactaacattgatggtatctgcggtcttgcatggcttcttctttcccatgcattcctttttttctggtgaaggaaaaaagtatttcttagagttgatttgatgatcagaaaattaaagggg

SEQ ID NO: 23043 - DNA, 2253 bp, Zea Mays
ttcaataccttattttaccacgatcaagtatccggaagtgtttagaacacatacacttattcgcgctaatatccagatcttcacgtgagcaagcctcgggtcatcgcattaatttggatgttcctgcgctgaacactcaaaatgaaaagatagtgcgggttccatctaagcagcttgctcagagtcatcgtgtaacaaatgttacatgtcctgtttccaatccaaaacagttatctcatatagtaccctctcctactcatttggatccaaatggagcttctaaaaagagaaaaaaggcaaaagcttggtctaaagaggaggatgcagacctagcagctggtgtgcagaagtatggtgaaggaaattgggaggtcattttgcataaatgtaactttgataatacaagaacgcctgatcagttatctcagagatgggcactaaaacgcccaggaggatcaaccaagcctgctagcactaaacacgcctctgttggctcagaagaaagatcagcaactatcaaggcacttcatttggctgtcggtcctatgcctgtatcatctgcactaagatcaggacgtgaacaaagcattcagcataagtctacagcgtttgctcctaagatgccacaagtaagatctgcagtaaccccttcactggcaccggcactggcgctgccagtccaacctctgcgtgtggcagctgaagttcagtctccgcttcgtcatgggcaacaagctcctggccaaggtgcgccaccaaaattgtcaaatgcttcaaataatacacggaagaagcaagcagctctgccaaattctactttcagtccttcctcaatacaagcagcagcaattgctgctggtgggcgacttgccacagcctcaactgccgcaaatcttttaaaagctgcacaatctaagaatgctgtgcacataagatctctaggagcaacatctttgaaatcttctgcaagctttgatcatgggacacaatctgggggctcccagcacctagaatctctaaatgctagcgcagttaatggtgtttcaggagtttctgcagttaatcaatcagggccacctgctggagcggaaactaagaaggcattgggtaccacactagcacctgtcccatgcgacagcgaggaaaatgaggatggctctgaattttgtgcgattacgttagatgacttattccctgaagatgcaaagcagccggaaactgtggataccaaggcaaagcaaccagaaaccacgggtcccaaggcaaagcagccagaaaatgcagatcccaaggcaatgcatcaagaaaccatggatcccaaatcaaagcagccagatacactaaaggttgggatattagatcccaaagataaagacatgctagagttcgatcaatatgttgcttctcaaggagcacacttaaacacggatgatctgaataaaagcaagtgtaccaacagtgcttcccaagcccaaggtcttgttggcagccagaagaacccactgaaactgactcctgtggacgggaaagctaaccctgtaactgcggctgggagaggtaagcctgtagctgctggagtggcatcaaccggaaagaaggctacaatccctatctcacatttggcagcagggaccccacgcggcatagttgacacagtcaatgccaacgccccaattagaagaacactaacaaggagggcagccgcccttgtccccgctggttgccaagctcctcccccgaagcatgccatagacgcgaaaggctgccaaatgacgaatagcattgccacgtttgtcagttctggagtaccagccagcagccaggctagcacgcccgcgaaagatgctaacaaagcaagcccaccgtccagcagctgccagcccaagccggatagtgtggcggtgaacggtgctatcagggccgtgaagagtgttgctaagaaggggaatctgccagcagcagcagccaggcaatagacaggaccctgaataacacggtaaattttgtagtaatacccgtaggacttttgcgcgtcgattgtaccttggaatgtgaatattagtcgttttgcgtgtcattcttttcaccttgcatttgggtgatttttgtctggtattcctgctgggcatcgctaacgtaacttgaaagacgttctcgtctagttcccttgtgaagtgtgatgcttgtgtgtgtgtgtctacttgcgcccgaggcgatggtgccgccatctttgtgcctgtctgtctgggcagg

SEQ ID NO: 23044 - DNA, 401 bp, Zea Mays
tgtgcacattccttgttcctcacaggtcagtgaagctcctaaagttggtattcctaactctactattgtgtgttgcataaaacgaggtcgcgccgtcacagcttggcgccgtggacagcttccccgccgacccatcaacccatgttgtctctggttgttttcacgtgagcaccatgatattgttaggtcgctgaggctctctgtgtccatagttagagctctaccgtgtggagaccgcgggatcgggctcgtcggacccaaggttcggccgccaccgcggccagaggcgatattggtctcttcgatccgattaaccaaggggaagtgatggggtcggtttgggtgacgggtaggtatgctcattctcgtcggagacgatcgcctccggtggctctgcatgg

SEQ ID NO: 23045 - DNA, 921 bp, Zea Mays
acttcttttgcgctccttgcttccgcttgtagtgggagtgggagtggccgagtgggagaagggaagagatgagcagcagtgaggctagcacgcaagaccatggcgtgccggcgctcgaggcgcaggatagcacggatgaccatggcgtgcccgcgctcgaggcgcccacgcccgaggctacggacaagccagataggcctgatgagttggaaagggtagaatcagcgggcggcagggtcatcaactggaaggggtaccgtgtcctgggggtgcttgcgacgtcaaggtcaattggcgactactacatgaagccattcatatcagctgaaccagaggtgaccgttacggagcgtacgcacaaagacgagttcatcatcctggggagcgacgggctgtgggacgtcatgtccaacgaggtggcttgcaaggtggcgaggaactgcttgtgcgggcgcgcggcttccaagtaccctgaaaccgtccacgggagctcggccagcgatgccgccgcggtgctggtggagttcgccatggcgcggggcagcaccgacaacatcagcgtcgtggtggtggagctgaaacgtctgaagtggaagggtggtagacagaatggtaggacgtagtctgtaggagcctccggctcgtcgcgaaatataagcgtgtcgacagagccagagaggcaaagggaagcagccgagcgtatgacggaatgctgtaaaaaaaaaaaaaaacagagagagggctctgactctttgagagctgcacttgtgttgtgaccgctgtattgcgttggttacttggttctttagttcaatactaacaaaatggcattccggccaatggaagtagcaggaagcatgggctgctgtactagttctttcttgtcgttttgttcgagtcaaataagttctgaccgtccaa

SEQ ID NO: 23046 - DNA, 1010 bp, Zea Mays
aaaaagctcacgagaattgaacgaagtaaacaatatctcagaacattagaaaatcaacctaaatatccactcccgtcgtcctggactcgcagttcatccacgacccaccgaaccacaatggccacgttcctgggaagctcaccggcgctcctcgctcgtcccattgccaagccgcacatctcctgcgcgcagacaccgcgcccggcaattgcccagaaccagccgccgtccagcgagcagccggaaccacagaaacagcggcactccgtgcaagcgcagccacagcaggcggcggcggcggcgaggccgaagcacgcgggcgtcgcggactccactgactggatagcctcgtcgttgacgcggcggtccggaatcggtgcggggctggcgtgggccggcttcctggccgtcggcgtcgtgtcggagcagctcaagacacgcttcgaggtcgcgcagcagcaggccaacaccaaggacgtggagcaggagcacgaggtcgtgttgcccaacgggatccggtactacgagatgcgcgtcggtggcggcgacgtcccgcggccgggcgacctggtggtaaccgacctgcagggccgggtggccggcagcggcggggaggcgttcgtggacacgctcggcgacggcaagcggccgctggcgctggtgatgggctcccggccgtacaccaggggcatgtgcgagggtgttgagcacgtggtgcgctccatgaggccaggcggcaagcggcgggtggtcgtcccgccgggcctcgcgttcggcgacggcggcgccgacttcggggaggagcacgtccagatcccgcccggcgcgacgctcgagtacgtcgtgcaggtcgacaaggtgtccatcgcgccggcgtgagggcctgccgaggcgggagccggggcgaagctacattattcttagagaaaagcttcgatatagatcaagagaaatacggcgaagcaagcttcgtcacgacgaagcaggaaggcgacgcatggagaaggtgt

SEQ ID NO: 23047 - DNA, 68 bp, Zea Mays
agcttctttcgttgcttctcgagcgtcatgaatatttttttcgctcttcttcattatttcatgagcca

SEQ ID NO: 23048 - DNA, 3492 bp, Zea Mays
ccttccttccgtcgcggcccgcctccttcactacaaccaggacaggccaacgcggaagcccgtcctccccacccccttccagatttgcagctcgcacctcgcgaatccccgaattccccactgcctcgccacgccgcgcgctgaccgcggcacccggagccccacctgctattcccgaggcggaggacccatcctgccttggcgctcgttcctccctcgtgatcggcgccgcgggcgaatcgcgctgcccggtgggggggaatctagggttccggccatgccggcctagtcgtagggcgggggtaccggcctgcgtcgccggcgcgcgtggagatctcggtgcctccgaaccctggcgggggccggggaggccgcagctgctgaggcatggacgtggactcgcgcatgacgacggagtccgactccgactccgacgcggcggccgcggccgcccgcgggggcaacgccggaggttccgggtccgggagcgagacctcctcgtcgtccgcgccctcgacgcctgggacacccgggacgcccgcggcggccccgaatccggcgccggtcggcgctgtgggtccgaggccagcacctgggtacacggccgtgaacgcggtgatcgagaagaaggaggacgggccagggtgccggtgcgggcacactcttaccgcggtgccggctgtcggggaggagggcgcgcccgggtacatcggaccgcggctgatcctgtttggtggggccacggcgctcgaaggaaactctgccacgccgccctcttcggccgggagcgcggggatccgtcttgctggtgccacagcagatgtccattgctacgatgtgtcattgaacaagtggagcaggcttaccccacttggcgagcctccttcaccaagagctgcacatgtggcaactgcggttggaaccatggtggttattcagggtggaattggtcctgctggtttatctgcagaggatcttcatgttctagaccttacacagcaacgaccacgatggcacagagtggtggttcaaggacctggtccaggtccacgatacggtcatgtgatggccttggttgggcagagatttttgttgactattggtggaaatgacgggaagcggcctctggcggatgtatgggcccttgatactgcagctaagccatatgaatggaggaaacttgaaccagaaggtgaaggaccacccccatgcatgtatgccactgcaagtgcacgctcggatggacttctcttactttgtggtgggagggatgcgaatagcgtgcccttatcaagtgcatatggtcttgcgaaacatagagatgggcgctgggagtgggcaattgcccccggtgtctctccatcacccagataccaacatgcagctgtttttgtgaatgcacgtcttcatgtgtccggaggtgctcttggaggtgggcggatggtggaagactcctcaagtgttgcagtactggacactgctgctggagtctggtgtgacacaaaatctgttgttacaactcctaggacaggaagatttagtgcagatgcagcagggggtgatgctgctgttgagcttacacgacggtgcaggcatgcagcagctgctgttaatgatctcatattcatttatggaggtttacggggcggggtacttctggatgatcttcttgtggccgaggatcttgctgctgctgaaacaacaaatgctgctaatcatgcagcagcaaatgcagctgccacaaatttgcaagcaggacgaacacctgggaagtatgcgtataatgaacaaacaagacaaacaattacagaatcaggtcctgatggggctgtagttcttgggactccagttgcacctcctgtaaatggggacatgtatactgatatcagtcctgagaatgcggtgctgcaaggacagaggagattaagcaaaggcgtggattacttggttgaagcatcagcagcagaggcggaggcaatcagtgctacattagctgctgtgaaggccaggcaggttaatggtgagatggagcagttgccagacaaggagcagtctccagactccacatcaactagcaaacattcaagcctcatcaaactggacagtgctctttctaacaacttggcagctccacctggggttcggttgcaccatagagccgtcgtggtcgctgcggaaactggaggtgctctaggtggcatggtcaggcagctttcaattgaccagtttgaaaatgaagggagaagagtcagctatggcaccccagagaacgcaactgcagcaaggaagttgctagatagacaaatgtctattaatagtgttcctaaaaagcttaaagcacctgttaaaatatttggagatttacacggacaatttggagatctgatgaggttattcgatgaatatggtgctccttcgactgctggtgacattgcttacattgattatctattcttgggggattatgtagatcgtggccagcatagtttagaaactatcactcttcttctcgcattgaaggttgaatatcctcaaaatgtacacttgattcgaggaaatcatgaagctgcagatatcaatgctttgtttggtttccgaatagagtgcatagaacgaatgggtgagagagatggtatctggacatggcatcggatgaataggctatttaattggcttcctttggctgcgcttatagaaaagaaaatcgtttgtatgcatggtggcatcggtcggtcaatcaaccatgttgagcaaattgagaatcttcaaaggccaattacaatggaagctggctcggttgtcctcatggatcttctgtggtctgatccaacagagaacgacagtgttgaaggactgaggcccaatgcccggggtcctggtcttgttacatttgggcctgatcgggttatggagttctgcaacaacaatgatcttcagttaattgtacgagcacatgagtgtgtgatggatggatttgagcgctttgctcaaggtcacttgatcactccttcattaacaacaaaataaggaggtactgcaaataatgccggagcgatcttggttttgggtagagatcttgtggttgtgccaaaactaatccatcctttgccccctgcaattacgtcacgtgaggcgtcgccggatcatattgaggacacatggatgcaggagctaaatgctaacagaccaccaactccgaccagggggcgtccccaagcagtagctaatgacaagggttctcttgcctggatatagtagattgaccacacattggttggtatgattcatatgaagcctgagtggtctggatcttgttattttcatttgtgttcgggagaggggctggtcgacagccgtaccgaaacgaaagattgatgtacaggggagcataaagactataaagttggtagaagggagcttaatctattttcttctctctccaattcgtttcattgaacacgagtagcaaacgaatcaagctgattcatcaga

SEQ ID NO: 23049 - DNA, 287 bp, Zea Mays
tggacgacgatggggaaaggggaggacggggagctgggggcggggcaggaggcggacgcacggctaccggagcggcctggcgaggcggctgcggctatcgctggtggcgtcgtggggtacagtgacagcgaggtgttcagagatgcgtcgagttcctcaattctcccaggcagggtggaacaagaggcagtcaggcagataactcgattggaagttaccagatttctctgttaccagaatttgctgcgcatatgtgcgtaatctgactgcgacgaatctctagatcc

SEQ ID NO: 23050 - DNA, 1202 bp, Zea Mays
agagaacaaaaggagttatcaatatgttgatcattattattttctaagaaaactctccacagtgcatggaaagaaatatcaagattgcgtgacaatgtcagtaccaaaaggagcagactccagcttcaaaagcaaaaactcaagctgtttgctattcttaggaggcagatgtcatttctagaggactggtctcatatcgaaaaacatcattcaagtgctttatcagcagcaatcaaagctctgaaggctagtactctacgtcttccagttgttgatggtgcaaaggctgatgcactagctgtgaaggaagcagttaactcagcagtggatgtaatgaacacaatgacatcatcaatatgtaatttgctgtctaaggtcgagggaacaagctctgtggtgtctgagctttctaaacttgcaacacaagaacaaatgttgttggaccaatcaaaggatctcttgtccacggttgcagcaatacatgtaaaaaactgcagtttgcaaactcatatgctacagcgaaaccaaaagcagagcccggcacagttgtagatcagtttgccctcgccacattgggtggtcactaacaacatcacacggcctcatgttttctcaccggagactgtgcctacaggtaataaaaagctgtaaccatttgttgggtgtgaagcgtttcctaatctgctcggtcgacctcactgagtgtagctgattcgtgtaattgtttgagtgcatatcaaccatagaagcggcccctgctcgccgcaattggtgtatacagaaacccctagccttgacccaaagataagcttcctgtagatatgaaaagagcttgtcgtttgcgtgcttgctcttctgtgtggagtgctcgagtggtgatgagtgtttgtattgtgtaagggagacggttgctggcttgatacaggtgtctcattgcaaaatcaacaagttgtttctcctgacttgctcatggaatcacagtatctgctttgatgcatactgattcctgaaagagtataaatctatctcttagcgctgtaaagattctgcttgctgcatgggccgtcaaacgtttgttgcggtctttggtgtcaagtttagggccgtggctgcaacaactgctttgggcttgttgtttttatggttatgctgatccagttgggatgcaatgcaacaaagtgaaaatgaatttgaatatacct

SEQ ID NO: 23051 - DNA, 619 bp, Zea Mays
aagaggcgtctacttgtgacccgacccataaacaagtttggggctggcccaaccctcagcatacaggcacgaaacctcgcgccgccaccaaatctccagcgagcgaagaggcggctccggcgagtgcgcggcaacgacgaaggcgtcggggccagtggcgagaggaagagcatgctgaagttcctgtccaaggtggtggtggagtactgccctctggacccgcggaaggcggcggcagtggagctcctcgcgcagtgcaacggccgcaaggccaaggactccaacccggcttgctcggtcgagctccgccgcctcccctccccagctccgtccacggacctcaagtcgcagccgactctcccgcctccgagggtcctcgtgacctacttcaccggagctgaagaggccatcgtctttgctgagggagctacggcgcagggcatccgggaccagatcgtcgcacggggccggctcatcgatacggagaagatgttccgcgacggcggggagaagtggcccgtcgtcatccccgaggaggagcttggcatgtcgttccctggcatcaaggacagccgcgcgctggagggtggactctggtggaggcatggagtagaggcgg

SEQ ID NO: 23052 - DNA, 3491 bp, Zea Mays
tctgttataacttgtcaggaacatattattccatagtctcctttgaaagaagaattaggcagcacatctttacgaatcgaggatgtcagtttctatgaaggacctggacccagctttccgtggctctggacaaaaggacggcttggaaatatggcgtattgagaatttcaagccgatccctgcccctgcatcttcgtatggaaagttcttcatgggtgattcttacattatcttgaagacaacagccttgaaaaatggttctcttcgccatgatatccattactggattggtaaagatactagtcaggacgaagctggaactgctgcgattttaacagtagagcttgatgctgctcttggcgggcgtgctgttcagtaccgagaaatacaaggcaatgaaacagaaaaattcctgtcctattttagaccatgcatcatgccacagccaggaggagtggcatctggattcaaccatgttgaggtcaatgagcaggattacaagacccacttatatgtctgccatgggaagcatgttgttcatgttaacgaggttccctttgctcgatcatcccttaatcatgatgacatatttattttggatacgaagtccaaaattttccagttcagtggctcaaactcatccattcaagagcgagcaaaagctcttgaagttgtgcagtacatcaaagatacatttcatgagggcaagtgtgaaattgcatctgttgaggatggtagaatgatggctgatgcggaagctggtgaattctggggtttttttggcggctttgcccctcttcctaggagggcacctgcagaaggcaatgagaaacatgatgaaactgctttcaaattgctatgttttgaccaaggaaagctggagcctgtcgactgccaatctttagcacatgaattacttgagacaaacaagtgttacttcttagactgtggtgctgaattgtatgtttggatgggtagaattacatccctgatggagagaaagggtgctagtgaagctgctgagaaattgctctctgattcaaaccgaacaagaacacatataatcaaagtgattgaagggtttgagactgttacgttcaagtcaaaatttaaggagtggccacagacacctgagttgaagttgtcatcggaggatggaagaggcaaagttgcagctcttctcaaacgccagggcttaaatgttaagggtttgatgaaagctgctcctacacaagaagaacctcaatcctatattgattccactggcaatctgcaggtttggcgtgtaaatgataaagacaaggttcaactctcaccctctgaccaatccaaattttacaccggcgattgctacatatttcagtatacttatcctggagatgataaggaggaatgtcttattggaacctggtttgggaaaaagagtattgaggaggatagggtaatagcagtttcacttgcaagtaagatggttgaatctgctaagtttcaggctgtccaggcgcgcttttatgaggggaaagaaccgatccagttctttgtgatatttcaaagcttccaagtgtttaagggtggtcttagttctggatacaagagatttatcgctgaaaatggcatcgatgatgaaagttattctgaagatgggcttgcactctttcgtattcaaggttcaggaccagaaaacatgcaggcgattcaagttgaacctgtggcctcatcattgaattcatcatattgttacattctacataatggaaacactgtgttcacttgggctggaaatctgaccactgcattggaccaagagttaatggaaaggcagcttgatgttattaagccaaacacacagtctaggtcacaaaaggaagggtcagaaacggaccagttttggagtttactggggggcaaatctgagtactcaggccaaaaaatggtgcgagaactcgaaagtgacccccatcttttctcatgcatcctgtcgaaaggtaattaagaatgtagattttgtagttttgggaaagttatccacattaacagttcaaatacatactgatctcgtactgctgttctccctattaatgttcctaatctgtcgggtccatgaaggcaatttgaaggtcaaagaaatacaccactttactcaagatgatctaatgacagaagatgttttcattctggactgtcacacgagcatatttgtttgggttggtcagcaggtggatgttaaaggcaggttacaagctctggatgctggggagaaatttattgtgcttgattttcttatggaaaaccttgcccgtgaaacaccagttttcaccgttatggaggggaatgagcctccctttttcactagattcttcacctgggactccgcaaaatcactgatgcatggcaattcataccagaggaagctcgccattgtaaaaggtggaggtgctccagcattggataaaccgaaacgacgaacaaccgtctattcaggaaggagtactacacaagataaatcccaacgctccagaagcatgtccttcagccctgaacgtgtgcgtgttaggggaagatctccagcattcactgcattggctgctaattttgaaagttcaagcaacagaaatctttccactcctccacctgtagttaagaaactttacccgaaatctgttacacctgatccgtcgaatactgcttctaagtcacctgcaattgctgctctggctggttctttggatcacccttctcaaactcctgctctagaattcatgaaaggtggctccgagtcagagaagccaaaacaggagggagatggtaaagaaggtgttgatactgtggccacaagagttgaatctctgactataaatgaagatgtaaaagaaaacgagccagaagatgacgagggccttccgatttacctgtatgaacgtctgaagaccacagctgctgatcctgttactgaaattgatgtcacgaggcgagagacctacttatcttcaactgagttcaaagagaagtttgggatgacaaaggaagcatttagcaagcttccgaagtggaagcagaacaggctaaaaattgctcttcaacttttttagcctgatcatcaacacttccaatgtaatcaccatctgcaatgccacatcaattttcacattgtcctggatcggtctcctttttcctagtttggatttgttttgctagctaagtagctctcttattcttccagttcataggtgtgctattccctttttcctttttttgtcaagtgctcttcattgattcaaggtcacacaggtttgattctgaggcttgatttttttgtgtatcaactctgcctgctgtgttctttttttgtttttgagatgagttgcggtttgagggagcgataagtatgtacagcagagtgccggcactgtaacatcacaataccgttatctttgatcaatataattattttttgtgtgtaacttaatattgtttttccagaggatttaagg

SEQ ID NO: 23053 - DNA, 1612 bp, Zea Mays
tgtagatctacaaatagtaaatctgaaattatttcttctgcagtttgagatatgtagatcatggttaattaaacatgggtaccttaactgtacaagaagcaagactggaagccttgcatgatttgatccatacataagttgcgggtttaatatattccgcatatttgaaaggagggatgtagaccaacaagttcaatctcagcattcttctgcgtctgttgaaaattgtggaagttggcttctttcttgtttccggacaatagatagtccaaagccattacataatgcagattcattggaggaacctctagtaagtgattcgcagaggactgacaatataacttcagttgaagagaacacaccattgcatagtgataacacaataggtaaagcagaacaatcaaacaaaccatcaccaactggatcccaaaccacagctgcgacgtatgaagtaaaggagtccttcagtcaattccatgcatcatctaaagacgtgacaggatccacgcaaaaagaggcaggacatgtggtaactgtgcagcgaaacggagcacgccaagagcaaattcctctctcacggcctgctgttgatactaaaactgataccagtcatctaggccacaaagaagaattcacgcaaacagaagcaggacatgtggtaactgtgcagcgaaatggagcacgccaagagcaaattcctctctcgcagccttctggtgatactgcgaatgattcaatgcaccttggccacaaacaagatattctggaagatataatggcgccctctgataacagcacatttttcagcccatcgtttgttaaaccagtacttacaatcccaataaaagttttgcctggggaggacaaccagacggttgagaaaccaacttcagttattcgtcagccagctgagccagaagctccacctcatagagtattggcagtccctgaggccgaggcactagttcctgcaccatcagctgagagggatgaatgggatatcctgaaagccgtagtgtatggtggccttgttgaatcaatcacgagcctctcagttgtatcagcagctgcagcaagtggtgccaagactttggatatattcatcctgggcatagcaaaccttattggtggtcttcctgtactttaccacaatattgctgatctacgaaacacaggagatatagctgaaagcagtgagcaagtggggcattactggctagagctgggaaggcgatccaagtaccagttgcacatggtgatagccatactgtcatacatcctcttcgggctgctgccaccagtcatctacggactgtcattcaggacgagcgacaacagagagaacaaagtgctggtggtcgctgctgcatctctcctgtgcattgcgctgctcgcaatcgggaaggcacatgttaagaggcataggacatacctcacaaccctcctctactacctgtccattggattcagcagctccggactgtcgtacgtcgcaggcgtcctcctcgcgaaggtcctagcacacttcggtatcattgatcagggtggtgcatcagctcctgctcctccaggtctctcattccctgaagcagccgcctgggcttcctactga

SEQ ID NO: 23054 - DNA, 2178 bp, Zea Mays
tctcaggtgacctcgaaaaaccttcactatgttcattagcacaaaagtgtaaacatcaatgtggtttgcttgaggaaatagtattgccctcaaggaacatgggatctttaccaaatgcagaagaatcaccatttggcctagagtctttgttctggcaggaaagcatacatgaatctgtggaatatggtgcacctgcttctgcaacaactcatactgaaaatggatttggtgaatcaaaaggttgccatgtcaagtctgcactcgaaaatactcatgtgtcagaacctttttcccaccatgatactgaagaaaatatttccaaaattggtggttgcatgcatacatcccagcaagataatggaatggaagatgctatcgagaatcctttaattagtttatcaactcctggttgcaagcatgaaggtgctttgtctgaggaagcagtgcacacaatgaaggattatgctggaacatgctcatcaaatcccagggtacccatgcagttgcatgacgaccttgcattcccaggtcctgaaaaatcaggagatgaatcagtcaatattgaggttaaagtacaccatggttctaatctgtctcagttaggatcaactgatctcttggatgatactgaattgcttcaccagggccataactataaagatcgatccaatgaggatatgctagagcaggctgcttctgaaccctgcacaaatggggatgatatcgtggaggctgcggctgctaccaaatgcttagaaagtggagcgatgctggttccatccgaagagagatcaaatttgaacgataggcagcttacccccaagctggaaagcccagacatcatggaatctggccttaactgtgataaagatgctcgcaatactttggacaatggatctgttgtggctgttgctggtaagagaactccatctggttctggtcactatgaacacaatgtctaccaagtttcaggcatttgtgctacgtctgaagctgcaccagtcggagtggtagaaactggaatagctgtggaaacgtcatccctggtagatgaccaacctaatcctgtgctggatggtgatgaagttgagaagcacagcttaaactgtgaggcagacactggtcggattcttggtactggatctgttacgagcaacacaacccttgtgcccaaggacggtcacaccatttgttgccaggaactggagctaccaaatggcttatcctcgtttctatttcccgaagaatctggaatttgtcagtatgcgagtgtctcaggatcagggccttgcctgcagcacgtaaatgaaagcaccagtacgcaagcgacttacaatattgaaacgctcaatcagcagcatcacgaggagtacgaccaaaccgctcgtggtatcctggctagcagttttcctgaagctgtagggattgaacagtcaggtctggcccctgctgcagaagcaccagtgttggcagtgccagatgggcagcctaacagcaagctggagggcaacgaagtggatgagcacagctgtagctatgatgccgagttcctgaacagagaagcgtctaaccttcacaaagatctgtttagtgaagatagtcatcgaagtcatctaccttctctgagatctcctcaacgatctgcctattttcacaacggaaatgattcgggttcagagtctgtcaaagcagcaggcgaggaggtgtagacggactccgcgctaagcggcagagtttcaaagtttccagcagcataaaaggaagctacgtcgccaagactagcgtccctcgtccgaagccaggggacagcctgagccagtctgcgatagcgctgcgcggggtcaggaagaacacgaccgctgttgaagttggtggccatcctgtgagtttgaagccaaacgctgttcgctcggtcgccaaggacccatcatccagcagaggaccacccagggatagcctgagccagtctgcgatagcgctgcctaaacacagaaaggacgccactgctgttaagagcaagactaataataaaccttggctataataaggcagcaggcttacatacatcactactccgatttcatactccactgtacaaacattgtaatttgatggttgtgtggttccggatttattttcagcacggaaagaaggaaaaaaaagaaggaaatcagaaaa

SEQ ID NO: 23055 - DNA, 4011 bp, Zea Mays
accccagcatatcctccgtcggtgctcaggaccgacagtgagcactcactgccaagcgggccctgcacggcccccagttcacccttcttccacctcccgcctcactggcacactctccccgacacaactcggcttaaactaatccgaacccatcccaccagacgcgcgcaaattaactagaatcaaaatcgtctcgctgctgcaataatcttttatcaattcttaatccctcgcgtcgaaagcgacagcggaaccaactcacgttgccgcggcttcctccatcgaagtcggggaggcgcgggggagggcaggtgtgccagatctgcggcgatggcgtgggcactacggcggagggagacgtcttcaccgcctgcgacgtctgcgggttcccggtgtgccgcccctgctacgagtacgagcgcaaggacggcacacaagcgtgcccccagtgcaaaaacaagtacaagcgccacaaggggagtccagcgatccgaggggaggaaggagacgatactgatgccgatgatgctagcgacttcaactaccctgcatctggcaatgacgaccagaagcagaagattgctgacaggatgcgcagctggcgcatgaatgctgggggcagcggggatgttggccgccccaagtatgacagtggtgagatcgggcttaccaagtacgacagtggtgagatccctcggggatacatcccgtcagtcactaacagccagatttcgggagaaatccctggtgcttcccctgaccatcatatgatgtctcctactgggaacattggcaggcgcgccccatttccctatatgaatcattcatcaaatccgtcgagggaattctctggtagcgttgggaatgttgcctggaaagagagggttgatggctggaaaatgaagcaggacaagggaacaattcccatgacgaatggcacaagcattgctccctctgagggccggggtgttggtgatattgatgcatcaactgattacaacatggaagatgccttattaaacgatgaaactcgccagcctctatctaggaaagttccacttccttcctccaggataaatccatacaggatggtcattgtgctacgattgattgttctaagcatcttcttgcactaccggatcacaaatcctgtgcgtaatgcatacccactgtggcttctatctgttatatgtgagatctggtttgctctttcctggatattggatcagtttccaaagtggtttccaatcaaccgcgagacttaccttgatagactcgcattaaggtatgaccgggaaggtgagccatctcagttggctgctgttgacatttttgtcagtactgtcgacccaatgaaggagcctcctcttgtcactgccaataccgtgctatccattctcgctgtggactatcctgtggataaggtctcttgctatgtatctgatgatggagctgctatgctgacatttgatgcactagctgagacttcagagtttgctagaaaatgggtgccatttgttaagaagtacaacattgaacctagagctcctgaatggtacttctcccagaaaattgattacttgaaggacaaagtgcacccttcatttgttaaagaccgccgggccatgaagagagaatatgaagaattcaaaattagggtaaatggccttgttgctaaggcacaaaaagtccctgaggaaggatggatcatgcaagatggcacaccatggccaggaaacaataccagggaccatcctggaatgattcaggttttccttggtcacagtggtggtcttgatactgagggtaatgagctaccccgtttggtctatgtttctcgtgaaaaacgtcctggattccagcatcacaagaaagctggtgccatgaatgctcttgtccgcgtctcagctgtgcttaccaatggacaatacatgttgaatcttgattgtgatcactacatcaacaacagtaaggctctcagggaagctatgtgcttccttatggatcctaacctaggaaggagtgtctgctatgttcagtttccccagaggttcgatggtattgataggaatgatcgatatgccaacaggaacaccgtgtttttcgatattaacttgagaggtcttgatggcatccaaggaccagtttatgtgggcactggctgtgttttcaacagaacagctctatatggttatgagcccccaattaagcaaaagaagggtggtttcttgtcatcactatgtggtggcaggaagaagggaagcaaatcaaagaagggctcagacaagaaaaagtcacagaagcatgtggacagttctgtgccagtattcaatcttgaagatatagaggagggagttgaaggcgctggatttgatgatgagaaatcacttcttatgtctcaaatgagcttggagaagagatttggccaatctgcagcttttgttgcgtccactctgatggaatatggtggtgttcctcagtctgcgactccagaatctcttctgaaagaagctatccatgtcataagttgtggctacgaggacaagactgaatggggaactgagattgggtggatctatggttctgtgacggaagatattctcactgggttcaagatgcacgcacgaggctggcggtcgatctactgcatgcctaagcggccggccttcaagggatcggctcccatcaatctctcagaccgtctgaaccaggtgctccggtgggctctcggttcagtggaaatccttttcagccggcattgccccctatggtacggctacggaggacgcctgaagttcttggagagattcgcctacatcaacaccaccatctacccgctcacgtccctcccgctcctcatttactgtatcctgcctgccatctgcctgctcacggggaagttcatcatcccagagatcagcaacttcgctagtatctggttcatctctctcttcatctcgatcttcgccacgggtatcctggagatgaggtggagcggcgtgggcatcgacgagtggtggaggaacgagcagttctgggtcatcggaggcatctccgcccacctcttcgccgtcttccagggcctcctcaaggtgcttgccggcatcgacaccaacttcaccgtcacctccaaggcctcggatgaagacggcgacttcgcggagctgtacatgttcaagtggacgacacttctgatcccgcccaccaccatcctgatcatcaacctggtcggcgttgttgccggcatctcctacgccatcaacagcgggtaccagtcgtggggtccgctcttcggcaagctcttcttcgccttctgggtgatcgttcacctgtacccgttcctcaagggtctcatgggtcggcagaaccgcaccccgaccatcgtggttgtctgggcgatcctgctggcgtcgatcttctccttgctgtgggttcgcatcgatccgttcaccacccgcgtcactggcccggatactcgaacgtgtggcatcaactgctagggaggtggaaggtttgtagaaacagagagataccacgaatgtgccgctgccacaaattgtctgttagtaagttatataggcaggtggcgttatttacagctacgtacacacaaggggatactccgtttatcactggtgtgcattcttttgttgatataagttactatatatacgtattgcttctactttgtggagagtggctgacaggaccagttttgtaatgttatgaacagcaaagaaataagttagtttccattctttcaaatgagcacacacataggacatgtttggttcgacatttttaccaatgattccaatgcataacactattttatgttagtaagttatccagttgcattaccgttcctaaactccttgttgaaacaaacaacaccataatctcattgtaggtgttgatgcaccttgttaaggtagtgtttggtttcggagtatggtgggacggagccgctccgatcctaatttgttgttatttggattggtttcatatagg

SEQ ID NO: 23056 - DNA, 2524 bp, Zea Mays
ccacgaactgtctatctgcatccatctcttggccacacccactgaccgcgccacaccacacctgtggctctccgcctcgagatgctttacacggtgtagctggcaagaagccaggaaccttccctgttccctcccgggcgcaaaggggctcacttttaatttcctcgagaggggactgcctcctttctccggcggggtgtcgctcaagatggccggcttctgcgtcgtctgggcgctattctggctcgccggctccgccaccgtgagcacgagcaccaccgccttcgccggcggcgaggcggtggtcatggacgcgcggtccgtcgtcgccgtcaccgacaacgacttcgtttgcgccacattggactggtggctgccggagaagtaggactacgacacctgcagctgggggctggcctccctgctcaacctgcgttctcccccttgaagctccgcctgggcggctctctgcaagacatgtacgacaccggcgacgctcgccagccctcctgcgccccgttcgcgaagaacgcgtcggccatgttcggtttctcgcaaggctgcctgccgctgcgtagatgggacgagctcaacgccttcttccagagaaccggggcaaagattgttttcgggctgaatgctctgaatggccgggtccccatgcctgatggctctctaggggggccatggaactgaactaccacgaacgcggcttctttcattggctacaccgtgagcagaggatacgatgtacatggatgggagctcggaaacgaactgagcggcagcggagtcggagctcgggtcgacgcagaccagtacgcagcagacgtgatcgcgctgaaacgcatcatcgacagcacctaccaccagagcagcagcccggcaaagcctctggtgctcgcgccaggaggcttcttcgacgcggcctggttcacggagctcgtcggcaagacgaagccggagcagatggacgtgatcactcaccacatctacaatctaggccccggggtcgacgatcatctggtccagaagatccttgacccttcttacctcgacggcgaggccagcacgttcagcgatcttgaggggatactgaggtctgcaggtacgtccaccgtcgcctgggttggcgaggccggaggggcttacaacagcggtcgccaccttccacatgattggttggtgtactaagaagcgtatggcgcgagccagcctcgtcgagcagagaagctcgctctctggatctccacgtatgcaggctgaaggtgagaaatataactgagttgtatgtgtgtgtacgaactcgggtcattacatgcaggtaatcaatcacaagcacatacggcgtgattggttgctttctcgaagcagcctgcccgctcgggccagcttccgttgagcctggccgcccagagacggaaatgaatcatgtttcccacgggcctggctcggagcgttctgctgcatctctcgggccaaatcagcacacttacccaccaaccaaacagacgtactttggatacgtagatgcagcagatggtcaacgcatctggtgagtctggacgcgcagcaaccaaacacgcggcttgtgactgatgcgtttgtgttcagcttctggtacctggatcagcttgggatgtcgtccaagtacggtacgaagagttactgcagacagaccttggttggagggaactatggcctgctcaacacgactacgtttgaaccgaaccctgactactacaagtggactagccatgcataacgctctactgtggcaccgcctcatgggcaccaaggtcctctctgcgacgttcaacggcacgaacaagatccgcgcctacgcacactgcgcgaagagatcgggaagggtcctctgctcctgatcaaccttgacggcaacagcacgaaccgcatccacgtcacgagccaaggcgcacaggcacagagtgcgcggagggagagagcggggggacgcctggtcgcttccctttccctgcgcttggcggagcagccgagctgctcgcaacaagagaggagtaccacctcgctcccaaggacggcgatctgcagagccagcaggtgctgctgaacggccatgttctggcaactgacgccgacggggacatcccagagctggagcccgtgcgggtggatggaacgcagccggtaaccgtggtccgtgggcccttactcgatcgtgttcgctcacatccccggcttctacgctcctgcctgtagctagaatttttacaccccagccttttccttcctggtgtgtatcataggttcggataaatccgggcgaacggcgaagcttgttcgcctgtccgtgcgtgaagtaaagctgcgaggctgaaaggtgtgcgatttgtcattgtttgggaaacaagtgttcggataatgtgtgagcaaaggggaggaaagtggagatgaaaataataaaaggaaaaaaaaggtttcgaatttttctctatgtctctgtcgttttggttgagaaagcagaaaaggcgacagttgcctc

SEQ ID NO: 23057 - DNA, 1021 bp, Zea Mays
tcgttgtcccgcaagaccctgtgttgttgtcatcaactgagagagaaacaactcgatcgatcgatcaagaagaccggcgaggctctagctccagaccgacaatgccgtacgcagccacaaggacgtcgccgcagcagcacagccgcgtggccagcaacgggagggccgtggcggcgtgcgcaggccacgcgggcgtgccggacgaggtggcgcggcaccacgagcacgcggtggccgcggggcagtgctgctctgtgatggtgcagtccatcgcggcgccggcggacgcggtgtggtcgctggtgcgccgcttcgaccagccgcaggggtacaagcgcttcatcaggagctgccacctggtggacggcgacggcgtcgaggtggggtccgtgcgggagctcctggtcgtgtccgggctgcccgccgagaacagccgcgagcggcttgagatccgggacgacgagcggcgggtgatcagcttccggatcctgggcggcgaccaccgcctcgccaactaccgctccgtgaccaccgtgcacgaggcggcctcagagggcgggccgctcaccatggtcgtcgagtcctatgtggtggacgtgccgccggggaacaccgtcgaggagacgcgcatcttcgtggacaccatcgttcggtgcaacctccaatccctcgaggacacggttatcaggcagcaggcgatggcggcaccggcagcgccgcacaacgaccacaaccacagctgatcgccgccgggcccggccggctggacaccctcgcagtgggggctgccggtttcttcggaggcttcatctgccatttatgatgttttctttcgccgttggtattctatagtttcaccaataagaagaataggtactgtgaactttttaaaggttgaggttgttcgtcttccctttcttaaactctaaaaacgacaataaagtattgtatgatacaccaccaataatattaagaccagtaaagtagtatagttctaatatatatgtgtaagtttgtgtat

SEQ ID NO: 23058 - DNA, 160 bp, Zea Mays
caggagaagaacaggtggttcaagtggagctgcatatcgaggagttcgattcgatctaggtggtgtctcccagttcactttctggcgccaatgatagtttttagatcctgctatatttatcttttattttgtaagacttccgctatgtaataagtactct

SEQ ID NO: 23059 - DNA, 2693 bp, Zea Mays
ccaagctcctaagtgatagatgaatgcttgatgtttattgatcaagagaatcagctacatataggcagcatcacctgactagacatgcacgagtataaccggtttatagaagtaatacccggtggtaaaggaagtgcatcacctgattaggactctccaactatagccatgcgtgtacaaggcaggcctaaagcaaggaaagtaatcaatctaattatggtaatccaatcaatctaattatggtaatccaacacccccccccccccccgcagtctgaacgtggtcagccacaaggaaaaacattcagactggacctgaactccgtgaacaccgacgaaggcaatcccttagtgaagatatcagcatactgggaggaagtaggaacatgtaaaactcgaactgcaccggccgcaactcgttctcgaacgaaatgtagatcgatctcaatgtgcttcgtacgctgatgattcactgggttcgaggagaggtagactgcactaacattatcacagaagacaacagtggcgcgcttcaggggaatatgcatttcctgaaggagctgtcggagccaggtggtctcagcaactgtgtttgccaccgcacgatactctgcttcagcactggaacaggatacagtgggctgacgcttggatgaccacgagacgaggttatcaccaagaaaaacagcaaacccagaggtcgaccgaccggtgtcaggacaaccggcccaatcagcatcagagtaggcaaccattgtggagacatccgtgggacgaagatgaaggccatgatccaacgtcccatgcaggtagcgaagaatacgtttaatcaacgtgtaatgaggttctctaggatcatgcatgtgaagacaaacttgctgaacaccataagaaatgtcagggcgagtgaaagtgatatattgtagagcaccggccagaccctgatagtgagtcggatcagtgacgggtggaccctcagtgccagaaagcttgccactcgtgtcaacaggagtagaacatggcttacaatcgatcatacctgcacgttcaagcacctcaagaatatactcccgctgagaaagatgaaatccatcaggatgccgagtcacagtgaggcctagaaaatggtgcaaagggccgaggtcggtcatagaaaattcttgctgtagtgctgtgatcacccactggagaagtgagtctgaagatgctgttagtacaatatcatccacatagagaagtaaatagatgttgtcatggccatggtgatatataaacagagatgggtcagatttggcactcacaaagccaagagaaagaatgtgagtggcaaaacgactgtaccaggcacgaggagcttgtttcaacccataaagggacttgttcaggcgacagacatgatcaggccgggagttgtcaacaaaaccagcaggctgtacacaatagatagtctcatcaagggtgccatgcaagaacgcattcttcacatcgagctgatgaactggccaactatggaagagagcaactgtgagcactgtacgaatggtggcaggtttgacaactggactaaaagtctcatcaaaatcaattccaggacgttgagtgaacccgcgaagaacccaacgagccttgtatcgctccagagaaccatctgagcgaaacttgtgacgataaacccatttgccggtcacaatatttgcacccgaaggacgaggaaccaaatcccaagtattattcttctggagtgcagaaaattcctcagatatagcagccctccagttggaatcagctagtgcccctctgtaggatttgggtataggagacaatgcagcagcatgcagatcaagccgcacctttggttgacgaaaaccccgtttgccacgcgtcagcatggtgtggtcatttgcaagcggttgaacggtgactgcattgggaggtgttgtcccctcgataagcggcagcaagctgggcatagatgtgccctcagatatgttccctgaagaaggaccggtagtgcgggctgcatcggtcgttgaaggagtagcgcgcccaggcgctcgtccagatgaagtgctggcggtgtggacgctgtccgcagcagactccggagaggcgactgcggtggaggagccagccgggacgatggcgccagaggccgaggcagacgccgggatggcacctgagtacgcagggtcggttgcagcagacgacgatgtggagccgggaacctcggggcaccgctggcagcaacctggggcgaggggccaacaggggcagcggcgcgcgaagtcgaagtacctgaaacacgtgaaataccacgagaaacaataggtgcatcatccaactccgataggaagtcaaagttagatgaaggaggtgaggaaacttcggcaaaagggaatgaagtctcatcaaaaataacatggcgcgagataataattctattggtagaaagatcgagacaacgataccctttatgttccgagggatagcctagaaagacacaagcggctgagcgaggtgccagcttgtgtggagcggtggaggaaaggttgggataacagcgacaaccgaagacacgaagatggtcataggagggctgaagtttgaaaagggcaaagaagggtgtggtggaggctagagttttggtgggatgacgattgagaagataggtggcagtatgaagggcctcaaccc

SEQ ID NO: 23060 - DNA, 2317 bp, Zea Mays
ggagcatgcagagcagcgccgtcaccggcgataaaggcccaattcgcggtgaccactagctcgccgctgccaaccacgcccacacatgttttatctctagccggcttcacatacagccaagaggccaagaccgtagaaaagccaaggccatcgatcgataatgccgcttctccctacgcagttccgtctcctcccgctgtccctccccgacgcccgccagcgccgcggtattctcccgccggcggcggcagcgtccttgttgccatcgtggtcttgttcgccgccattgtctcggcttcgatcacgggggcggcaggctaaaacgaggctgcgagtcgtctctcccgagacctccagcaccgctgccaccgacgctgcgacgacgaccgccggcgcgccgccagataacagcaagtgggcagagttcgcgacgcgagtgtccggcgagtgggacggcttcggcgcggacttcacggcgtccggcgaccccgtggagctgccggagaaggtggtcccggaggcgtaccgggagtggggcgtgcaggtggtggactggcagacgcagtgccccacgctggcggacccgggcgcgccgtgcgcgctgcactaccgcctggtccgcctgctccccacggtggggtgcgaggccgacgccgccaccgtgcacacctcccaccagcgccacgcctcctccgccgccgccttcgcgtacgccgccgcggggtcctacgtcgccgcgtggcccaggggccccgcgctcgtgctcgaggtggagcactgcgtcgtgcgccccgacgcgcccgccgaggaggccggcagggtccgggtggtgcagaccgtggcgctgggcagggaggcgcgtctccgcgggctcaaggtcttcgccgagcagtggtacggcccgttccgcgacggcgagcagctcggcggctgcgccgtcggggagaccccgttcgcggccggggagaagctcgacgtcgccgaggtgatcgggcagtgggagaccacggacgccgccgccgcgaggttctccggcgacctggaccccgagacgggaaagttcgcggagctgtcgccggaccagccgaggaagctggtgagggacgcggagggcgtcgtgacgctgccgaagcagctgtggagcgcgttcaaggagctcggcgacggcgagttcctgtgcgaggtcggctgggctctgggcggcggcggcgccgtcacgtcgcgctgcgttctgtccaaggacggagacgtcaaggagatcgctgccgcccacgagcgccgggtgtcggagaccacttgacttcggggccaattggccatacccgatccaacagagaacaaaacgcgctgctcgatgagccaactcaatttggtatcttcgaatcgaaggtacaacgactgcttggccgtctaacctcaacactcttcgccttaacaatcatcatttagacgattgcaacatttctgttcatttggccgtttcatgcacccggctctgcctttccctgctacggctgctttgcaaactggtttcccgctgcgtgcctagcaactgccaaactggtctggctcatggagcccagactgcaaagacagcggctgccagaacatgcgcctgcaggcgtagagcgtaagcacaaaacgatcgtttatacggcactgacactgacaggtcgtgtggagaaacgatgaacacgagaagagaacaaaatctgtacatggcgagcgcatcagtgacagtgtacttgaggtgcatctctcaaggttacattcagagtggtttccatttgttgccacccaagtccaactttgctgccttgcatcatggctacgaattcggcgtagtcaatctgaccgtcctgaaaagcagatgcaagcaaggaacatcagtgcatgcattagttaaacagcacaataaaactcggcataggcactgttactacctggtagtcccaacaactgtatcgtggttttcaccatatatttaactctgtaacgtactcctatttactttctcctaccctttatttatggttgctgaaatcgacagctgtgggttaggtgtgactatgtggttgatgcccagacaccaaaggtgtttatatattctataagtaaaatgtcattcaggataaggaaccattgcaaccttttcctacaaagcaaccccacatgactcgaaaggtctagaatgaggttgacatgtttaggaacccacagtgatgaaaattagtgctaaaactcttttggcattatacggtggttaaagtaaataaggcaccaacttacattgttttggtcaacttctaaaattatc

SEQ ID NO: 23061 - DNA, 4113 bp, Zea Mays
cactttcaccagctctcactcttatccacccgcgcgcccaccgccgcgcgcagcaccgcgccgcccacccgcggccaccccagcgccccaaatgccgctccaaccctagcctctcgccatgcctttcgatctcgggcggccatgggaaactgatgccgctcgccggtcgccgtcgcgcgggaggacgtcagctcctcgcacttccccgcatccacctcgtcatggagctctgcgagggcggcgagttcttcgaccgcatcgtcgcgcgggggcactacaccgagcgcgccgccaccaatgtcactcgcaccatcgtcgaggtcgtccatttctgccatcggcacgacgtcatccaccgtgacctcaagccggagaacttccttttcgccaataagaaggagaactcgccgccgcgcagcgcccctctcgatatgccgccctgcttcctcctctcctcttgatccatctgccatcccatccccgctctgccagttgcccctcgcttcctcttcggctcttcatccccctcgatccgtcgcccgtgcttcctcctcactatgtcccgtcccctctccatcttgtcgccctgcctccccgcgtctgcgtctgcgcctgccttcggcgtccagagccatatccgcgttggcctccacctacgcacccgcctctagccataagagctcctcccgtgtctgcctttagagatctgctacctccacatcggtgtctagggctcctccattgcctagatctactagagaggcagatgaaagtatttccgtctcatcaactgtgctgaagaggaggaaaacacctcacttgttgaagggagcagtggagacccggaggaagatcatttggagtctgcagctactaatcttcagcctggcagtgacacttgcattgcaagggaagagttgccagatcagaaggatctggtgaaactgcaagctgttatccgtggacatctagaggcggcccatgcctcacggccaaagcagatcagttaggaggataaaagaagacactaccttggcacatgcctgttgtcacaatggacaaaagaagattagtgttgtgtgagatttttttcattcctttgatctattgcatgctatttgtaccctaatcgacaaaatagatgagactcaattcaggagcaaatcaccagtcctgttcacagtccaattcactatggctaaaatatcaaacttatgctccttgaggtttgttttttccttatcttcctttaatatctgatgactgatggactggtgagttcatgatctgcttcatgcttttccttttatatatggtcactacctcactggttagttcatggtgctttttgtctacttctttgcccaaaaaaaatcccggggcgaatttcagcatgcttttcctgcttccgctgtgcaaattcacaggatgcgtgggaaatgtgttcttgtttcgtcgggtggtgttcttgccattcgttttagctcaacacaaaacaaatgcttcttgttcttcaggtcgccctgtgtttctttctcgccagtttgggccatggattctggtgtgcatttgttcaatatatcttagtatcttatttaacaatcagtacttctctgatgctcaagagatcaatttactcaaagtagcaaactgtatcatagttgtatactttatcaaacgaggaacctgatgcttgtagtataagcctcattttgttccaaacaagacaggcttcggatacaatcacctggaaatcaatcagtaaacttttgctattcagttttttaaataaaaaatttaggccttacgactttcctcgcaatgtgttcacatgtagattaccttattgcattgcctacttttgtccgttgtgtaaaccaatcttttatcatttatcaaatgattttgctcttaacattaacaaattatcgtttggtcatatgcaactaatgacatcacattaccaagattctggggacccatcgctaccttgtgtcaacagtagactgaccagatcaggtaccattttgaaacctgtgtacaatttcatttctcaataactggccgaacataaatagccaaggcatgggtttatgccaatactcataggttaaatgacactttggtcatatgcatagttgccaccctcaaatgcctatctcatgatagaagtaaatggtggtctaaatcaacaacgactttctataagtaccatgactattattcttgaacaaatgtgtgctcatggttctgagtagatattaccattgccattgttttatatggaagtccagtgccttgtcaatctttggtccacgagtaagtgttttggatattcatgttagtgtacactgtaatcaacagagctggttttctttaacagttttgttatgaaatcatggaactggcaacatgatagaatttttcaaggaaaaaaaggtaatatattaattgtgcagcgtgccaatctaatatgagttatattaattgtgcctagaacctgtctagacaatctggagtaatatattaattgtgcagagctgtctagaacctgccgaaacaatctggagtaatatattaattgtgcagcgtgccaatctaatatgagttatgttctttttggtgttcctttcaagggaaacgctcggcggcgaagctaaagcagagcttgcgctacacgcgctgcgagcagtttctgtctaaagggcaaggtctgatctcatggaagagacgacgataacatggacactgttttctaaatggatcagtatttttggtatatacacatgcttttactagtagaggagtatttattttcatttgtagcagccaaggaacttgtgcattccttatgaatcatgagaagaccatgaagatgcacacaaatttgcttgacttctgaccagtaataattagcgaaagaaagaaaatccagaaccatgaatcagcttgatagcagtaacaaatttgcttgacttctgacgagtaagaaattggcagcaagttcagcaggggccagactaataaatcagcttgatagcatccttgcagcggtgccttggactttggcggttagaagaggtttataattttatatgatgaaattatgtgcatcttcagttgtttttgcctcactgctctgtaaggacatataaaattggtatttgtactttctaaggttctccttggaatggtagagttttacagggaaccttccatcatcagttgctgacatagctcgaactcgacgtttcttcttcgccagttgcggctctggataaactcgaagctgacctatccaagttcgacgacgggcccttcttcctaggccaattcagcttggcggatgtagcgtacattacgattctggaaagggttcagatatactattcccatcttaggaactacgacatcgccgaaggcaggcccaacctccaggaattcatcgaggagatgaacaagattgaagcgtatgcgcagaccaagaacgatcctctgttcttgcttgatcttgccaagaaccatcttaagattgcctgaagatgtgacaaagcagcattagtccgttgatcggtggaagaccactcgtcagtgttgagttgaatgtttgatcaataaaatacggcatgttgttgctgactttggacttgcaaagttcactactgataataacacccatgtttcaacaagagtaatgggtacttttgggtatttggcacctgagtatgcagcatctggcaagctcacagaaaaatccgatgtattttctttcggagtcatgcttcttgagcttattactgggcggcgaccaattgacacaacccaattggcactgcttgttataagcacatatgtacttccatttgcatgttgtataatactaataccaattgcaaaattatagttattttttctacccttgttagttaataagcatatttgtggtcaataggttgtattcttattcttgtaaccgtgttaattaatgttatggacttgtagtcttgtattaccttgtgaatatatctgtccctgcctgccatgtgaacgtgcttagcctggaatttgtgatatgtacatatatccatgtgtttgaaatctgtattgtatgtg

SEQ ID NO: 23062 - DNA, 2967 bp, Zea Mays
ccgggaacttggtggctgtgatgtgatgtgtagtggggattggtacaaccttgagaaatcaaaacgtgttaaagcattcaggtgtggagagtttgatgcctgtattgagaaggcagaggctacgcaagggactcttgtgaagaaaagagagaaatatgcacggagagaagatgctgttcttcatgcacttgaattggagaggaaacagtttgcatcgaagtatcagattcaaggtttcagacctggaccatctggtaatatttctgcttgcacaaaacaccgcaaagaccttggaagtactcgatacaagagtaaaaagagcaagaattgcaaagatgtatctgttcctcctgacgtaaaaaaagaagtgggacaatgtttcctacatgctggttcaaagagaaacttttcagaatctcttactcaaggaaatgttgtcagtaatcacatgggtaatttctctcatttgagccattctcatggaggtgacactttagagaacaaggagagtacaattgtgaagaaaaatagatcggatggaagtgattttgaagactctcttgtttcaaaatcagatagacgcagaccgatttctcaagtattgcagagtagtgaaaacttgcttcctcacttaaagcaaaacaatgattttggggctttgttaatcaaggagaataataatccttcacttgccacctcccggtccagaagaaataaatatacatacatggctagtgattctggtgaaactcagagtcatagtgatttaccttctataaagatgactgctactggagctgattttgagaatgaaagctatcttcggcatactggttatttttctgaggagcagacttcttctgacttcgttgagaagcaagtaactgagtcttcagagagggaatgctcagaaagtgagactgaagaggatgctgaacttctgcaaaatgcaagtgtgattctacctatagaatcacatgctcctgatccgtattctgttccaatatatgagaagttcaagcatgtggattatggtgacaatgaggtggcctattctaattatatgccccagttgaatgaatctgaggaagaggatggttcttctgagctgggtgtctctcagtggcacatgaaaggtaaacgtaacaatcgtaatgccacaaagagatcagtggacatgagagatggaaatacatggttaaaaaactacaatgggtcattaaaagggtctttgcataacacaaatgatgggaatcccagaaaagaaggtatgcacacatctggtgaaaagttttttgaggaaagcatttaccaaattaaagaggaacccagttatgatgattctgatgaaactaatgtatttgaggacacgagccattcagaggctaacttgtactatggtaaaagatgcacttcattcttgagaaccacaagagatcttagtcgaagatacagttactttaatgactatgagaatgactcttcaaatgtttctcccctaaataaggacactgaacagatgtaccatgttgatcggaatgcgtattgggatggaccttcattttaccaaacgaagttgacttcacgttttggtggcatgaggccaatgttgttcaatgttaacctcaaagttcaggctagctaccaaggagagcatgtccctcttgtctctttaatgagcagacttaatggcaaagcaattgttggacaccctatccaaattgaaatagttgaagatggttccacagatcatctgatattatgtggtgacagtggtatgcaagagagctcagctgctccacctgcttggccaacaggtagaaggactgccatgcaaagagttccccgttcaaatccatcaggagcactgttggatggcgataatgaaggtggtcttgtgtattctgattatgagatgaaaccaaccaagttgtacacttcttccaatcatcaggttaaggtgaataagaaaagcagttcaaatactaggaggtcagtagctaagtcccaaaagaagtcatccaagaaaacaaacctctcaagccagaaacgtagagttctctcttccatttccactgcaaaaaaacatcatggagaaggtggccgagcaaaggcacattggcgtaatgacatattgggtggtttaatcagatcagaaggagttcctctagtgacatgtgtcccaacgaaggttgtgttcactaggatattggaagcagttggcaggccacctctatctgtcgttcaccgtgttagaatgactagtccttcagtgcgagatcctccgtaggcttcaactgtagtgctatatatggttatatgttgccagccattgacatgcaagtttgatgtacattctgttaattgaagaggcagaccattcaatcatccggtagcacctgtgaagagtcagattgatatggttgctctaaaataacttggaacagctgagctcttattagcagtggtaacctgtaaaaatcaataacgcttgtgtatttctgactggagactgatcatgaatgcttcagagcagcttgtgtatttctgactggagacagatcatgaatgattcagagcagctgagccgttgataccatgaaggggtactctttgatgtagctaggagtctaggactggtggctgtcttttggtttcgtcacaactgtttactgtaaagtactaacttaagcattttaggtgtcaatttagttaaaacatttgtgtcatcatatatagcaataggtcataggttttctaatgacatgtataatcccccaattatatcctgatgtatctgttatttgttgtcgagatgtagttgattcagctgtatgtttagaagcatgtgtatctagtcgatgtaatatatcagagcaagtactccaacatccaaatggtgtaacaacctagtcatccatgtgaagattcctccatagacattgtgaacaaaaagatcattccata

SEQ ID NO: 23063 - DNA, 2114 bp, Zea Mays
ccgcatccacacccacacctcaccccccaccacacgcacgcacgcacgcaccaacataggcaaaccattcgttctccctgctgccgttttattaggaaactctcccctttccgttttagcttagtgtccagctgcaaacttctccccccagcttctcttgctcagtgtgcatctctctttgtatttcactgtgctggcctgctttgttccttcgttctggttactattggttgctgcttccaagtgacgtaccagagtggtggttggcgtttcagtatgatttgataagtttcaggcccttctttttttaaaaaaaaatcggtatctagttatctacaacgtttgacacctcctcccggacctcaagatgaccggcaacgcgtcttatcagcatctgggactgggagtcgacgccacgatgcgcagctgcttcgccagcggcgacggcagtgttatcagcagcgccgacgcgcccttcttccacgtcccggagtacacactgcacggcggcggcggctttgggtttggcgaacccgcagcggacgtcgccgcctcgagcttcttggcggatggttcggtgctgctcgccggccagctgctccgtgccaccgcactgcagagcgtgtcgccggaggagaggcacggtgcctactacggcgtcacgggcgggtcgtcgtcgtacggcccgtcgccctgggatgtcaccgttgctcacgcgcccagcaggatgaccaagcagcctgtcgctggagagccggaaggcggctggatccacgagtcttcgtactactgcccggcgacgtggttctctggcgacggcttccgggacccgttcgccggggcggcggcgagcgagttgtcgctcaggctgcgcgctgggtcctccccgacggcaggtgcggcgagcgtgagcctgccggatcagtcctcggaggtgagctgctccggcttgacgcattggagtagcggcggcggccccggcatgttccagcttccttgcggcggcgccggacaggtggcggtggcggcacgtccgggccccatgcacttctcgcaggtcctgtcgcggtggtccgggtacgcggacgtcacgcagcaggtgttggacgagttcgtcatccgcctgctgcaagacgtggccgggttcgccggcggcggtgaggcgagctgcccgctgccatcgtcaagttattgctccaagacgacgtcatccaacccgaacccgtcggtgtttgttagctcggaagagcaccacaatgagctcaagaacgacttccagaaactgctacagataatggaccaacggtgcaagcaatgcctggacgagatccagaatgcggcgtcgaagtacggcagccttgtgcgcccgggcggcggcggcggcgccctctcgacgctgtttgcgcagcgcgcggtgtcagcgacgcaccggaggctcagggcgcggatcaccggcgagatcgcggcggccacgcggggaggtaatcagccgtcgtcgtcgtcgtcgctgtcgctggccgacagggagcgcagctgggagtcggccttcatccagaagcactgggcgctgcggcagctcaggcgcggcgaccagcaatcgtggcgcccgcagcgcggcctgccggagaagtccgtggccgtgctcaaagcctggatgttcgagaacttcctccgcccgtacccgagagacaaggagaaggagatgttagcagccaggagcggactgagcaggagccaggtctccaactggttcatcaacgcccgcgttcggctgtggaagccgatgatagaggagatgtacgaggatctcaagaaggcctccgcaggaataatggaggcctgaacaattaagtcagcagcagggatgcaggtatataaagataagatggctgtttccagatacaagcatcgctgcatgccaccctgcgatctacccatatatatttgtaatctccctggcgtgtttatatagaactgccggagtctgaatcccgtgccggtagtgaagccggatcatcgccagttcatttaatttggcgcttgcatgctgttggtcgagtggaactaagatttcttgttatttatttaaccttaaaattccgatcaaatgactc

SEQ ID NO: 23064 - DNA, 947 bp, Zea Mays
gatccttccgccgcctccccctcctgacagagcagaggcagagctgaggcccggcctggccgggcttcggcggcccagcccaaataacccgacgggtccgcatcctgagctccgcctccacacaccttggcacctcgccctcgcctccagctccgcacgtcccgtcgcccgcttccacctccacgcgacgcgacggctcgccttcacctcctcgccgccagacgcgcccgccgccacccagcgagccggcagccgcccgctatcccaggcttcgttttcttgttggctccgccactgtgacagatggctgcggggggcgggcggtgcttgctcgccttggcgctcgccgccgcttggatctccggcgcggtggtcgccgcctcatcgtcgggtgagcaggaaggcggaagccgcacacccgtcaaatgcatgccctgctctagaacgtacattggtggtgcacatctggacaccttgacgggccagcttgctcagcgtcgtgacatagtggaaatgtctgattctggtgaattgtgcaaaggacttgctgatgatgtcgaagttcctatgctttcaaaactacgccggcaactggttggtaaaggttctcaccgccgtttagtctattctgtggattttggtgcccatgaaggtgctatggttaatttccttgatcactacgatgcccatctggtgatatttgaaaaacttcctgatggagtgtttgccgacccatttgagctacagcattttgttgagcgcaaagttttcgttgatgttgctgtttttggagacgccaaccttgaactgcccacagctctatccaatgggtcatctgttgagatccattttgatctcaggcgaatcatttcaatcaactgtaaccttgtaatagagatgcctctccatgctagatacccggatggacatcaaacaatgcatgccgg

SEQ ID NO: 23065 - DNA, 322 bp, Zea Mays
  misc_feature (1)..(1): n is a, c, g, or t
nggaataggacgcacctgcagccacggagggcgacgccgggggcgggggctcggtgcggggcctcggatgtagcgaaggcgctcggctgaagccggcgaggacagggccggagtgtcgggagagacggaagagtggcgatgaggtgagcggagatggcgaccatggcgaagagacgaggggaatggaggagataggagagcactggccgcagaaatggatctgttgctgcggtttgtcagtttgctgtggtggcctctagctgtagccactgaaagatgtgcagtacctgagtgacctgatttcctcctgtttcagttcagg

SEQ ID NO: 23066 - DNA, 2967 bp, Zea Mays
ccagtcctttacctttttccctcggagctctctgactctctgagattttttttttgtcttcatttcaaattttgtggtttcctcccacattcccttcccccgctcccctccaggctccagccgctcgcttcgattcgcttcagctctgccttcccgtctcatggccacctaccagcccacgcccggtgacgccttcccagcccgctgctgactgcaccgattcacccacagttggccttcaggcaaccctagcgtcgccgatccgccgctccggcgagatgccggtgggccacatcgccgtctctcccgccgccgtctatggagaacagggatagcttcactcgccccccagcgccctcctacgcccacggaacccaaaccgctaagggcgtcgcggtccctaccggcggggacacggccgccaccaacctgacgtcgtcgtcagggttgtcctcgtctctcacgctctcccctccccacttcctgcaacagattcatgcagctgtcaagcggcagaggcctttcggtccaatgcagtctaaacttccaagagcaacacgggtcctggtttccggaggtgagcgtgcaaataaaattggtgccaacccttctgtttcgaaagaccaggaacgaattgttacgcagcctcagagaggcatgttgggaccctctatgctgccaaatgtgacgcctgatcaacagaaagtcgatagcacttctaaattagggtcctctgccccagatgagttgatgttgacagcaccctcaatgctaaaaagtaccactgatacctgtgcacaacgtgttggccagcagaaaaacaaggctaatctgttgatggatacagagaagtcagctttcgatgctttgtcatctcaaattacatcatgcaatgcattgatgggggaaagtttcaagaaaggacagcttgattcggttgttaatccacagttgacgtcacaaagtgataatatatgcatcactgtggatagtagaatggacagtatgttgtcttatctacattctgtttcattgacggcaggagataattttcctgcaaatcaaggagctcagaatgatcaccagaagaaccatcaggagcttcaaactgttgatatagcagctgatatggatatcgaatatgatgcgtctaatttgtctcggagagggatccaagaggctcgtaatcagaatcatggaaagcatatgattcctttctctgccattggttcatctgtgactgctatgtctcttcactcgggacctactgtccaaagttcacagactccacaggttggcggatacacttcaccagtgcagataccagaatctgctgtagaatcctccaagggtgcactgggccatggtgctcaaaaggagcatgctggtgcaactggtgttggtgactggaatccccacaaccagcaggttcaaaatctaggtaatggtgccacggacaaagctgtttctagcattggcagattgcgttctgaaggattacctgcaaatgatcagtctacatctgccagggatggtggtggttcccgaccaaacaagggtgagaaggagcgccgtaaaaagaattatgatcctaatgttttctttaaggtgaacgggaaactttatcagaaacttggtaaaataggatctgggggtagcagtgaagtacataaagttatatcatcagattgcataatatatgccttgaaaaagatcaagcttagaggtcgtgattaccctactgcatatggtttctgtcaagaaattgagtacttaaataagttgaaaggaaggagcaatatcatacaaatgattgattatgaggtcactgataaaagtctacttctagaaagtaccgtgtcacccagggatgggagaattaaggatgatcactacatttacatggttctggaatatggtgaaattgacttggctaacatggttgctcagaagtggaaggagaggaacaactctactatgaaaattgatgaaaattggctgcgcttttattggcagcaaatacttgaagctgtcagtacaatacacgaggaacgaattgtccactctgatttgaagcctgcaaactttatgcttgtgaggggctcacttaaactaattgactttggcatcgccaaggctataatgaatggtacaacaaacattcaacgtgatgctcaggtagggactctcaactacatgtcacctgaagcgttcatgtgcaatgatacagactcggatggtaacattattaagtgcgggctcccctcagatatctggtctcttggctgtattctttaccagatggtgtatggcaagacaccatttgcagactacaagactttctgggacaaatataaaggagtgactgataggaaccacaagatcatgtatgaaccagttgacaacccatggctcattgatttgatgcaaaggtgtctcgcctgggaccgaaatgaacgatggagaacacctcagcttcttaagcacccttttctcaatcctccagttccaagggatttacctccctctgacgatgatccatataggttgctcattgagaggatcagagtccactgggataacccaatggttcaaaaacttcgtagtttaattgaagaactcgatggggatcagtaaaaatgggtttttaacaatcctgattgatactcgatctagggcctgggtagtggtggcacaagtgttttagtttctgtattgttcctgattgatagggtactgttgtaatttgtaattagagagtggcggcatcggttggagacgtcggagcatattatgatgccctggcatttttgcttcctcgtgtttggaggttgatgtgacactttgtcagaaatggcggctagttaacgttaagagtcaagatatttttgttgtctgatcagtggaagcatctccaggtgtaaatagttgaaccaattggtagtttgtgttttaccatgaatcaag

SEQ ID NO: 23067 - DNA, 3802 bp, Zea Mays
tggggatctagctatattaggcttggaggtctgtgctgatacgctggtaggaaatgagatgatgaggggtatttctggtggtcaacgaaagcgtgtcacaacaggtgaaatgcttgttggtccggcaagagctctgttcatggatgagatatccactggactggacagctcaaccacataccagattgtgaattcccttaggcagactatccacatccttggtggaactgcagtcatttccttgctccagccagcgcctgaaacatacaacttgttcgatgacattatactcctatctgatgggcatgttgtataccagggcccccgtgaacatgtgctcgagttctttgagttcatgggcttcagatgccctgccagaaagggtgttgctgacttcttgcaggaagtgacatcaaggaaagaccaggggcagtattggtatcggcaggacaggccataccgctttgtgcctgtgaagaaatttgcagatgcattcagtatattccacgtgggccggtccacacaaaatgaactttcagagccatttgataggacccggagccaccctgctgccctagcaacttcaaagttcggtgccagcaggatggagttgctcaaagccactattgatagggagcttctactcatgaagaggaacgcatttatgtacattttcaaagctgttaaccttactgttatgtcgtttatcgtgatgaccacatttttccgtaccaatatgaaacgagacgcatcttatggaaacatctacatgggggcactcttctttgctctcgacacaatcatgttcaatggttttgctgagcttgccatgactgtcatgaagctgccggttttcttcaagcagagggatcttttcttcttccctgcatgggcctacaccataccttcatggattgttcagatccctatcacatttttggaagtcggggtttatgttttcaccacatactatgtcattggatttgatcccaatgtgttcaggttcttgaagcaatatctgctgctccttgcactcaatcagatgtcatctgcccttttccgcttcattgctggaattggaagagacatggttgtgtctcatacctttggccccttagcactgttggcttttcaagcactgggtggctttatacttgcaagacctgatgtgaagaaatggtggatttggggttactggatctctcctctatcgtatgcacagaatgccatttcaacaaatgaatttttggggcacagttggagcaaaattcaaaatggaacaaccgtgggaattggggttcttcaaagtcgtggtgtctttactgaagctaagtggtattggattgggctcggtgtcttggttggatatgctctcctcttcaacctgctctacactgtagctcttgcagttttgagtccattcactgattcccacggatcaatgtctgaagaggaattgaaagaaaagcatgccaatttaactggtgaagtcatagaggtccgcaaggaaaagacatctaggaggcaggaattggagctgtcccacagtgttggccaaaactctgtgcatagcagtgaggattctagtcagaacaggaagggaatggcactcccatttccaccactatcacttacttttaacgacataagatactcggtggacatgccagaggcgatgaaagcgcaaggagtgacagaagatcgtttgcttcttttgaagggcgttagtggttcttttaggccaggagttctaactgcattgatgggtgttagtggtgctggaaagaccacccttatggatgtcttagctggcagaaaaactgggggatatatcgagggagatattaccatctcaggatatccaaagaagcaagagacgtttgcacgcatatcaggatactgtgagcaaaatgatattcattctccacatgtaacagtgtatgagtcactcctattttctgcatggctacgccttccttcaggcatcaacttagaaacaagaaagatgttcattgaggaggtcatggatcttgtagagctcacatcactgaggggtgcacttgttgggcttcctggagtgagtggcctgtcaactgagcaacgcaagaggctaactattgctgttgagcttgttgccaatccttcgatcattttcatggatgagcctacctccggtcttgatgctcgtgcagctgcaattgtgatgaggactgttaggaacactgtcaatactggaaggactgttgtttgcaccattcaccagccaagcattgacatatttgaagcatttgatgagcttttcttaatgaagagaggtggagaagagatatatgttggtccagtgggccagaattcatcaaaattgattgagtactttgagggaattgaaggtattagccagataaaggatgggtataacccagccacgtggatgttggaagtgagctctagttctcaggaagagatccttggggttgatttcagtgaaatctacaggcaatcagaattataccaaaggaacaaggcactcatagaggagctgagcaccccacctcctggctctagtgacctcaatttccctacacagtactccagatcgttctttactcagtgcctagcctgcttctggaagcagaaaaagtcgtattggaggaacccaacctacacagcagtgaggctactgttcactgtagtcattgcgctcatgtttgggaccatgttctgggaccttggacgaaaaactaataaacagcaggatctgttcaatgccatgggatcaatgtatgccgcagttgtatacatcggaatgcagaactctggctctgttcaaccagtggtggtggtggagcgaacagtcttctaccgagaacgagcagcgggcatgtattcagctttcccgtatgcatttggacaggtcgcaattgaaattccttatatctttgtacagactttgctatatggagtgctagtctattcaatgattgggtttgagtggactgttgccaagttcctctggtacctgttcttcatgtacttcacactgctttacttcacgttctacggaatgatggcggttggcttgactcccaacgaaaccatagccgtcattacctcatcggcgttctacaacgtgtggaacctcttctcaggatatctgatcccccgacctaaactgcctgtctggtggaggtggtacagctggatctgcccagtcgcatggacactctacggattggttgcctcccagttcggcgacatcgcgcatccgctggaggactcaccgacaggccagacggtggcgcagttcatcacggattacttcggcttccatcacgacttcctgtgggttgtcgcaggggtgcacgtcgggctgaccgtgctcttcgcgttcctgttcagttttgccatcatgaagttcaacttccagaatagatgaggacaggaggcccaggccattggcaatttttgcattcgtttgttggctgtgggtgggtgggtggacaagcatacctgctgtgcgtgtagcatctacggcccatcgattaggctgagcaagctaccatagtaccatgtaacggtgtatagagtttattttgtatttcaagcttatagaattagaaacactagaagttgtaggcgaacaaaagccttgacaagagttgagcctcctgctgccatggccagctgtagctttatacctgtcagaggcacggagcgcttctcagagaatgtaaaccgtatactggcattctaatgaatcagtgggagcagaattttgaccaagtacctctgcagatgtctt

SEQ ID NO: 23068 - DNA, 1240 bp, Zea Mays
ccagactgcacccatctgatgtgttttcaacttcaagtcatgatacatacttacataggtgttccatatctgaggttctgaaggttctgccataccctataaacatcaccacagtgcagtttgccgttggaagtgccattgctttgtttatgtggatcaccggtatccttaaaaggccaaagatttctggtgcccagctttttgctatccttcctctagctatcgttcataccatgggcaatcttttcacaaacatgagccttggaaaggttgcggtgtcatttacacatactatcaaggccatggaacctttcttctcagttctcctttcagcaattttccttggtgagttgcctacgccttgggttgtgttgtctcttcttccgatcgttggtggtgtggcattggcatcccttactgaggcctcctttaactgggctggattttggagtgcaatggcttcaaatgtaaccttccagtcaaggaatgtgctaagcaagaaacttatggtgaagaaagaggaatctctcgacaacattaatctattttcgataattacagtcatgtcattcttcctgttggccccggtaaccttacttacagaaggtgttaaagttagtccagcagttttgcagtctgctggtttgaacttgaaacagatatacacaaggtcattgattgctgcatgctgcttccatgcataccaacaggtgtcatacatgatcctcgccagggtatccccagtcacacattcagtgggcaattgcgtcaagcgtgtggtggtcattgtgacctcggttctgttcttcaggacccctgtttctcccatcaactcactcggtaccgggatcgctcttgctggagttttcctatactcgcaattgaagaggcttaagcccaagcccaaggctgcttgatcatagacctttgcaggtccatccaatagaacttttgaagttatgctatgccattggaatgattagtgagtgccgtagttagaatgatgtttaaagaagagctaccacttcagcagataatttgtgacttgcttgcattttttggacggatttgttcgtgtattaataattttgcagtgacgatacttctgttgtgctgtttataatcttctgaaactgaactgagttgttgcattggactatcttcaatcgtgacactaatttaatagagtagacacgaaaaaaaatactttggtggaaaggtaatatttggaattatgttt

SEQ ID NO: 23069 - DNA, 707 bp, Zea Mays
cggattaagaacatatgatagaagccattggaaatcttccaaaacaaataggtgctgcatgctcaggctctcacgctggctgccttggctgggtccgcgctggtggagtactacgaccaccagcaagggtcaggatcgaaagttcaccaatatgcaaagcagttcctttcatctgatagcaatagcggccaacaaaaggagtagctagccagtgtccttgcgaagtgcaagcagcggagtgggcgttatttcctgatcaaataattttgcctatggcacattctgtggaaactttgacggatctttgcctgcttttctatgcgatgtaagctgctgaaacctgcactcatcaaatgttgtgtatgcagatggtaccatgcatttgtttccctgaatggcttcaaatgaaatgaatgtttttttttatcggtatgcatcatgggacgtcacaacgattttagctgtttgtctaagtcgagttcagcagaatgttctctgtttacacaacatctgagtgcaggctttgatggccaaaaagtcacttcccactgacaacgacaacgagatctaatatccagtcacaggacatcggctggagaaaacctccaaagaacataggcgacaatactttaccataaaatagtgttggagatgccaaacaaaccttcaaaggacacagacttgtaataatttattatataacagtg

SEQ ID NO: 23070 - DNA, 2831 bp, Zea Mays
gaaaacagtggataaaggtaactgctgttggagtcaacactgaatgggggttgctaatggcaagcatatctgaagattcgggtgaagagacaccactccaggttcgtttgaatggtgtcgctactttcattggaatggttggactttctgttgcccttgcagttctggttgtacttttggccaggtacttcactgggcatacttataatcctgacggatctgtgcaatatgtgaaagggaagatgggtgtaggccagacgatacgtggagtagttagaatattcacagtggctgtcactattgtggtcgtggctgttccagaaggactaccattagctgtcacactgacgcttgctttctcaatgcgcaaaatgatgaaggacaaggctctggtcaggaggctttctgcatgtgaaacgatgggttctgccacaacaatctgcagtgacaagactggcaccttaactttaaatcagatgactgttgttgaggcatattttggtggaaagaagatggactcaccagataatgcacaaatgttatctgctgatgtcacatcactgattgttgaaggaattgcacagaacacttctggaagcatatttgagcccgagggtggtcaagaaccggaggtgactggatcacctacagaaaaggctatattgtcttgggggctaaagctgggtatgaaattcaatgaaacaagattgaagtcatctattcttcatgtatttcctttcaactcagagaaaaagcgaggtggggttgcagtgcacctggatggccctgaagtccatatacactggaaaggagcagctgaaatcattttggattcatgcacaagctggcttgacactgatggttcgaagcactcaatgactcctgaaaaaattgctgaattcaagaaattcattgaagatatggctgtggctagcctccgctgtgttgcctttgcctatataactcatgagatggatgatgttccaaacgaagatcagagggcagagtggaaactgcctgaagataacctcattatgcttggaattgtgggaataaaggatccctgccgtccaggagttcgagattctgttcgtttatgtcaggcagctggcattaaggtgcgcatggttactggtgataatcttcaaactgcgagagccattgccctggaatgcgggatacttgatgatcccaatgtgttggagcctgtcatcattgaaggaaaagcattccgggtgctgtcagacttagaaagggaggaagctgctgaaaaaatatctgtgatggggaggtcttcaccaaatgataaacttttacttgttaaggcactgagggcaagaggtcatgttgttgctgttactggagatggcacaaatgatgccccagcactgcatgaggcagatattggtctatcaatgggcattcagggaactgaagttgccaaggagagttctgatattattatcttggatgacaatttcgcatcagtcgtgagggttgtcagatggggtcgttcggtgtatgcaaacatacagaagtttatacaattccaactaacggtcaacgtcgcagctctgataatcaatgtagttgctgccgtcagttctggaaatgtgccgttgaatgctgttcagttgctgtgggttaacctaattatggatactttgggtgcccttgcattggcgacagaaccacctacaaaccatcttatggagagacccccagtagggagaagggagccattgattacaaatatcatgtggagaaacttaattatcatggctttgtttcaagtttcagttctcctcactctcaacttcaagggaataagcctcctgcagttgaaaaatgatgatccagcacatgcagataaagtgaaaaataccttcattttcaacacatttgttctctgccaggtgttcaacgaattcaattcgcgtaaaccagatgagctgaatatattcaagggcatttcagggaaccatctgtttattggcatcatagctataacagttgtactccaggcgcttatcgttgagttccttggcaagtttgcctcaacggtaaggctaagttggcagttgtggttggtatcgataggtcttgctttcttcggctggccgctggcattcgtggggaagcttattcctgttcctaaacgtccattgggagaattctttgcatgctgctgtatctgcaaggggagcaaacaagcccctgatgacgcaacctctaatgataaggaagacaacaagcccgagccttgagatgtcagcaagattgatggaaggctggaaatgcaactcggcttctcatgagaccttgtcatttgctgtagttcgttcgcaactgtatattgtagcttggaagactctgtgccgtggtgcgtgtatttgagaaatttctatgcaaagtgagctggcgataacattggatggcgcagcaaagcatcgcgcgcagtgtttcctaggcatcatccagtgcggctcgtggatgcttttcgtgggtggagctgcctgtgttcgtgccatagcatttgacgagtgggcgcccgctgtcggctttgtgccttgaagcctccgatgcagagaaaacaaggtgagttggaacccgagacgtgtctgaccagcatggcccgtagaaaagtttgccccggccggctaaaatttcccgtgctcgtactttagccgtgcacttgtgcgtccatgtccgtacgtaccgttacgtgaagccgttgccttctctatatttcttgtcagctgtccagtgtattacacgcatgcgcgtttcattgttgagccccacggggccgaggcgacagttgacagcag

SEQ ID NO: 23071 - DNA, 1302 bp, Zea Mays
tcatttgggagggtttcataacgggaaggtccgacgttagtcgttgcttgtggctgggacaccatatcatattcaagcttgataaggaaagtagcttcagataatgtgttcgtcatccagatccaacacccacgatctcgccttgataggtttgatttagtggtgactcctcgccatgattactatgctttaaccgctagtggacaacaagaagttccacacctgttccgcagatggattactccacaggaaccacccaggagtaatgtacttactgttggtgcactacaccaggctgattctgctgcgctacggcttgctgctatagcctggcatgatgaactcgcccctttgcctaagccgttgctaattgtcagcattgggggccccaccaggaattgtaaatatggtgtagatcttgccaggcagctcataacttctctgtataatgtgctagatagctgtgggagtgtcagaatctcattctctccgagaacaccatggaaggttgctgatactatatttaaagaatttgctggacatcccaaggtctatatttggaatggtgaagaacctaaccctcacatgggacatcttgcatgggctgatgcttttgtcataacagcagactcgataagtatgttaagtgaggcaggtagcacagggaaacctgtttatgttattgggaccgaacactgtaaatggaagttttcggcttttcacaagactctacgggagcgaggggttgttcgcccgttcactggattggaagatatttcaaatagctggagctaccctcccctaaatgacgccattgaagtagctactcgtgttcgtgaagtgattgcagaacgagggtggacagtgggatgatgtgatcataagtagctctctgttattctgtctaactttggtccagatatgatatatacggtaaactatagagtttggttagcatcactgtggattcagtttgtgtcgtttggaaaaaaaaaggagagaataacatagccatggaatggcctgtacaaaaggtgaccctctctttcatggtacacccccaagccaaaattttgagtaactgcacagctccgggagatttttttggctactggcaacatgttgcctgatgtaaatttaagctgctagaaggaattggagtaaatagagttgataatgagaaaatttgaagctgatgcaacgtttcgggttttgtatggttgtatgcttatgactttaccctgttttgattaaatttgtgtatgatgaaacatgcagaacccatcagcttttacccctttt

SEQ ID NO: 23072 - DNA, 1057 bp, Zea Mays
attctgcacactgccttttgtatgtgcaactgcttggtgtgcatccctgtggaaggcacacgtcggtttcgtatcgtgcgatcatgggatcaagatggatatagagttgctgaagttgaatggttgaaagatatacctctgccagaaggttcacaagggagaagagaactaatggaactggccaatggagcttcagagctggccagggcatatatcagacatgctagagataccgtacggactgcaaggcgaacaagacatctggatcttgagggcatgcctgggccacaggacccggaaaaatttagtttctggctagccaacttgataagtttgaggccctcggatagattagatacgttacgccttcgcgacactagggagagaatttctagtagcatcagtttgctccgtgattccgaacaaggctgccgtgtacaatgacggaaacagtacaagaatcgtttccacagaccaattcgttcgtctaggagtatatcgatttggagctactccgtgattccgaacaaggctgccgtgtacaatgacggaaacagtacaagaatcgtttccacgtaccaattcgttcgtctaggagtatatcgatttggagctacaccgtgattccgaacaaggctgccgtatacaatgacggaaacagtacaagaatcgtttccacagaccaattcgttcgtctaggagtatatcgatttggagctagggatgtaatatggttcagaaaatatctgtccagatccagactcgaagatggtgaatactggttcggatagaattttcggatatccggacttttttcggataacggatataaatacggatattttattcggatattgaattcgaatacaatatgtttgatatctgtcggatatcaaatatccagatattttctcggataaatcttctcggatatccggatatcttatctggatagctgtgtgtattttgttgatttttttagaaaaaatttaataatacacaaatatcctcagaaattcatgaaaatttatggaggcataccacatgtccacatata

SEQ ID NO: 23073 - DNA, 3030 bp, Zea Mays
aagcggctcttccacagggcactcggagtaggaagaggaggaggaggaggagcctcagcaccagcggcatcaccagcggatgccatccaaatggacgcgcagatctcgactcactgcggggtgccatacacagcttcactactcgccttcgatcccgtccagcgcctcctcgctgtcgcaactctggatggtaggataaaaatatttggcggtgataacattgaaggcctccttatatcaccgaagagtgtgccgtacaagtttttgcagtttattacaaaccagggacttctggttgcaatttccaatgaaaatgaaatccaggtatggaatcttgagttcaggcaactattttattcgtcacagtgggatgtcaacattactgcttttgcagtcatagagaggacctttatgatgtatcttggagatgagaatggccttctttctgtattgaagtatgatgtagatgatgggaagcttcaaataatgccatacaatgttcatatccattctctaatcgaaagatctggtgtttcgttacaggatcctcaacctattgttggaatactgatccagcctgacacttttgggacaaggttgctaattgcatatgagagagggttgttggttctttgggatgtatctgaggaccgtgcagtttctgtcagaggctatggggatttacgcatgaagggtcaaatcaatggtgctcagggggattctggtgaagatcaactaaatactactattgatgacagtgaagaagaaagagaaatttgctctctttgttgggcttcaagagagggctcaactgttgcggtgggctatataacagctggcctcagggagtcgtaggcttcctgttattgtcttgcattggtctgctgggtcagcagtacattctaataaaggagggcatctttttgtttatggcggcgatgatatgggatctgaagaagttctcacggttcttagcctggaatcaactgctggattagaatcagtgagatgcatgtcacgaactgatctcaaacttgatggatcatttgctgatatgattcttattcctgatactggggttcctgataaaagcagaacttctgcactttttattttgacaaatcctggacagctgaatttttatgatggtggctctctattttctgtgcaaaactcaaaagagggaactcctcttcctgaagcacagaaatttccagtcgcaattcctacccttgatcccaacataacggtcactggtctttattcgctaaccgaaagtgaatttccaaatatttcactgaagaaattttgtgctaggaaaaatgctgggcatttcatatcagagaacatgaaatggcctttgactggtggggttccaaatgagatgtcactggacgaagatcatgctgttgaaagaatatacattgcaggctaccaagatggttctgtgagaatatgggatgcaacatttcctgttctaatgccaatgtttgtcttggatggaaatgttgctgatgttaatttggatggagctaatgcttctgtatcatctctagccttttgttcattaagcatgactttggctgttgggacaacaagtggtctggtgcgcatctataaactccgagaacacactgggggttcaagcttccattttgtgagtgaatttaagcaagaagttcatgttgttcatcatgggaaaggatttcattgttatgttgcctttttgtcagcaaattcctcagtgctatctctattatttatggcttcaggtggcctccttgctgcaggctatcagaatggtcaggtggcaatgcttgatccaagtcagttatcaattctattcactgtagatggtgcatcaggaacaaattctcctgttgtttccttgggcatctacagtgttgctgcatctgctgcaaaagcagatcaatcaaagaaagataatcctcaaaatgcaacgttatccagagatgttcttctttccttgacaaaggatgctcgtgttactgtacttgactgtacaacggagtcagacgagacacaaacccaattatcagaggacaaaattccaagtcaaggtcagacagggaaagatggcaatgatcttgacaaaatacaaacccaaggaattgaaaagcacctgaaaaatgcttcccagctttcgcaaaatggtggttcagattcactccttgtggtgtgctgcgaggatgttttgcttttgttatccctggcgtcattgattcagggaagcagcaagcatctacagaagacgaaacttgcaaaaccttgttgctggtcagcagttttcaaaaacatggatgacaaagtttgtgggctgatattagcttatcagactggcactatagaaatgaggtttgggccagatctggctattgttgctgagacctctttgatgtcattattgcgatggagttacaagacaggcatggaaaaatccacaagctcctcaaatggacaagttactttggtaaatggatctgaatttgcgattatctctcttatggcctcagagaatgacttgaggattccagaatctctgccatgccttcatgacaaagtacttgcagcagctgcggaagcagctatgagtttctcaactgatcagagaagaaagcagaatccagcagcagggattattggtggcttcattaaaggaatgaaaggcaaggctgaagaaaatgcaaaaatgagagaaagtttgacattgcgagctccaagcgaacagttggagtcaattttctcgaaagaaccatttgctgaaccttcaatacccgaccttgatgatccgatggaagaactgtcaatcgatgacatagagattgacgatgaagtagcagtagccctggcacaagcagcatcgtccacatcccaagggaataagagaacagcagtggaggaggagagagcgaagctgtttgaagggtcaaacagtgcggataaaccgagaatgagaacgcagcaggagattctaaccaaatataggtttggcggggtccattgcattgc

SEQ ID NO: 23074 - DNA, 1552 bp, Zea Mays
ctagcggagggagaaaagaatagagaggaggcttgacaccatgatagaggatgttagttgccttttgtgagcaaacagagggtcaaaagttgctggaagatttaccagtgcaggcgatgttggagactctcacaaagagatacgagaaggaattgatacacccaattcaaaacctgttcagtggagaattagcccgtgctatgcttattcagattcaaaagcttaaactggaccttgaatcgggactactggaaatggatcagattctaagggcaaatgctataaactttgctgttcttgcagcgcttcctgcttttggtctttcacttctgttgcttgtgttactgcgagcatgggttcagcgtgaccatggtgctgagggaagaggtaatattgcacgatgtcaacggaggctgcttcttgttgatgtagagagaaggcttatggagtttcaacattacagggataatggaatggtctatggcgtttatttgggagcgtttggtagcgctccgagaaggcgagaaccagcagcgcgcctcttcgaccactagcgtcacgtgccccgctctctgcagcaggaaaagaccgataaagcttcatcgatcagcaccattcgcccgaggccggtgtataagagcattggtgagaagtatggagtgaagtactcggaagacgagatcctgatgagataccggcgggcatacgagcaaccatggggtggatcacgtctcaggtatgtggatgatgggagaaccttttggcagcacatagtcacttcttctacaggatgttcagatgcacagtactttgaggaactctatcaatactttatgacagaaaaggcctggaagctttgtgaccccgatgccgaaagtgtatttaaagctttgaggaaagctggcgttaaaactgcagtcgtctccaatttcgatacccgtctacggccactcctgcaggccttgaaatgtgaccactggtttgatgcagttgcagtctctgcagaggttgcagcagagaagccgaatccaataatattcttgaaggcctgtgagttactgggcgtgaagcctgaagaagctgtgcacgttggcgacgatcgtagaaatgatatatggggagcgagagatgcaggctgcgatgcttggctctggggcagcgacgttcgctctttcaaggaggttgccgagcggatcggtgttgaggtgacgaagtgactaagtgagctaggatggtgaatatacggaggcagaggtagtacccaggatcgcggtcgtcaaggaagccagtgaccccatccttgtggtgaaattcctgtgctggtttgtaggcttgtagctgtatgtatgacaacttattagggttccgttgaacctgctatgcatgcatgcttgctgccctgacagtgacaggcgaatgcgtcccatgcacttgaatatgagggtctgggttctggacttctgggactcttgagttattgaattattgtcgcctagttagacacaaagttatctgccatgcacttaaaaattgaaggtctggaattctggat

SEQ ID NO: 23075 - DNA, 1973 bp, Zea Mays
catcaatcacgactctgcatcgtgaggcgaaaacgataacggggtgggacccgcatggccgcagcaagatgaggaggagaggcagcaaggcaaggcaaggcaaggcaaggcaacgcgccgtcatctcattctccctcgcaccgacgaggtcaggtcagagaccttcgagtactactagtcatggcccgcatctagaaggcagcaagaaagggggcggatggggcgcgcgttcgtgtacgtgatcctgggcggcggcgtggccgcgggctacgccgcgctcgagttcgcccgccgcggtgggtactcccgcggagagctctgcatcatctccgaagaggccgttgctccttatgaacgtcctgcactaagcaaaggctatttactcccagaaggtgctgctcgtcttccaggatttcatacttgtgttggtgctaatgatgagttactgacaccgaaatggtacaaagaacaaggcattgaacttgttcttggaacaaaagtgatttctgctgatgtgaggcgcaagacattgcttacaggcactggtgaaactatcagctacaaaactctaattattgcgacaggctttgaagctgcaagaatttggaatacaaggttcagatgcttcaaacatatgttatttgcgcaacatcgatgacgcggataagttggtgagtgtgatgaaatcatgtcctggtggaaatgctgttgtcattggtggtggctacattggaatggagtgtgcagcggcattggttactaacaagattagggtcaccatggtcttccctgagaaacactgcatgggtcgtctatttacaccaaaaattgcagaattttatgaaaactactacacctcgaaaggggtcacctttgttaaaggaactgtgcttacatcctttgaaaaagatacgacggggaaggtgactgcagtaatactcaaagatggtaggcaccttcctgctgatatggtagtagttggtattggcatccgtgcaaacactagcctttttgaaggtcaactgatgatgtcaacagagaatggtgggataaaggtaaatggacagctgcagacaagcgacagctctgtgtatgccgttggcgatgtggccgcgttccccatcaagctttttgacgatgatatccgacggctcgagcatgtggactcagctcgtagaactggtagacatgctgttgcctccatcttggatccttcaaagacgagggacatcgattacctgccgttcttctactccagagtgttcacgttgtcctggcaattctatggggataatgtcggggaagtggtccactttggagacttcacaagcagcagtccgaggttcggtgcatattgggtcaacaaagggcggatcgcgggtgcgtttcttgaaggcggaagtcgggaagagtacgaggccatatcgatcgctgttcggcgggaagctgtggtcacagacatgggtgaactcgagaaacaaggcctggcactcgccattcaggagagccagaaggaggtgcctgacagtgggcttgctgttgtcggaaaacctacttatgcgtggcatgccacagccggtgtcattgcagctgtgtcgattgctgcaattgggtattggtatggcaggaagcgccgcaggtggtgaggatttgcattggggtgattccctttggtctgccgggccgaactgctgctggtggaatatctgggacgagtgctattggctgttaatccaatcatagttgtatagcttgtatgagagtatagtctgtcgcaaacgtatactgaaacacagatgcctcgtgtattatctagtgaagaaaccagtggctgcctctaactcctcaggggttctcttgttgtaaaattgcaactcttttcttaatgagatccgcaattttgtggcactgctggtcactgttcttaactatctctgtttgccaaaagcttttgcaaatccatatattcagcg

SEQ ID NO: 23076 - DNA, 915 bp, Zea Mays
cgatgtcagcagattggcatgaaatgctatcgagaagggagaaggccacaaacttcaaaccagactatgatattgatatccatatgaaggtcttagctatgagtgggcaagtatccagtattcttacaggctacaaactgaagatgatacatggattcacttgttctcatttcttgttaatggtttgtgccttcgtagtcttctccgatatattgaagcgggtgccagataagctacatgtaactaagaaggcagtacttcatgtcttccctgctgctctcccgcaatcgctccgactctcatgcctgtgcccgcgccgtcaactctccgggctcgatgtgcctttccacgcagcacccacctccactcacactcccaccgtggtgaccccctgttcgtcgacgcgtcgatccatggtcagccaaccagtgaaaaccttcttcgcaatcactatgtatggtactgccaattcacattttacaagtgttgtttggaaggcatctaccaactccaatgctctcttcttgatagcggctgcacataacctattgtgtttgaagttaggaaaggagattggtgttagtatcggaaacccatgattacttggttcgaggttgctagcgtgccagcactttttgggattttagtgactccttatttaatttactcctgtagcccaacattagctgttgagaagctaaagaacatgggtccagtaacaagaaatgaatgcatcatgattggaacgatgctttttgcactctcactacagatttttgggtaagatttttctttttaaagagtgtttttaaccatgagttgccttgcaatctgaagctaaacttttggtagctgaacttatgtatttagtcgtttacacttttcttggcatcatgcaagtaagtacatatacac

SEQ ID NO: 23077 - DNA, 2931 bp, Zea Mays
ctcgcattccgaaacccaccctccgcctcaagaagccaccgctccgacgagccgtgggtggcagaggacgcgcagagcaagcctcaccgctgcaggcgggcgcgcggacagcgtcccgccctccccatggagcccgacgccgccgggtgcgacgtgtccgcggacggcctcatcgccgagctgcttgacatgggcttcgagttcgacgccatcagcgcggcggtcggcgcggtcggcccgcgccgcgcagaggtgcttgaggtcctgctgggcgggtcggacgcccgagcggggcaggcgaggcggggagggggagtgccaggccgtcccgccttgtctacggcgcagccacggccggctggcaggggcatgaaattgagtaaccctagggggaggcttaggcagtccagcatcacggaccacgttgcctcagctactggtggcggaaaggaatctggtcgggaagcgaacatttcgtttccttgttcatcggctcctggtggtcccagggtaatgccagtggctgttgatttttgttccgaaccgggtccccaatctcagtctttggttgagaactcgacagtggagtccgaccaaatggacagaattagtgctgttctgcaaaagcattttgggttttcctgcctcaaagcattccaaaaggaagtcttggatgcttggtctgctcacagggattgtattgtcctagcagccacaggatcaggaaagtccctctgttttcagatcccagctctattaacaacaaaggttgtggtggtcatatcacccttgataagtctaatgcatgatcagtgcctgaagcttgcaaatcacggggtatccgcatgcttccttgggtcagggcaacctgatagccgtgttgaaggtaaagcgatggctggcatgtataagattgtttatgtttgccctgagacaatattaagattaatggaaccgttgaagaaacttgcagaaaagccagggattgcactttttgccattgatgaggtccattgtgtttctaaatggggccacgattttcgacctgactataggagattatctgcgttgagagaaaatttcagttccagcaaattgaagttcttgaagcatgacattccgttgatggcattgacagctactgcaactattcccgtacgagaagacattactaagtccttgaaaatgtcaaaagatacagcgattgtgctaacctctttttttcggccaaatctccggttcagcgtaaagcacagcaaaacttctgcctcatcatatggaaaggacttccaagaactgataggggcatataaggcttcaagggaaggacagcaaattcttcatggaattgacactgactccgaaagcagttcatatgaatctctgaatgatagtgcatcagacgatgaagatgcaaatgttatttctgcaaaccacggggataagaatgttggaaaaacaaaaactagcatgactttggtagaagaaaacattgaaaatgagttggatttgtatcaaggagttgataattttgatgtttcatgtggagagttccttgaatgttcacagcctgagagctccaagtctcctgctcaatccaatcaaactagctcctcagattgtggtgttcaaggttctacaattgtttatgtacccacaaggaaacaaaccgttgaactagctaacttcctttgcaaatctggtctcagagctgcagcatataatgcaaagatgcctaaatcccatttgaggcaagttcatcagcagtttcactgcaacgacttagaggttgtggtggctaccatagcatttggcatgggaattgacaaatcaaatgtcaggcgaattattcactatggtttaccgcagagtttagaagcatattatcaagaagctggccgtgctggtagagatggaaagctgtcagattgcactctatattataattttttgagaacaccgacactccttcctaataaaagaagtgaggagcaggcaaaggctgcatatagaatgctacgtgattgttttcactattctctgaatacttcaacatgtagagccaaaatattagtgaagtactttggcgaagactttggtcctgatggatgtcgcatgtgtgacatctgtactaatggccctcctcaaatgcatgatttcaaggaagaagcgattgtgttcatgaatgtgctccagggtcgaagtggcggtgaaactgatgagatgatttacagcagagtaccccattacagctctggcaggagagggtttggcgaggcacctaattttagaatggttgtcagtcatataagggaaaagcttcctaggtttgctgcgactgacaagatatggtggcaaggtctttcccgtatattagagggcctgagatacgtagaggaagcagctgaaactcctcgtgtctccatgcagtaccctgaactgacggaggacggattaaagtttcttagtagctcacagtcggaggcacctctgtatgcatacccggacgcggcaatgctcttggcaatgaaggagccaaggcccttctctggtttctccgattggggcaggggctgggccgatcccgagactcgccggcagcgtctggcgggcaagaaggccgggagaagaaagcggaagtggcgctcccgggggcggcagcagcagccgggcggcttcaccacggcgagggagagactgactgcgatactggcaaagaagaaaaaaaggtgatgctgtgcaaggttggtggtagtaggattatattacatgtatcgtttgctgttatcgtcgaactttatatgagaatctgatagaagcaaagatttttttttgggccattgtgcttctatcgtatggtatgatgatgggttgggaaagaaaacagaagcccatgattgatgaggataacgagcgagcactgtgtcggct

SEQ ID NO: 23078 - DNA, 1621 bp, Zea Mays
tgatattcgagttatcagcacagctaggacatgcaatgttattttgattgttcttgatgccataaaaccaataactcacaagcgtcttattgagaaggagcttgaaggatttggcattaggttgaacaaaacaccacccaatttgactttcagaagaaaggacaagggtggaatcaacttcacatcaacagtgacgaacacacatttggaccttgatacagtaaaagcaatctgtagcgagtacaggatacataatgctgatgtctccctgagatatgatgctacagcagatgatctcatagatgttattgaaggaagccggatttacactccttgcgtatatgttgtcaacaagattgatcagataacactcgaggagctggaaatcttggacaaacttccccattactgcccggttagtgctcatcttgaatggaatcttgatggacttctggagaaggtatgggaatacttggatttggttaggatatacacaaaacctaaagggctgaacccagattatgaggatcctgttatcgtatcatctaagaagaaaaccgtggaagatttctgcgacagaatccacaaggacatggtcaaacaatttaaatacgctctggtatggggttccagtgtgaaacataagcctcagagagttggcaaggagcatgagcttgacgatgaggacgtcgttcagatcatcaagaaaatataggcgtatcatgtggtggaacgaaacctgtttttttctgcaaaactgggagcgttgaggattttgttgagtagtagcctcgcgagaagagcttgaactcggcctttgcttgttggtgaggctcatatgtaatgttccctgttctcagaaaatttgctttgatccaaagacaatgtgagtcggcatttacttatatacaacgagtcatgtagctgtgatgtaacttcctctaacttggtgccatgtggactggagtcaccgatgtgtgctgccaagtgtctggcccaaccgttgaacacgtggagagatgctctccatatctttagaggaggatataaggtgatttgatgatttatttattaagtgtttgtaccttatctggtgttcgtacgttttctagtgatgattatgataattcataatcatctttggtggtgtgctatgtgctgtttccccaacgactcgaatccggaatccccattctccccgagtggcctctggcttgacaaaacaagaacaggaccggttcctgttccctagatctgcgtagaggcgacgggacacctgaatccgcaaaaaagggttcgcggtttgattgagaggaacgcaggaacccagcgtcaaaacccaatcttgacgctcgtgcagccgtgcgccatcgtcttcttcgtgtgatatagtgggtacgtcagcgacgagacgatgggcaccttcgctcccatccttcaccggcggccgcttgagcggtacaggctccacacgcgggccgaagaggaggcgaagaaccgcgtcagcctctccaccgtcgtccgcggcgtacttcggcagcagctcgtgtaggccgtcatcgagatgatcttgttcatggtaaggggacaggtagctctggtcggcataccgtgaaacaca

SEQ ID NO: 23079 - DNA, 1825 bp, Zea Mays
gtctgagataaggctttatgatgacttatcaagcttccagagagttttttactgaagctagattatatctgcaggaaagcagatatcgttttggttgctgcacgttcatatggtctaaccggtttggtcagggttagcgtaaaggagcattgtgttatagaatcaaaaccagaccacttcttggatgatttgcgacttcacaacccatggactgaactaaagcagtttgcaaaatcaattgacataaacgataaagatcctgttgtccacaaaaatactccatacattgttatccttgtgaggcttgcagaaaaatgggcagatgcacatgatggtaacttgccttcaactaggcaagaaaaaaaggaatttaaggatctaattcgagcccatatgcttaatgtagatgaagaaaattacaaagaagctgtggactcttcatataaagtatcagtcactccaggaatcaataatgagattcgtcagataattgatgatgactctgcggaagtcaattcctcatcgtcagatttttggattttagtggctgctttaaaggagtttattgcaaaggagggcaacggtgagctacctctggagggaacaatacctgatatgacttcccttactgagtattatgtaagcctacaaaagatttaccaagctaaggcagaatttgactgtcttgccctggagcatcatgtaaaggaaatcttaaagaggattggtagagatccggattcaatttcaagagcatatatcaaaacattttgtaaaaattctagaaaactaagggtttctaggtatcgtagttttgaggaggaatttagctctccgtttgtccctgagattcagaggtatttcaccgatgaagactacagttacgcaacgaacttctatattctactacgtgctgttgatcgattggctgccaattatagcagattgcctggaatcttcgacaggctgaagactgttgcggcttcagtggcaagtgagatgggtttgaatggagcatccttatccgaagacctgataaccgagatgtgccggttcgggggtgcggagattcatccagtggctgcttttgtcggtggagttgcttcccaagaagtgattaagctggtcaccaagcagtttgtgccgttgccgggaacattcatatttaatggaatcgacctcaaatctcaagttttgatgctataacatggatgtggaacgttgtctgtgtggactggatttgagttggcccagattttgtgccagggcacaacgctgcaaatggaatctgtttgcccaacgcgtagccaaatatgtgttgcatgatattttagagcctgtttgtttcctcgcaggattatataatccagcttagtttatatagattatataatccaatttatataattttattagagatggctgtttatacaaattattagtgggtacaaagctaaacaataatataaaataagcacctaatgatatgcttatgaattatcataatctaggtacctagattgtacttcctccgacttttttatttgtcgttgtttagttaaaaataaactagcgaacaacagatattccactttagttttgtttatttgcttcttaacttatgtaagttagattatataatctacacattaaacaaacagccaaacagggcttgcgtcgtatgattgtcattctcgccaagcaccttcccgccacccccacccacccacacgaatcagagaaaagtggttcattgagagttgtcactctgctgtaatttatcaatacttgtcgtatgatttatgcaagcgcttcctagctcacg

SEQ ID NO: 23080 - DNA, 2028 bp, Zea Mays
cgggctgccacggcccgcacccccgcgcccgccgttggttggttggctgcctgcctgcctgccttctcccgcggagggcaccgcgcctcgccgcgatccggtcaccgccctcctccctggcacgggcggagctccacatcgcgtggcagccgcgcggtggcggcggcggcgtgttgaaactgggaagccattgacgatctggtgccgcgtggggaaaaagggaggcgggcgggcggtgtctttaccgcccgcgcgcgggcattaactccgggctgtggtacctgaccaccctggcttgcggataagcacaacgccatgggagcacagagctgacctcgaggaaggtacttgaggaggaagcctctccgattccaccatattcgcacccggatttgggggactccagcgtctgatctgccgtttgatgcaagaacttgccgtttctcagctaggctgctgcggcgagatggtgcgggccggcgagaataggcatttcttcccgctcaccagcttgcaaatcggtcatatccggtgttttgcaagatatatcggccatggatgtgccctcttgccagagcattgtatgtcttgatgtcattaatcactgttcttataggattttatgacctctacaagaacgtgcccatgctgaaggcaactgcctcaagattgtttggccctttatttgattggatagaaacatgggaaatgatatcaagacttaagtatcttggaactatgcttttcctgcataattttcagcaggcttttacatggtcccttaagattgtgggtgctgctaagtctgctcttagtgttttgacaaagccaattgcgggaccaattctggaggtttttgaacttacgatgccaatttggaacctttgtgctgagacagtaggatatctgagttcagttgtcatgttatctgtagaagtgtcttggagtgtagttattgatacagtggagatgattgtctggccattttggtttgtcttcagtactatggttagcattgtgaattcaattctgtaccctataatttggctcctcggagagatactagctgcacctttccgactagtcattgggctatcaagttttgtagtggacctttttgttgatattatcaattttctaagggggagctggtcaacactaagtgccttatatcaagttggatctgttcccagatcacctgtgcttacatctgataataacatctgggcctcactgtggaaagatcttttgtatcagattttccgtgcactacggagcattttgtatggttttgttgccttcttttcaacatgtaataggcaccgactcagcatttacaatcacattcaagtgttcctccggcgcatatctcatgtcccagctggtgcacgatttaccgcctaccttgatgggactaggaagtatagcagccagaatcatcataagagaaggaaagccaagacgagataacagtgcagttggcaggtcactgagcaattaacaagctaactcggcgcaaatccgagctcaaaaaaagcaaagaaacaaaacaatgtaagccgaacgaaatatggagagcgaacaatcgataacaagagtttgattggagccttcggagaacataaaaaccaaggaagagtccagtacaggagttgtacattgacgctgaaagttccgttacattagctctaaccagtgaccagcagttcccttgtgtaccaaatacctggcgagcagtggaggaaaacctgcagctgtacatacgcggatcttgtagctgctgtttgttgtaaaatgagtaatagctagctttgtatagtaggcctgtgcatatcctgatatcctcttgtagttgccctccggacagcgattttgcaatgcatgtgtatgtcaagtgttgagttttcttcgcgaagaagtgtcatccttttgtcttactgatctcatttcagcagttatttctatggtcattgtccatgtgcacgccatgtaaacactacgtagtagcttacaatacatgtttaacca

SEQ ID NO: 23081 - DNA, 479 bp, Zea Mays
accgtgacacttttttcccgtcttcaagttcaacagccttatctagaacagcttccagcccctgtaaaagaactcttaaaattagatggaaccaatgcaatacatgagacatattttgaagttccgatagcaacaagagatccagtttcagtaccttaatatctgctccacctgcaagattctgaagctcttcaacagacgttggaggagcttcagaaggccgattcatggacaatgcatctcccagagtaaccttttcctcatcttggccatcagtagatatttctccattttcagaatcatttgtgatagatgaaggcatatctttaaccacagagcttccgggcgatacagaaacctggaaccaagaaagtaaaataatacctagagaaataacctcaaagaatcattttcctacgcacaagataagatatgcggaattctttacctgctcagattccattctcctgaatacaatg

SEQ ID NO: 23082 - DNA, 2181 bp, Zea Mays
ggggattgttataaatgaatgcgacacaaataggatcaatcacagagaagacacggatttaacgtggaaaacccctccaaagtgaagcggttctgtttcatcctcatataacagaggactagaagacatccacacgtaccatcaatcaaattgcaaatctctgaatttacctcaaaatcggacgtgcctgttgtcatataccagaagcaattgataacttggagttgtagtagtctaccgtactctctactgaacaagtatggccgaccctccaacttcccgcatggtgcagcaccccttcggcgacatcccaagccagactcccaagcaattcctatactctggtagctcacagcacctctgccatccataccagtcagcttcggacgcccacgtcgcgccgcagcgtcactacaccgtgaggtctcagtctcagtctcagtcaccggatgctgggtctgaagactttgagacgcacagcaggcagtacacgctggactcctcttcggcttccggttgctcagggcacggttctccctcctgtcagagtgtccatgccgggagtcgcagccctgtgtctcactctcatgacgacagccactccggctccaccaatggcaacggatcgcctgcgagcgcgtcgtgtgtcaccgaggaccctactgacctcaagcagaaactgaaggatcttgaggctgtgatgctggggacggacacggacccagagaccgtggacagtctcgagatcgccatagcggaccggctttcggtggagcccgaggagtggaagaacaacatggtgagcgtgcctagaggggacctgaaggagctgctgatcgcctgcgccagggcagtggagcaaaacaacggctactccatcgacctgatggtcccagagctgaggaagatggtgtcggtgtccggcgagccgctcgagaggctgggagcctacatggtggaaggtctcgtcgccaggctcgccgcctctggcagctccatctacaaggctctgaggtgtaaggagcccaggagctccgacctcctctcctacatgcacttcctgtacgaggcctgcccctacttcaagttcggctacatgtcggccaacggcgcgatcgcggaggccgtcaagggagaagacaggatccatatcatcgacttccacatcgctcagggggcgcagtgggtctctctcctccaagcccttgcggcccggcctggcgggccaccgttcgtgagggtcaccggcattgatgatcccgtttcagcttacgcccgaggcggcggcttagagttggtcggcaagaggctgtcacacatcgctggcctctacaaggtgccctttcagttcgacgcggtcgccatctccggcagcgaggtggaggaggggcatctgggcgtcgtccctggcgaagccgtcgccgtcaactttactctagagctgcaccatatccccgacgagaccgtgagcacggcgaaccacagggaccgggtcctgaggctggtcaagggcctgtcgcccagggtgctcacgctggtggagcaggagtccaacaccaacacggcccccttcgcgcagcggttcgcggagacgctggactactacgcggccatcttcgagtccatcgacctggcgctgcccaggggcgacagggagcggatcaacatcgagcagcactgcctggctcgggagatcgtcaacctggtggcctgcgagggcgaggagcgggtggagcggcacgaggtgttcggcaagtggaaggcgcgcctcatgatggccgggttcaggccgtccccgctcagcgcgctggtcaacgccaccatcaagacgctgctgcagagctactcgccggactacaagctcgccgagagggaaggcgtgctctacctcggctggaagaacaggcccctcattgtttcatcggcatggcactagtgttggcctcgtggagaatgttggcctcgtggagaatgtttcttgtgactttctacctcgttgttagtatagatatgcttggctgagcactaaaactatatataggaagcctgtggtggtactgagttgtacaacacctataacctaataacctgatgttgtgaattgtgatggcagtcactaccagcctgataatgtgtagcagtaagttcgagtatatgtttcagttaatcgattttgctttg

SEQ ID NO: 23083 - DNA, 2375 bp, Zea Mays
aaattactctgctcataaacaatggaaaattgagagagcgagagagaggaagctagcgagaaggtcaagccgcgaagagaagagacgcacgtcacagatccctctccactgtctcaccctttctctctcctcgaccctcccgacgcggcaaagcaaaaacaaagggaggagaggagggagagaagggagaagacgaggccaaaaatcccctccccctccccaaatcctagcccaataatctctcaatcaggggattcttaggtctgatcaggtcggaggattcggcagggcgcagccatgaacgaaaaggcgtccgtctccaaggagctcaacgccaagcacaagaagatattggaaggtcttctacggcatcctgagaatagagaatgcgcagactgcaagtcaaagggtcctcgatgggcaagtgtgaatctaggtatctttatatgcatgacatgttctggcattcatagaagcctgggggtgcacatatctaaggtaagatctgccaccctggatacatggctgccagagcaagttgcatttattcaatcaatgggaaacgaaaaagcaaatagctattgggaagcagagctgcctcctaactacgatagggttggaatagagaatttcatccgtgcaaaatatgaggacaagagatgggtaccaaggaatggaacatcaaaatcttcgtccagtgttcgagatgagaagagccaagagtctccggctagtgctaataggagtggacatggtcatagatcttcatttgagcaaaaccgtgcttcaccagctcttccgagcaaagttgcacatgcagcttcaaggatatcctctcaggtaaccccctcactaccaaaactttcctaagcaatagtcagttcatcattgtgaaactagcggatgtgtcttcatacatagctcttttgaagttttagcccttgttctttaactcaggctgagtaatccatattgcagaattcttaattatgaatcactttaagacatcagtaataaccacttctaatctggcatgattgcgtttgaagtaggcatcacctcagcccccgaaggtagaaacaccagttccaaaggtggttttacctcctcagtcacagaaatcccccgccaaagttgatgcaacaccgcctaaagttgagaagccatcggttacaccacctcctaaagttgattatgccactgatctctttaacatgttgtcaatggatggaacaacagagaaagagtcagcgtcatcttcaaacgacgataatggctgggatggcttccagtctgcacaaccagtacctagttcagagaaaaaagattctgccaaaccagcagaaagcaagacccagtctacatctggaatggaagacttatttaaagactcaccagctgtgccattatcctcagctccagctgtttcccaagtaaacgctaagaatgatatcatgagtttgtttgagaagtccaatatggtatcacctttcgctgcccatcaacagcagctggcgctcatgtctcagcagcaagctcttctaatggctgctctcaaagctggaaatgcaccacaaatgatgattccagggactgccaatcagctaaatgctaacggaaccttgcctttccaaaactggacaaatctttatcaaaatcctgggtcgactccagcagcagcacagaatggtgccaccaaggttgctaacaacaatcaggacttctcttctggtaccttcggttttggcacacctggggtgtacaacattagcccaactgtcccagcaaatggggccacgacagcaggtgctatcaacaacggcactgcatcaactgcctcttctactctcccctcacaatctggcaaagactatgatttttcgtccttaactcaaggatttttcaccaaacgatgagcgcctagtgagcttgaaaaccaaacagaccacaggatcatgttggacgaggcatattgatttagggagcacaaggggcttacacatgcttatttcgaggcagattttcttctggtggatatattgttgtttcatgaccttgtagctgtcggacaataagagtggaaatatgccgcaaaatagctttgttgtttctaaaagcgaagaatacattgccggttatgtcaacggcttttactcgaggaccaccttgtcagttatacaagtctaatgcagtcttttcactatgttggtcttgatttatctacgacgtcgatactgattacagattgttttgtattgtattttacgacaattggattttatttgtttctacatttgtatattgtttgtgagatgggagaaacctcttcaaggcgttgaaccaaacgtacttttccaacatttcatatatatctt

SEQ ID NO: 23084 - DNA, 274 bp, Zea Mays
caatgcaaagggacagaaaatgacaaggggaccaatgacttgcattcgatgtggagaaaaaggtcatagacaagctagttccaagtgtccactcaatgggactgcaaaaaagagaaagtggaatcaacctaggaggaatattacaaaagctaagccaagagaactttgcacaccacacaggccaactagtgaagaaatattacgggatagtccaggaaggatcactagaagccgccttgcgttcttgttaggagagggcagttcttcccagacc

SEQ ID NO: 23085 - DNA, 2118 bp, Zea Mays
ctccccctccgcgtcctacagccatcgtcgctctgccttccgcccccgccgtcgccgcagacgcagccggccacccaccactcgcgcctcccccaccgcgtcgcgtgtgggccacagctacagctgcctcctcgagcaacccacactcctttcttcccctgcctgtcgtctctcttccaccttccaccacaagcgccgtcgcagccggtgcctgctccttcccgatccccgaggcaaagctgcgactccgcaactgccgccatggcgttcgagaagatcaaggtctccaacccaatcatcgagatggacggcgatgagatgaccagggtattctggcagtctatcaaggacaagcttatcttcccatttctggacctggacatcaagtactatgatttggggatactgcacggtgaagcaactgatgacaaggtcacagtggaggctgcagaggctactctcaagtacaatgtggctattaagtgtgcgaccattactccaggtgaaactagaagaacgtatgaagctagacttgttgcaatttatagacatgtaagagaggatggagttgagggacaacctatttctgtttcaacagaacaatttgcaccttgttgataacaataattgatctgggcctcttccaccagaattagtagatacacgtagtcttcttgctatcttgacttcaggctgataataacaacttcagtggaagctccatcctgctgaatacaacaacatacaaacacttctaaagctggcattgcgctgcggggttacatcgccgtcaccttcgacatgcgcgacataggtgggtccacagggcgggtgtcgctcacgtgctccatcaagaacatcgagtgaggtggtgtgctgctgctctaaagaagggaggagaggaagtagcgacaatgtcgccaagaccacctggcgcgatgtctcctaccagatcaccaagatcaacatgtacaaggatggtcggcatgtacaagatatgcttaagcatcagaggctccataaagcagctctgctagaattaactgattcactgtcaaggtcaaacatcactatgatattgctgagatggtccaatcagtgacaatgctggtggtattgttgagatggcaggaatgagccacaaaatctgagagaacttatgctcttggtgctgctgacaacacaactgttgctattagaaagggatttgccattggttcaggtgctcttgtgtccctggtgctgtttggtgccttcgttagcagagctggagtgaaggttgtcgatgttctctcctgaaggttttcattggtttgattgttggagacatgtttttgtactggttctctgtcatgaccatgaagagtgttggaagtgtcgccctaaagatggtggaggaggttcgcaggcagttcaacaccattcttgggttgatggagtgaacaagcaagcctgactatgcaacctatgtgaagatttgcactgatgcttcttccatcaaggagatgattccttggggtgctctggtcatgctgactccctcattgatggaacctctttggcatcgagactctctctggcgtttttgctggtgccctggtttttggagtgcagaacaaggccatctcagataaaagtagatgtagctttcataggacttaattccagcaaagcaaaggttggcagtgcaccaaacaatagcgtttatacttcattcttatggattggagaagcctatgcaacatgtcaagccagatgacatgcagatgagaaggttctgcatcaatagaaaccagagaaaaatctgtatgtgtctgtatgacatctcagataaagcctgatgatcagcatgatgaaaggtggggagttctatagctggtttaagctggagctagcttctgaagtccggtcaggtgtctgtatgtgttgcccctttttatttcatttcatgagaaaagattgttatttgttccttgaactgtacttggtcgtacttgtgaataaatattttagcatggttgttcgacttctcataatgtttattcgacatcagttcatgatattagtgttacgtgatattttatcatatgaattttgaatatcatagtgatgtttatc

SEQ ID NO: 23086 - DNA, 1500 bp, Zea Mays
atgggcggcgacggcggagcagcacagggcggggagagggccgcctaccggcggtgttgcaggggggctgcacggggtaggggcgcgacggctgggcgcggttggccggagcagcagcaaaggctagaacgaggctgcgaagcctgcgaggggctggtgcagcggtggccgatgcgggcttgcggcatgcctaggggggtgaagacacacaggcagcgccagtgccggccgcttggagcgctagagtggacgagcaggttggacagaaagctgagcaaagggagtaatgaaaatatggataagagaaagttgcaacctgagaataatttatctgatggtgcaagacctcttatttctgaagggtcggatgggccaccctcaagttcatatgcatatgaaccctcatcttctggccaaggattcaaatctccagaaacacctgatttgacagtatctgtcaaacatccttctaagacggaacatgtgattaactctcaaagacctggtagttcaacatcgtcaacatcagagcgcattgctgcaaactcagctgcgagtgctcttggcttgtcaccaagctcttcaataggatcccttacctctgaaaaatcaactttgaaccctaatgctaaggaattcaagctaaatcctaatgccaagagtttcactccgtcagcatctttgaggccaccacaccctgcatcatctgatgcatcatattactatactaataacattccagcagcaccacttggacctggtttgccagtgggcatggggttcccaccggcatatggcacccagcctgtcatgtataatgctcaacctggagcatcacagcagggttacatgcatcctgttggtctacagtatgggcagcagatgatgatgggaggagggcagaatcgtcctgtttattattatgcgcctgagatgcaacaatacagaggaagaaacttctagatatactattttgaactgctgctaggtgaaagtcacaacaatccccacaagtgggataatgacccggcaaaagccgctattagaatggaaagaactggtgatgatctccctgactgtcgctccgattccttggacaaaaagccccatcgactttgtgttgcttggttgcctggtcaaaaagctcttcattgttctgtcactgttgctcagaagcaggttgactggattttttttatgttttttgtcagacttctgttgtaaattaaattgtgggtcatctgttcgacccagaaatgacattcataagggctagtgtggtgacagaaaattgaaggggatccatagaagagaatccacttgctattcaattttgaatagcaagtggattctcttcatggatctattttaatttctcggtcaccaaatcagtcctaaatgtttgagattgccccatattacatttatgtgttctttgacgcttgttctaatgtaaactttaaatggaattctcagctgaaatggattaaaattgctgac

SEQ ID NO: 23087 - DNA, 2300 bp, Zea Mays
cggacataaaaaccagaaaaggggcgtcgaacctagggtttcgtctgtctcccgacgccgccgctaggctttgcgcctttgcctgcatcactcgctcattcggagcccctctcttcgccggcgtcgtaagaagagatggcagagcgtttgacccgtatcgccatagttagcgaggacaagtgcaagcccaagaagtgccgccaggagtgcaagaagagctgccccgtcgtcaagactgggaagctttgcattgaagtgacttcggcgtcgaaactcgctttcatttctgaggaactgtgcatcggttgtggtatctgtgtaaagaaatgcccatttgatgccattgaaatcatcaaccttccaaaagacttggaaaaggataccactcaccggtatgggcctaataccttcaagctgcacaggttgcctgtcccgagacctggtcaggttttgggccttgttggaacaaatggaattggaaagtcgacagctcttaaagtgttggctggcaagctgaaacctaacttggggcgcttcaaaaacccgcctgattggcaggaaattcttacatacttccgtgggtctgaacttcagaactacttcacacgcatattggaagataacttgaaggcaatcatcaaaccgcagtatgttgaccacatcccaaaggctgttcaagggaatgtaggacaagtgcttgaacagaaggacgagagggatatgaaagctgaactgtgtgttgatcttgaattaaaccaagttattgaccgaaatgtaggagatctttctggcggtgagctccagagatttgcaatagcagttgttgcagtgcaaaatgcggaaatctacatgttcgatgagccatcaagttaccttgatgtgaagcagaggctgaaagctgcacaagtcatcaggtccttgcttaggcccaacaggtgcttatggtgtggttaccttgccattctcggtccgagagggtatcaatattttcttggctggatttgttccaacagaaaatcttcggttccgagacgaatctcttacatttaagattgcagagactcaagaaagtgctgaggagattgagacatatcagcggtataagtaccctactatgagcaaaacacaggggaatttcaagcttactgttgttgagggtgaatttaccgattctcagattgttgttatgcttggtgaaaacgggacagggaaaactaccttcattagaatgctggctgggttgttgaagccagacacagtggaaggaactgatattgaaattcctgaattcaatgtgtcttacaagccccaaaagattagcccgaaattcaagaacaccgtgaggcatttgctacaccagaaaattcgggattcctatatgcaccctcagtttgtgtctgatgtaatgaagccactgcaaattgaacaactcatggaccaggaggttgttaatttatctggtggagagctccaaagagttgctatatgcctctgccttggaaagcctgcagatatctatctgattgatgaaccaagtgcttatcttgattcggagcagcgtattgtggcctcaaaggttatcaagagattcattcttcacgctaagaaaactgcatttattgttgagcatgatttcatcatggcaacatacttggctgacaaggtcattgtttatgaggggcgaccttctattgactgttctgccaatgcaccacagtctttagtatccgggatgaataaattcttatcgcatcttgacattacttttagaagagacccgaccaactataggccacgtataaacaagttggactctacaaaggacagggaacagaagtcggccgggtcctactactacctcgatgactaatgaggaagcacagattcttcttggagagccatatggcgcatagtctttcgagggcgcggagagtgcggaaacgagaagctactatgaagctaccacactacatggcatgagacttggttgcaggagtagagtgcgccggttataacttataaagcagagcatgctgtgttgatactggttttttttccctttttggcttgacctatatgaagaaaaggattggcgttaaaatggtattgtgaagggagaggtttttaagcaaaaatgttgtaccgtcgttttgccatcgagtatatttgaccctcgattatatagatcacattaaatttttggagcaacaatatgaaatctcgtgacaagtcgttgtgctttttggttctgattgtaattcattcttgagtttgaatgatcaagtacgctggttgccgac

SEQ ID NO: 23088 - DNA, 2706 bp, Zea Mays
gtactgagctaaatttcacgcgcccccatttctcttcctttccccgggtcccaagtaaaggtggacaccaacgtggacgggaggataacgagggaggaagtacaggagctgatcgtgctcagcgcgtcggccaacaagctggcaaagctcaaggagcaggcggaggagtacgcgtcgctcatcatggaggagctcgacccggagaagcttggctacattgagctgtggcagctcgaagcgctgctgctccagcgcgacacctacatgaactacagccgcccgctgagcacggccagcggggcccagtggagccagaacctcggcgtcggcggcgcgctgacgataacagggggaggaggagacggcggctgcggcgtggacggcgaccacccggggcctccgcgcgagcgtcgccggagctggggcgtgcggaaggcggcggcgcgggtgcgcgtggcggcggaggagaactggcgccgcgcctgggtgctggcgttgtggttcgcggccatggcggcgctgttcgtgtggaagttcgtccagtaccggcgcatggcggcgttccaggtgatggggtactgcctccccacggccaagggcgccgcggagacgctcaagctcaacatggcgctcgtgctgctccccgtctgccgcaacacgctcacgtggctccgctcctcctgggcccgcttcttcgtccccttcgacgacaacatcaccttccacaagatgatcgcgacggcgatcgtggtggggatcacgctgcacgcggggaaccacctggcgtgcgacttcccgcgggtgatcgcggcgagcccggaggagtacgcgctcgtcgcgggcgcgttcggcgcggacaagccgacgtacgcggggctcctgtcgggcacggagggcgtgacgggcgtggccatggtggtgctgatgaccgtctccttcacgctggccacgcacccgttccgcaagggggagcccaagggcgcgggcgcggccgccggcacgtcgcggctcccggcgccactgaaccggctcaccggcttcaacgccttctggtactcgcaccacctcctcggcatcgtgtacgcgctcctgctcgcgcacggctacttcctcttcctcgtccggaggtggtacgagaagacgacatggatgtacatttcggtcccgctgctgctctacgtcggtgaaaggatgcttagagccttgaggtcaaatgcttataccgtgaaaattctcaaggtgtgtcttctacctggaaatgtgttgaccataacgatgtcaaagccctatggatttcgttacagaagtggacagtacatatttcttcaatgtccaataatttctccatttgaatggcatcctttctccatcacttcagcacctggagatgactacctcagtgtccacatccggacaaacggtgactggacacaggagctcaagcgcatatttgtggagaactacttctcgccgcatctcaacagaagagcttcgtttagcgagctaggtgcggcagaaccaagaagcttgccaaaattactcgtagatggtccctatggtgcccctgcgcaggattttagaaactacgacgttctacttctcgtcggcctcggaatcggggcaacaccgttcataagcattctacgggatctgcttaataacattaagatagctgacgagctgatggacttggcaatggagaccagcaggtctgaagacagcgccaacagctttagcgtctcaacggcgagtagcaaccggaagagagcatacagaacaagccgtgcacatttctactgggtcacccgagaagccggatcctttgaatggttcaaaggggtgatgaatgaggttgcagaaatggacaagaagggtatcatagagctgcacaattacctcactagcgtttacgaggaacgcgacgcacggacaactctgctgtccatggtccaggctctgaaccacgccaagcacggcgtcgatatcgtatcggggaccagggtgaggacgcatttcgccagacccaactggaaggaagtcttcaccaggatcgcctccaagcatccgaattcaacagttggtgtgttctactgcggcgcaccgacgcttgccaaggagctgaaggctctggcgcacgagatgagccacaggacgggcactcgcttccatttccacaaggagtacttctgagtttcgacggatagaatgggcagtcgatgctcgttctaacgtgatctggtcttttctgatctgatctcgatagcgttaggtaccggtaaagaagacagaattttgcacagatgcaagacaaaccaagctgacctctcctcctgatctggaactgtacatagcataaaagaagcaccacagggttagcttagtatacgtagcacaattcaaataaatatattgacaaagaaaagagagacagagaaagggcaggatagaggctgttgttgttaactcgaagatattgatgataggcatggcggtatacgtgtatacattatagttaggtgctaggtggtagttatatatatactgtatatgatatgggtcgatgaatatacgaggagccacatgctgctgccattctcaaatgtggacgtgcattcttcaggcgtgttcgtgactgtttggctggtggttgcccatgtgaggggttgctaaaaatgatttcatgccgtagcctgaagccctgaaggc

SEQ ID NO: 23089 - DNA, 824 bp, Zea Mays
cttggatgtattatctcataatgataatgtcaaacagatatcaaggtgacttctgatagctcaataactgttgttcagccacctatcgtcgtccagatcttccagtttctagttgcaatgttagtgatggactcatggcagtactttgtgcaccgctacatgcaccaaaacaagttcctgtatcggcacatccactcgcagcaccatcggctgattgtcccttacgctatcggggctctgtacaaccacccactggagggcctgcttctggacaccttaggaggcgccatctccttcttggtctccggcatgacgccgaggaccgccatgttcttcttctgcttcgcagtcctcaagacggtcgacgatcactgcgggctttggctaccgtataacatcttccagcacctgtttcagaacaacaccgcctatcacgacatccaccaccagctgcaaggaaccaaatacaactactcccagccattcttctcgatctgggacagaatgctaggaacccacatgccgtacgacttagtgagcaggaaagaaggtggatttgaagcaaggccgtcgcgagactagcttgaagtcatggaagtgtacaggctccggtgaatgagtcagacagaatatggttttttagctgtcatggttcattttttaaaaattttgtgcagggctgccatttacattgctgtgcagatagtgcatttgaaaatccacacttctgtatgtacccagttatttgtgtaattgattgaacctctggtcgtgatcgacaccttcggagcaatctttggctactactgactgtgctttgtttc

SEQ ID NO: 23090 - DNA, 453 bp, Zea Mays
ccttgtctcaaagaccttagacggctatgcatgtgcaccagataacttaacaggatccgtctgagtgccccaaggacatcggataaaccacttacaaccaggaccgcaggataaagtaaacacaaatcacataccaacattttgcagcggaaattttattaccaaattttacaagttacatcaagttttacaatgtacatgatcggagtgattacaaggtgattcaaagaaataactttgaactgttataaattgtttataagtttgaaatatatgctagcttaagtgaccatcctcaataagaagtatagaagaagttacttagacttataagaaggccgagcccaccggcacttagcaccatccatagcaacacacttctattttcggttcttccttcttctggggaaacacctttgcacaaaagtggcaaagctttgtaggatcttcacc

SEQ ID NO: 23091 - DNA, 2202 bp, Zea Mays
ccaccttattaccaagcccagtcattcttttctgctacagtaccgtgcctggcgattccgcgtccacgcacctctcagttagggtttcggactcgaggccaagttcatctccggacgagcataccgtgagccccaacgctccaggtggtcagcttcacttccgagcgcccctctcccgacagccgtctcctcctcaccgctgcttcatcacctagccgtcgccacccatcgcctacagcgacagccgtcttccgtcacagcggagcgcccctcagatccaagggacgctgcacgagcgcaagagcaggttgttgagaaggggaatataatcatggatatcatgcagactagtgactcttcacatcatggaattgtagaaaatagcccgtacagaattccatatgacagacatgcagaaggtggtcaacttggtgcttcatggtattttagtagaaaagaaatagaggagaattccctttcgaggagagacggcattgatctgaagaaagagtcttatcttcgcaagtcatattgcacatttctgcaggatttggggatgagacttaaagtacctcaagtgacaattgctactgctatagtgttctgtcatcggttctttcttcgtcaatcgcatgccaaaaatgacagacggacaattgcaacagtatgcatgttcttggcgggaaaagttgaagaaacacccagacctctgaaggatgtcatacttctttcatatgagatcatccacaaaaaggatcctgctgcagttcaacgaataaaacagaaggaagtatatgaacaacaaaaggaacttattttactcggggaacgtgttgtgcttgtgacacttggttttgatttgaatgtgaaccatccttacaagcccttggttgaagcaataaaaatattcaaggttgctcaaaatgcacttgctcaagttgcctggaattttgtcaatgatgggctccgcacttcactttgcctgcaatttaaaccgcaccatattgcggctggtgcaatcttcctcgctgcgaagtttctcaaagtcaagcttccatcagatggcgagaaggtctggtggcaagagtttgatgtaactccgtggcagctggaagaggttagcaaccagatgttggaactgtatgagcaaaaccgtgttcaaccaccaccatcacaaggcaatgatactgaaggcagttctgcaagtgttgcgaatcaacgtgttcctggtaaagttccaggagtagctgatgaacctcctgcccatgaccataaccaagcacccagaccatcgagccagcagaacatgttagaccaccgtggttatgaccaccctcacccagataagcaaaactataggatacctccaaatgatgcaagggatggcactgctaatagcaacgaaggtcccaatgtgtcgtcttcaatgatggatgcgatgaagaaggtaaacaaggataaggtgaaagcggcactggagaagcgtaggaaatcgaaaggtgatttttcaagaaaggtcgatgtgatggatgacgatgacctcattgagagggagctggaacatggcgtggagttggctgccgaggatgagaaggtcaagcaggagagaaagcagagctggcctcatcttgcacaccaccagagcaccaaccgtgagaataccgaagagggtgagctgtccatggacagtcaagaataccgttctccggagcatgacaatcggaagagaaaggatgtgcgtgagtaccggaactacgatcgtgacgaaagggaccttaaaaggctaagatcatgagagttgcacttttgtcggagtctcatgttgttcgtgccataacatgatgtggaacctctatctttctgtcacaggtgtacttgatgcttatttggtatgctgggggatttgaactgttacatatataagtttataagatggtttccccacggtcatgtatgtgtttagccatgttggcaattgagatggcgctgtgccttgagtattccacaggtttatgctggaaacaacatttaaggaagctgcgtcctacgggtatctgaaatgtatgtattttgattccaaggtttcctcaactctaatggtagcctgcgtttttttatccgtctatctgggaacacgggtactggggatgaggtcgtgcacataatgttgttgattttgataccatgtaatgtgcatgttct

SEQ ID NO: 23092 - DNA, 574 bp, Zea Mays
ccgcagcacctcccgggagctgctggcgtcgccgtcgcagagaagaatcctcaccttgctccggtccacgaactgctggcctcccccaacccctacgccgccgcccacgcgatccccctcgcctccgcccaccatacccagaccccccaaacacacgatccacgcctccgccaaggggactggggacgcgaaccgaagcgtcggattcagcagcgcccggaaccagagacgcaggcgaaggacgaagcggtcggtggatctgcagacgcctcctcctccatccccgcggccgcgagtagcgcccagtcaacccgagcccctcgcgaggtaccaccgcgcgtgcgccgtgcctgcagacggctggttaagcaggtatactctgtcagcggcggcgcgcgggggccgcggcgccctcctccgcccgtcgcggtccggccagcaccattatccgcgcctaatctattgattggcggcggtggcgtccgctcttctctgttgcggcctccggtgcttcgttggagcagccgagcaggatatttttcctcgcttttttccgctttgctcagtgggtggg

SEQ ID NO: 23093 - DNA, 1205 bp, Zea Mays
cacagcggcagtagctggatgctggtgcaatgatattggtggccatagatggttgtgtacatattgttgaatgcgcataggagttgggaggttgaggaagggaatgaccggagtgcaccagaatggttttgtgctgcagcatcaagttatactcttctgtcttggagaaactttcacagagctacctcctatttaccctctggttgatttgcctataaatactagggcaagcgctgcagattttggtggttcagttcctaaacctgggcttgaagtcaacttagtcgacgctgttccttgtcgaatagcatttgagaggggcaaagaacggcacttctgctttttagccatagctcatggaacttctggttggattcttcttctagaagaattacctctaaaacgggaacgaggaattgtccgtgtcatggcacctttggcaggatctgatccaagaatagatacaaagcatgggaagtggttacatctacgcattcgcccttcttcggtcccttttttggacactgagaagcataaagcgaagacaaagaagtatcttgttgatgggagatggacccttgcttttagggacgagcagtcctgtaaggttgcagagagtatggttattgaagagatgaaactccaacgaggtgctgttgcagagcaattgaagccattggttgaatttgacatgcctgaggatggaatgcagcacccccagacttcacatgaaaccccttctgatgatggatcatgactaaattttcatcaagtgcagtgttgagcttctcaattaaggagacatggcaacagatggccgcaaaagtgccgcattgaacatttcaagcatgctggcaggaaaacccaccatggcaagtcatcgacaattctgtacattacattgggagattagagatgtctccttgttaacacacaactgtagagtttcgggccgtcctgagttgaactagctggataggattctttgtacaatagtttgtttctctccttgcccgttgtaaccttatatatcacatcaaaacccattctttgttaagtttcagggcacagttgtgttgtgcacacgaaatgtttaaagaaatttgcagttagtcatacctgttgtcaaagcaagccttgcctatgtggtaataaaatgtcagatcgataatttttcttggaaatatgaatgttcatggactgtt

SEQ ID NO: 23094 - DNA, 823 bp, Zea Mays
gccttttttgttctctgtgtacctcaaactgtgaccaaaagatatgcaaagaatgagctggccaaaaagttcttcaaggatggcagatcgtttgatttgcaaggtctaaaagagtgcatggtgagagcatatgaatacattgatggcgtcgaagatattctttgctgtttgaagaaaaataattatgaaatgcatgcttttacaaattatccagtatggtaccaattaattgaggataagctaaagctctcaaagtatttatcttggacattttgttcttgtagaactggaaagcgcaaaccttcgcccgagttttatcttcaagctgcagatcaactcaacgttgatccagcaagctgcgtttttattgatgataggatgataaacattgaagcagctcttagtgtaggaatggttgggttgcagtttaaaagtgctgaggcactacagaaggacttgtgtgctctgggagttgaattatctcctcttgtttgtgaaggtgaagcacaagtacaataaggtcgtgtgtgccctatcttatcttatgctcaaccaaactacaatacgaatgtacataatgtatggtgcccttgctttgtgagctatgtcaataaattattgtgctaatctgaatcgtctatcaaatataactgatatgttaactgcacatattctctcctatgaagagctttttgttgtcagttagtagaggtgaatttgttttatcacaaacatgtgctgtcaagcctcagccaataggccctgtaacttcaattcaggttaatgttcgtcgagtttgaggagtttttatcaaaagttataa

SEQ ID NO: 23095 - DNA, 2268 bp, Zea Mays
atcaaattcccatgcttaagtccaacccagaccgctagcctgctctgttgacaactcttctcagcctcagcggcttggtgctgaactgctgactgcaggtaaccgcggccccgcctgggatttctgagctgtgggtgatgttctggtactctcttggttgatggcgaacgcggaaggttttcggctcgtgagatgcccaaactgtctcaacgttctcccagaaccgcacaacgttacagtctacaggtgcggcggatgcggcaccacccttcgagctaaaatctgtgccagcggtggccgacatgcgtctgcaaaacaagctcgccaggactccgacagttattcggtcgctacagccgtgagcaatggcaatggggcgcctccccaaatcaaagaccaaggctcagagagctccttcggtgctgatgctccaagcaccgagcatggcagcaacggggcagggagcggcgaaaatggtggtggcatactggctgtgcagaacgctgtggtggtggctcacgacgctgagaacaaggaaaaccacaccgtggaacagcctacggagaattcagagacttgccgagcagtaagtggacatgatgatgatacagaacgccgcttgaacgcctctgagatcaaaacggttccttctgagatgagcaaggcagccgtcagtgcgcaagatcccgagcagaaggaagaaggcggaggcgaacatgcagcaaacaagaaggggtatcttgtgagggtactgtctcggtcctgtgatcttcgatcgtcacgagactcgactgatttccaatctgcacggacttctctccagtcgaaaagcttcagtgccagcgagcccctccagtcgaagatcatgaacacagtggacgagctgaagggcgacctttctgagctgttcagtaataaacctgcagacgactgcaagccgaaggcgcaccaacctccacgaccttccaattccaagcaagatggccgcacgactcgtgcagccatcgcgtccagtgcacctctcgcggcataccatcctgccgccaagcattctggctacgtgtctcgcccgagcaagtctggccaggttgctgctgcttctcgtggactgccgtcgctgcggtatcgccggcactgggtttatccgttccacttccaccacaacgtgcagacggaaacgagaccttgccgtcatgggtgctgccaccatagttgccagcagccaccctgttacagatacagaccctgcaagcaagaacctgcagcgacgcgcaggccaccggtcatggtgagcaataagcgccctcctcctcccagaaactactgcctgccagtcctacgtggcgccccgttcgtgatctgctccagctgcgtcagcctggtccagctgcccgcggagttcgccgtcccgagcaggggaacgcgccggctgcggtgcggctcctgctccgaagtcctctcctactcctacagggaccccggcgccaggaagaggctgcagtcaccgttcgggggcgacgagtacagcactgacgagtacgagcaggcttccggcggccacaacgccgccgccgccggcggcttcttcggggaggcggacccggtgtcctactccgaggagtacgggctctcgttcggcatcggccactcgaccagcaccgaggacgggcagcagccgctgtacgtgtcgaggaactcgtccttcaacaccgtcgacgaaaggacgggtactagagacggcaagcttcaccggctgatggggtactcgtcggcgagcgaggtgctgcagcactcgcccgacctgttcgaaagcttcggcaggcgcgcggccgacgcaggaagagcgcacgtcggcgggaagggcaaaggcgtttgcgtggcagagaacgacgcgtgcgagcgagacggtggtgcggtggagagatcgaaggtgaggagtggtggttggccggtccatgggatcctgaagaaggggatccacggcctggaatcactcaagctcaggtcgtagctggtggttttcgtttggcggggctctggcgatcatgtttagagttcagtggcagtgtagtcatgcttattagtggttagcttgtgtgtgagttgtttgcgattcatctctgtgtctgtgtgtgccgagttggttggtttgcaatttttgtcatgtgtgtaaagccttgcacgccgagcaatgctcgatggtgtgaatgtatatacagaattactatttggttcaattcaagataaatagtactcactctgttgttg

SEQ ID NO: 23096 - DNA, 815 bp, Zea Mays
gttgcgctgggtcttcccgctgcttggatttggatggagcattgattaaagggtgaacctcttgagctgggaagccatgtcatttgatgaggatgacactgaggagtcaatcgatgtgaaggtacagaaagctctggactgtccatgtgttgctgatttgaaaaatggtccttgtggaggtcaattcgtcgatgcattttcctgctttctcaggagcagagaagaagagaaggactgcatcaaagcaaatccagaggcattctctaaggagattctggaggaagaggaaaatgatgaggaggcagataagtccaacctgaaagttagagctccatcatggtccagagaatccaaacctaaggtttgagattgcttggtattaactgatagtgatattcatccagtgtgcagactcaccttattcaactataagggcttgttcgctttcctctcaatccatgtgatctcaatccatgtggattgggtgggattggatgagtttaaatcctgaacaagtcaaaatccttcatattttttctaatctcatccaatccacatgggacaggaataaccgaacaagccctaagtttgccagtagtagactgatttcagagagcgaggtatcataaattgattaacagaaatacccatattttgtgtataagaaatgcttcatggtatccacaattttagaatgtacatgtcatttcaagtatcaatcgagaactgatgaacttgtaattcgattcctagatacagggcatatttgatcaccactgtattattatactatgaaatatacatatgattatcat

SEQ ID NO: 23097 - DNA, 599 bp, Zea Mays
gcaccaggactgcctttctaagtgttccctgttgggcgtatccaccgtcagctgaagcaaaggactcaggcaaatggtcgcgttggtgccaccgcagccgtctactccgctgccatcctggagtacttgactgccgaggttctggagctggctgggaatgctagcaaggatctgaaggtgaagcgtatcacccctcgccatttgcagctagccattcgtggagacgaggagctggacaccctcatcaagggcaccatcgcaggcggaggtgtcatcccgcacattcacaagtccctgatcaacaagtcctccaaggagtgaagactaggggatgtgcatctttagtttaaactagacttctgtgcgctcctcggcgagtccttgtcatcctgtaggttttagttgagctgtcaggttggagctcctctgtgtaacgcttgcctggtactgcttcatcagttatttggttattgtgtttgtgttgagttgttaacttcaggggtgcaaacctggatgcttatttagttatgtgactactgctattcggtttatgttgtggtttgtttttatttttacaattttttctagctgcaattaca

SEQ ID NO: 23098 - DNA, 2599 bp, Zea Mays
catcatcaatcaggcaagcgacggtggcttcttcctcccccttcaccgtaccgagacccaaaccaagccgcctcgccagcacccagcagcccgcatcactcgtctccattaaaatcggttttctccttggaaatctgctgccaaatcgggctatagatcaaacgctgcactgtagggagcgtgaagccagcggcgaatggaatccctagccgccacctccgtgttcgcgccctcccgcgtcgccgtcccggcggcgcgggccctggttagggcggggacggtggtaccaaccaggcggacgagcagccggagcggaaccagcggggtgaaatgctctgctgccgtgacgccgcaggcgagcccagtgattagcaggagcgctgcggcggcgaaggcggcggaggaggacaagaggcggttcttcgaggcggcggcgcgggggagcgggaaggggaacctggtgcccatgtgggagtgcatcgtgtcggaccatctcacccccgtgctcgcctaccgctgcctcgtccccgaggacaacgtcgacgcccccagcttcctcttcgagtccgtcgagcaggggccccagggcaccaccaacgtcggccgctacagcatggtgggagcccacccagtgatggagattgtggccaaagaccacaaggttacgatcatggaccacgagaagagccaagtgacagagcaggtagtggacgacccgatgcagatcccgaggaccatgatggagggatggcacccacagcagatcgacgagctccctgaatccttctccggtggatgggttgggttcttttcctatgatacggttaggtatgttgagaagaagaagctaccgttctccagtgctcctcaggacgataggaaccttcctgatgtgcacttgggactctatgatgatgttctagtcttcgataatgttgagaaggtactattcaagaatttctgttctcgttcgtaactaactcatgatgttctctgtgtttcagagtattgtcctacagttgcagttatgattaagtattaatcactttgccttggagcaccaattttttggaggctgaataagatagctagtagtttgatataggaagttaactatactaattctaaagattatgcatgtagtttgtcagtgtttcatcctatttttttttcacatctacaacagacagaaactacaccggttggtgcatttagaaagtatatgttatccattgggtcaatgtggaccggcatgcatctgttgaggaagcataccaagatggcaggtcccgactaaacatgttgctatctaaagtgcacaattccaatgtccccacactctctcctggatttgtgaagctgcacacacgcaagtttggtacacctttgaacaagtcgaccatgacaagtgatgagtataagaatgctgttctgcaggctaaggaacatattatggctggggatatcttccagattgttttaagccagaggttcgagagacgaacatatgccaacccatttgaggtttatcgagcattacggattgtgaatcctagcccatacatggcgtatgtacaggcaagaggctgtgtattggttgcgtctagtcctgaaattcttacacgagtcagtaaggggaagattattaatcgaccacttgctggaactgttcgaaggggcaagacagagaaggaagatcaaatgcaagagcaacaactgttaagtgatgaaaaacagtgtgccgagcacataatgcttgtggacttgggaaggaatgatgttggcaaggtatccaaaccaggatcagtgaaggtggagaagttgatgaacattgagagatactcccatgttatgcacatcagctcaacggttagtggacagttggatgatcatctccagagttgggatgccttgagagctgccttgcccgttggaacagtcagtggtgcaccaaaggtgaaggccatggagttgattgataagttggaagttacgaggcgaggaccatatagtggtggtctaggaggaatatcgtttgatggtgacatgcaaattgcactttctctccgcaccatcgtattctcaacagcgccgagccacaacacgatgtactcatacaaagacgcagataggcgtcgggagtgggtcgctcatcttcaggctggtgcaggcattgttgccgacagtagcccagatgacgaacaacgtgaatgcgagaataaggctgctgcactagctcgggccatcgatcttgcagagtcagcttttgtagacaaagaatagtgtgctatggttatcgtttagttcttgttcatgtttcttttacccactttccgttaaaaaaagatgtcattagtgggtggagaaaagcaataagactgttctctagagaaccgaagaaatatggaaattgaggttatggcttatgactgtcgtttgttcagtatgaaactagatttccaactgtgccttagaagtttgcaaatgtcttgttatataagggccggctcagtagactagtcatgtcttttaatacaactcatgtggtcctctttgttgcatattatattgcatagttatatgttagtgatactcctct

SEQ ID NO: 23099 - DNA, 3051 bp, Zea Mays
cgggagagggtaccataaatacatttgtttccgccaattattcgtcgataaccaagaacaaaccattgttggacgcgttcccctcctgcacgcaacctcatctcgtcctccagatcctggatggccgtcctccttgataccttgcctcgcgagtgctctcgagctaggactgggagaaaacaacaaacccgcgttggatcctgtatcgatctggagaaatttctaagtcgtcgtcgtcgtcgtcgttcggttcggagcggatctgaggcgacgatggctggaggcggcgggatctcttggtctgcagtcctgcttcacctcgatggatgatgtctctgcgctgataattattggatcaatttcgataattattagtagatctatgagatatgccgcctggaagaggcgaggtaagctgcagcatgtaaaagtctgcgtgcgtcgacagcaaaaaagagaaaaaaagatgtgacatcctagaggaggcctttgccatgatgggtgcgctcgcatggcaggccaggtattaataaaaagatgattattgtgtgccgggggaggagatcgcacgggggttgatgtttttggccccggggtctcctccctcatcttgttccgtgttcctgtatccgttgtttccgcgcctgttggtccgctgcgcacgccggatttttgcatcgagcacggagatctacaacaaaaacatggagctacgacgcgactcccaaggtacaatcggtaattatgttcaaacaatttttaagtcgttctgcgctccttctattacgagcaacgttttatattctgtgcttgcataatgaatcgaagaaatcctgacaccaatcgaactgaagatcctgaaacgcacgttaataccgttgacgtccgcttcacccagctcgattttcagtcttgtaatactaatcgctccatgagtctgaagtgtgcaaaaatttaggtcgcagctacacaaatttacatgctggttctgttcaacccgtgaatctcctaaggtcacagcgtttttatttcattctatattatatttcagtctggactaatgttgagatctccatatgtatctacgtctaagcatttttcatttgtatttaccatgttggtcaattgggatatttgtttcttgtatgttagcatgtttgaaccatagcaattggtggacgtgtgtagagaagattgcaaaactgcagtatgatggattccactattcatcaaccgagatcatggcgcgcttcaatcgtggctacgctgatggggaattgatccgttatggctcgtggctgtggagatgtggaactcattggttatagtgtgcttcaatcatgggtcatggcgatgctgatggaactgatttgttaccaaggtttaagttttcgctaccgttggacggcctgactggtactttgccctgttgactgtttgagaacgtactgcccaggtttacttaatacttgctgctttttgacggtactgtacatattgttcgacaatttatttcttggcagttcaattcgtccatttagaatttctaggggcacgagagcatgtgttaccctggagatcaatttcatgctgctttttgtaattgatcatgctgctttttgttacaaagttccctattctattttcaatttgattgagggttgcaaaattcatggcgttgtgagggaattgattccagtgaaggcgatggcgactggtaatttgatatcggtgggttgggaattagactatctccaccagattgtctatattcaaattacgctctacaaacaatataatttacactatgggtctactatattgtagattgtactgtttataaattgtagttttaatatctaattgtagattgcattgtttataaattgtttatagattgtttataaattgtaggtgttttaattatatatggtcattcatataatagagttttgggattaagggcccctttggtagggctctggcttctccaaaaacggctttaactctggctcacgaggtgaaaccacttctttagatgagacaaagttattttaaaaaatcatttggcaaaacggcttataggttgtttttcagaaagatccttatatatgtatatctctcctgtacgtggctagggattgagggcaggaccaaaaaataataatctggactggtgggaggactatagtgcaaaaataacgtgagccgaagccgggtgagccacttttttttagttcattttggaaaagtacttcactggtgaagccatctgaaaaagaggtgtttgacataacttttgcatgagccagagccgaagctgaaaaacattttttatcatatgcagcagagtatctttttaaaattttagtttaattggctgcattttgttctggttattttctaaaattatatatatgcaattcatataattatcatttaaccaagaatatatgacaggattataagccgtgactttatataaaccgtaattttaactgggaatatttaaattgtttttcatcattgcattttgttttagtctcgaagggtgccgtgcttttcatttaggtccttgttttaatctcgatccaccggaattgggtgtttaaatctctagcaagtttggttgtataaatatatcatttgaatattcgttctttttgtatgggtctatttacagaacgcttggttgtgaacacgaatattcataagatatatttatactttttaaaggtattttatggctattaaatgtagctgcgtctgctcgttgatgtgtggatctttcctcagctcggtgaggtcatccgtttgactgctagcctaggtgtgctgtctcggatggatggtggttcaattccaccaagattctttagtgtctgttcggttagtgcctgttcggttagctaggattaagacctgaaactatttagacttatcagttttaatataaataaaactaacattccacgtaaaacagttctaaaggatccgttccgaacataccattgctttaggatgttttatttttgtttagagactaggcct

SEQ ID NO: 23100 - DNA, 1745 bp, Zea Mays
cgacgtcctggtgtctagacgtgaggatcagctcaacaaagataaccttgcgcatcctcctaagaagatcaagactacccagccaggttctacagaccctcaaaaccttaatcgttagatcatcgccgttctcatgaagggcttatattttacggtgagcacattcttttgctgatggagaccactgaacctctacaggatatcatgtgtgagtttcgtgctggtaagatgtctcatgagggaacacgagtggttccagacacgcgcaagggtcttgtccgcgttggtaggggtgaagagggattagtccattttcagtggcttgaccgtggacagaacatagttgaagatgatcaaatcatctttcctgatgaggcggtctttgagaaggtgacagaatctcctggagggtttacatcttgaagtttaagcaagacagcagaaaattcttcttctggatgcaggaaccaaatgctgatggggactcccagacttgcatgcaagttaatgcctacataaatcgatcattagatgctgaggctgatcttcgagtacctattgaagcagaaatgtctgaagatacggctgatgatgatatctcttccagagctgggaatctagttgagagcatgaccgctgatttggctggtgaagtgacgtctgctgctggacctgtacgcttggaggatctgcagagaattctgagtgcaatacagtcatcaggtgctgcagctgaccctgatgctggagtaggactaggagacatcttgaagcctgatctggtcttgccattaattgaggacttgcccattgaacaattggcatcacatcttccggagggtggctcatggagtcctggtgatatcgttgagcttctccaaagtcctcctttgcgccaacaattagatgcattcacccacgttctgcggactgggcagatagatcttgctcaatttggagttgaccctgacaaatataagttcacggtggtgtcgttcctggaggcattggaagactcggttggaagaggtgcttctgaagctggagacaaggatgcagaggtcgagcgaggcagtggaaatgatgccatggacgagagttgatatccgtgtactaggtgtctgaattcatacgtgacaagtcttgtgttgttgttttgggtagaacgctagctcatagtattttgggcttctggcacacagaaagcaagtttctggacaagttttggacattattgctgctgtgagatgtagtgctaggcaacagatggtctggttggtggatcatggattccatggcattgagaagcttgcaaggctagattgattgtgttctgcgggggtaaatcttgcgtggcgttttgaacgtggattggtaaacagaatagcatcttttgaacgtcggttgttccatgtccacagctgatggtggtggcctcgaatgtcgtactgtacgtccatgtcgatgattccgtcgcaggagcctactactactatatccctgttctatgtaagatatgtgtactccagtacaaacagtatatggacagctcaggatttttttatattgttctacacatacatctttagatgatttttatggatatgatgagtcaaatcttgaggttagaacattatcgaattcataacttacctccaatgacgattgtatggcccctagaatccatttatctcattgagattattgaaatctttactgctttaaaacactagttttatgtgtca

SEQ ID NO: 23101 - DNA, 1326 bp, Zea Mays
ccgcctgacctccctcgagctcctgccgcgcctcccgcggggccctcgcctgccagtccccgctcctcctcgtcgcccttttgccctccttcaccgaggcgttattccacgtctcgctccgctgcctccaccgcttccgcttcccctggcgcccccctcccgccgcaccctccactactacccccgaggatcctgagcagctctccacctcccccaaggtccccgcgccgttcactcgcgtcatcatccctgattcaattatggggcgagtgaggcctcagtgaaagaatttacttggcttgagtcaggccaagccagtgcaaccaaaactccatcttttgtctcctggaccattcaattatggggctagttcttcatataaagccatgccatgcctttgaggctaatgctactgtctgcctctctcctgtgatttcagattggtcctagagacatgggcctaaaggtgtttcattggttgaatcggaggatgcattctaatactgagtactgcagcatccatggtagcaaagccatggaggacaaggactctgtgcctcatagtgtggttgagaaagatactgaagcccttctgctccatgatgtgcttcttaatggtatacttgcaattggcacacttggccatcacgtggactcactttgccctgtggcttgcattgaagaagatgatctctttatcatggatgatgagaaagcaattgtggaagagagagatgatgaggaacccaggaatgatcaggtgaaagaagatgttgcattggaaacagagccatgtgaaccagtatggcctattgttgagcctgctaagatgcattcattgtcaatgaaagaagacaactttacatgctttgtagcagaagaaatcctgatacgtgaggtggaagatgggggaggtgctaatatccaggaacgaccacttctgatgttagaaaaggtggagaaagtaagaactacacttgctgatttatttgcagcagaagtattctcatcaagttctccaagggagtatagttgccaggatatcattgacgttgctgtggcatccacttcaaagcatgcatcatgcatggaaaagatgcatcaaaagaaaccaaggaagccaacaccaaaaccactgaaagcgacaagaaaattaagtcgggtcatgaggaagatgttggggaagaagatccacccagagcagctcaatgggcgtagcaatgcagagggcccccttactgcatgatgtttattcttgccgacaaatttgcttctctatttgaataattacccttttccatgtgctatttggatctgatgatgaaa

SEQ ID NO: 23102 - DNA, 2618 bp, Zea Mays
gatagggcatgtcgggtctggtgggaaaccctttcatcgtcctcctgcgtcgccagagcggagcaacgaggggcgcgcgcgatggcaggcggcggtctccagggagcgaagaagcgcaagcgcgagcacgcggaagggaaggcaaagcctcggaagcaagtcaagggaggcggggacggagcgaagcggaagagccactcggccgccggcggctacacggcccatggcggcgccggcgaagttgtcgcgaggaagaagaccccggttacccccaaggagaagcgcctcgcggccaaggaaatgtcggaggccaggaagatgaagaggaggcagcattacagccttgagaaggaactaacgaaattgtgggaaaagatgagatgtcacgatgtgagcaaagaggagaggtccaaggcagtaagtcaggctatccataaaatggatgggaaatatttggacattgccacatcacatgttactgcacgtgttcttcaaacatgtgtaaagtggtgctcggagtcagagagggatgctatctttgatgttctacagccacatttgcttaccctttcttgcaagaaatatgccgtttttcttgtaaagaagcttatagaactcgcctctaaaaaacagtttgccagtttcatatcttcccttcatggtcgtgttgccaaccttcttcatcatactattggagctgcagtcgttgattatgcatttcagcgaggaacacaacgtcagaaaaggcaattgttagttgaactgtactcccctgaacttcagctattcaaggatctgactgtgcaaagttcctcctgatacaatttccaagcttgggttgcagatatcatctgtcctgcttcatatgactattgtgattgataaaatcttggagaaaggtactgttgagtacttaatagtgcacacggccatattggagtactttacaattgcagataagacctcagcctcggatgctatttgtcaacttatcccccttcttactcaaggggcattaatcatagatggagatgaacctacaaacgctccagaactaccaaagaaagcaaaagctaagaagaaaaggtcgaaagagccacttattgttcggatcatgcagacaagggaaggattaaaactaggaattagttgcgtcaagtatggcagtgcaaaggtatatctgcacaagttattatattttaacttcaggtcaaacacgttctccgctactatccactggtgttttattcagtgttgctttagttttgtaaattttgtggtgcttgtatatctttgcaaattgaattatgcactacaccgtaccgagtagtccttattgtgaatttattttctactgcatgtactgtcttcattaacaagactaagtgggcgcgagaatgtatttcaggacaggaagaagattattaaaagtttgaagggccacattatgaagcttgctctaagtgattttggatgtctttttcttatctgcattatttctattgttgatgacacaaagcttgttaataagattgtcattcaagagctggtaaaacatttaaagcagctcatttttgacaagaatgggagacggccattgctgcaactacttcaccctttttgctcacgctatctttctccgaatgatctagcttgtctgaactacaatgtgccttctcttagttcaacagaggttgagacatcagagagtgctataggagttataacagaaaataaattagatgatgtgactgctcaagatcccaatggcttagaaggcaagcaaattgtgtttgagagcaagaaggatccattacaaaggcgacatgaactgttgataaaaagtgagcttgccgaggctctcgttcagtcatgcattgaaaatgttggagaattacttcgaacaaattttggcaaagaagtattgtatgagatggctgttggtggtaaagacaacgttctggatggcctcaccgataggatccacatgttgcacgatgcaatagcgtctgatgcggcccaaccgaagactgaagatacggaacatgcatttgaaaacttcttttccagccgtgtaatcagaagaatggtaatcgattgcccagcgtttgcagtcactctctggagaaaggctcttcaggggaagtgcaagatatgggctgaaggacacagttcgaaggtggttgcgagtttcctggagtcgccaagtacggaggtcaaggatcttgcaaaacctgagttgcagccgctggttgatgctggcatccttaaagtgccagaccctaaggttgttcaaaaatgactcgtgcgcgggggcctttttgcgccagtaaatgactcgaggaccatcccttgtttaagggatacggataggttttttgaagctcgttctgccgataaaaattgttaaatcactcgttcgtgtgtacgccagtccgttgtacacataccctggatatatggtgaatcggatacgttattttgttttaaactcggaatgctcctttttatctataaatttttttaggagatttgtgttcttgtcctgctttggaaggccaaaaattattttactcttgtttttttttaaaaaaatccgaggttcttgtaagctcact

SEQ ID NO: 23103 - DNA, 860 bp, Zea Mays
ggcatacgccaccacgcacgcagtaggcagtactagaggcatgggcgttgccgccccccgagttactgaagaaaacctggcagcactatttataaattgtggacaggttgtggactgtcgcatgtgtggagacccaaactcagtccttcggttcgccttcatagagttcactgatgaggagggtgcaagggctgctctgaatctgtcaggaactgtgctcggatattatcctgtcagggttctgccatcgaaaactgccattgcaccagtcaatccaacattcctacccaggtctgatgatgaacgggaaatgtgtgcgaggactatttactgcacaaacattgacaagaaggtcactcaggcagatctgaaattgttctttgagtctatatgtggagaggtctttcggctgaggttgcttggtgactaccatcattctactcgcatcgcttttgtggaatttgtgatggcagaaagtgctaccgctgccctgaactgcagtggcgtgatactgggatccttgccaataagggtgagcccctcgaagactcccgtgcgtccccgtgcgcctcgccagctgatgcactagaggtgtcctagggcccttttgtttactaccttgcacatagaaggagaggagatggagagcttctcactagaaggatcggaagcgcgcgcgggggggtctgcctgatgctcttgtccttgatgcaacaacaggcggaaaactcctggacttttaccctgctgttcagttgtttgctgctgtgtcctggttgctactgaaacaaactggttaaaaaaaacttgggtattggagactatgtgccctgcctgttggtttggttgctactgtctgt

SEQ ID NO: 23104 - DNA, 2768 bp, Zea Mays
ctttactagtatccaactatccatggagagtacatttcgattccactctatctcctgtgcacggtggggtctgtgtacatcaaatcgaaagaggctcctgctaaagatgttcttaaagatctcgttgaaatgtgccgaggcattcaacatcctcttcgtggcctttttttgagaagttacctttctcaaataagcagagacaaattgcctgatattggttctgagtacgaaggcgatgtggaaaatattaacgatgcggttgaatttgttcttcagaatttcatagaaatgaacaaactctgggtcccggatgcagcatcaggggcctgcccgagaaaaggaaaagcgtgggaaggaaagaaatgaactgcgtgatctggtgattcagtgacatctggatattttactcaactgtattttctaagtcatggcattgatattattattgttttttatcttctaggtaggcaaaaaccttcatgttctaggccagattgacggcgttgaccttgatatgtacaaagaaactgttcttccaaggatattagagcaggtggttaattgtaaggatgaccttgcacaattctacctgatggactgcataatccaagtctttccagacgaataccatttacaaacattggaaacgttattgagcgcatttccccagcttcagccaagtgttgatataaaaacagtactctctcaacttatggacagattgtctaactatgctgcctcaagtcctgaactgttgccagagttcttgcaagttgaagcttttgctaagttcagtaatgctattggaaaggtgatagaagcccaacctgacatgccagttgttggagccataactctatatgtatcacttctgacctttactctccgtgtacatcctgatcggcttgattatgttgaccaagtgctgggtgcatgtgtcaagaaactttcaggcaaggcaaaacttgaagatagcagggcaacaaagcaaattgttgcacttcttagtgctcccctggaaaaatatagcaatattgttactgcattagaactttcaaactatcctcgggttatggattatcttgataatgctacaaccaaagtgatggctgtggtaataattcaaagcataatgaaaaacacaacctgcatatctacttctgacaagattgaggcactattcgatttaattaaggggctgataaaggatatggatggagctcaagatgatgagcttgatgaagaagactttaaggaggaacaaaactctgtagcgcgtctcattcacatgctgcacaatgatgatcctgaagagatgctgaagatcttatgtactgtacagaagcatatacttcagggaggccccaagcgtctaactttcactgtgccttcgttagtattctcttctcttaagctggtcaggcgattacaaggccaagatggagatgtcactggggaggatgttcctgcaactccaaagaaaatattccagatattgcatcagactattgaagcactttcttgtgttccttctccagagttagctctgagactatatttgcagtgtgcagaggctgccaatgactgtgatttggaaccagttgcttatgagttctttactcaagcgttcattttatatgaagaagaaatcacggattcaaaggctcagatcactgcaattcacctgataattgggacccttcagcggatgaatatatttggggtggaaaatagagacaccctcactcacaagacaacagggtactcagcaaaacttctcaagaagcctgatcaatgccgagcagtatatgcgtgttcacatcttttttggactgatgaccaagatggtataatggatggtgaaagggttctcctttgtttgaagcgtgccttgagaatcgcaaatgctgctcaacagatggctagtgctacaagggggagcagtggatctgtaaccctatttattgaaattttgaacaagtacttgtacttctttgagaaaggaattccacaaatcacaaacactgtgattcaagatttgattgaattgattagaacggagaagcaaagtgataactctgtagctgatccatctacagaggcattcttttctagcactttgcggtacattgaatttcagaagcagaaaggtggaaccataggcgaaaaatatgaacaaataaagacaagttcatgactcggaacaaacacgtcacgatgactggttttgattttgttaagagaattggatcatttgtttgacatggttcagtgaaatagaaaccgccagttttagtagcatccaactaaaggatgtttacatgagctgttattctcaaatctcacggtctgagcgggtttgctcgcccattggcaacattttcaggtttagtcaggtggcaataagctgtcctttggtgagcacaggtctgtacaggattacttgtgttcgtgattggttctactgctacctgagtttcattgttgtatatttccgcccctcatacaaagcttatggattttagatttctgtaacatttggagtgcatgcctccatttctgagttctggctggacatttgatgattgtttcatagcatttgaacattttgtttaaccactactcggctatgtggcgtgttactcttcactcgttcttgctgagaacaatcacaagcactgaagcacgtgtgcccatttggccatttcaccttttggagtactttgagtcctgcttgaaccagtgatagattaccgatacacttacct

SEQ ID NO: 23105 - DNA, 970 bp, Zea Mays
ccgaccgttttcattgctcacactgctgtctccgttccatcccctacgagatctgccccctcgccctcgccctgctccaatccccatctccttgcggcccgatccaccctgctccaatcccccggcgatggtcgtgtgcaaatgccgaaaggcgacgagggtttactgcttcgtccatcaggtccccgtctgtggcgtgtgcatatgcttcccggaacatcagctatgtgtggtgaagaactatgctgaatgggttgttaattctgagtatgactggccacaacactgttcgtcttgcaattctgttctcgaaggtggaactgaagaaacaacacgattgggttgcttgcatgtggtacacaccaaatgcttgatatcacatatccaaagttttcctacccaaacagcaccagatggatacgtctgcccctcctgttctgcacccatatggccaccttctagcattaaagatacaggttcgcgccttcacactgaactgaaagaagcgatagtccagactggaatggagaaaaatgtatttggaaatcattatgtgacaatagctaaagctgatactcagacacctcctgcttttgcatcagatcctctcaaaactttatccaatcgtgatgatagagaatttaatagtgcaaatgcagctaaagatgctgctttgccatcaacattacattctgggatgtactcttctgctgtaggatctgagacaactattcatgttgatccagaaattgttgaaatagagggttctagtcctgtatcgacccaattttcagtgcaggactccaacttcatcaggagtccaagcccacatgggcctggtgctatgacaagaaaaggcgctaatactgttgatagacaaaattctgagatttcttattatgctgatgatgaagatggaaataggaaaaagtatactaaaagggggatgtcttgtttcacgaattgtgct

SEQ ID NO: 23106 - DNA, 6535 bp, Zea Mays
ctcgccttccttcgtgtagctctctcacccccaaccccaatggtcagcccgtgagggtgaggccgtgaccatttaaaagtcgttctctctccctctctctccaccacaccagccaatgggtgaacctaaacccccacgccccactcagtccagccgaccagccaccctcaccatgcctcgccgcgcaggagccgcctggccatgcttcctcctgctccacattatcgcccacctacacctcgccgtcaacgccgccgacgccgacgctctgctcaccttcaagtcctccctcgaccgctccgaccgcctcccgtggcgccccgacacggcgcccgctttctgcgcctcctggcccggcgtgcgccagtgcgcccccgccggccgcgtcaccaagctcgtcctcgagggcctcaacctgacgggctccctcaccgccgcgctcctcgccccgctggccgagctgcgggtcctcagcctcaagtccaacgccctcacaggccccatcccggaggccctcccgcgcgcgctcccaaatctcaagctgctgtacctcgccgacaaccgcctccagggccgcgtccccgccaccctcgccatgctccaccgggccaccgtcatcgtcctctccggcaaccgactcacgggccagatcccgccctccctcgccgccctgccacgcctgacctcgctgctcctcgaccgcaacctgctcaccggcgccgtgccgccgctggcgcagcgcacgctcagggcgctcaacgtctcggccaaccgcctgtcgggggagatcccgcgctcgctcgccgccaggttcaacgcctcgtcgttcctccccaatgccggcctctgcggcgctcctctagccgtccgctgcgtcgctggtggcccgagccccgcgccgctcaccgcggccacggcggctttcgcgcccctgcccccgccccggaccaaggcacgacgcggcaagaacgccgccgtcgtggccggagccacggtggcaggggtggtggtgctggccatcctagtggcggcggcgctcatggcgtcgcggagagggaggaacaagcgcgtcgccggcgacgtcgacaagggcaacgccggtacagtggcggcggaggcggagcaccagacagcacaggcacagcagcagcatattcatgcatcctccgcggcgccggccgcaaccacagccgggggcgtcggtggccgggagttctcgtgggagcgcgagggaatcggcaagctggtgttctgcggcggcgtggcggagatgtacagcctggaggagctgctgcgcgcgtcggccgagacgctggggcgtggcgaggtaggcagcacgtacaaggcggtcatggagacggggttcatcgtgacggtgaagcggatgcgcgacccgtcggcgggcggggtgggggccgccgagttcgggcggcgcgccgaggagctggggcgggtgcggcaccccaacgcagtggcgctgcgggcctacttccaggccaaggaggagcggctgctggtgtacgactactacccaaacggaagcctcttctccctcgtgcacggtcagtaataacccaacccagcctacatactcgttgcttttgattttattaccatttcttctctctgtctagggagaagtactgtaggaaattgtcatggaaaccaaaactaaaccaaaatatagacgactgacggtaattccttccaatccaaacctctcggaaacggacattgtggcatgcattgatgcgagtcccctctcgttgccatgtgtgatggccagatcacattgaagatacccaggctgacccagccagccagggccacggatttcttgtcacttctctcaccatggattgcgatggacggaccatcaagaagtccatgtctctctcatggagtggcttggcttgggtagctctaccctcctcccatggatctgccgtgcaatgcagttacccaaaaggaccctttggccccttgcctttatttgttgctgtttggctttggcaggctggacgtacatgcacgcctcatgcttcaccttaaagttagattagactaggacatcaccttcttgctcctcctctggttctagatataaacacaccatcgtcatggttcatagttcttaatctggcacaatttgacgaataacattttcattcaaatggaaacatattgcaaaattatcgttaatgatgaaactagtcacatcacagagcttgacttagggataatgcaaaatgggattatattcagtacggctcgtgttagattggccagtcctcccccgagctttaaaattaaataaaagccagaatgaattggcatcctactagtcgcagtacagtacgagcacaaagattgaacttgatggaaggcagcctaggcatcaggcatgcatgtgactggcagagaggaagcagagcctgctacctaattactccttcattcatgcaagtgaagacccacaagacatgaattggttatttccgcagtattgcaatccatagatgagtgtggtatcgctagtactgtagtaccagatcgcacaatggctgaactgatgttgtgggttcaaagagagaccatgtgcatctggctgtgctgcagtcaaatctcaactctttctttctaggtcgctcgttctatgcatttaattttataacttaatttctactgcaagagattcctattagttgcatagattgagtttgacgtcatccaccacctcaagacccatgaatagaaggaaaacaaattactaagaagttatgttacaaattttgatatgttttcgtgggccttcagtggtggatgtgaggggtgaaaaggagcgtttgcatggggggtgtagagatcccccccacccagaactggtacggcaaaagctgttggagtaatctaggaaccctaaacaagagcagaattggattaagcagccatactttagaggcgatgcattttgaatgggtagtgaactgaaaaacaacaagaaaaatttaaaaaacccttctcatttcatttcatttcatgatgatagagtaaagaaaagccttggctaactgcattgtttgctggtacttggagatccatatggttcatggaagcctccatcatggattcatggaccagaggacccttcatctccacagtcactccctcctcaagatgttgtataagtagaacttctcatgaaaaaaaagaaaaaaaagtaataaccaacagggtggtctcctctgtctgtctgtctgtctgtctgtctgactgactgactaataaacaaacaaataaagagtcagaggctacagtgcatgaacatgggtggttctggttcatgtgatatgtgagtgatgagtcaattgactgctctgctagtcactgccagtgctaggcttaaagcttaaacggagctaataaaatttccttttgtgtaaaatgaaatgttcccttttgtcttattattgttagcaagtgaatagaatacgtagcacatgccttgcattcagtggccaatctttcttagtgtacatataagctatacaaattattgatcagtaacactagctagggaaaaattgatccacgatgtacgtttggttaagtcaactcattgaaacggttatgctgtccattaccatgcattaataggattactcctcacaatgaaccaaggacggaactgaaggaaagaaaaaggccacccatgctagttgatggttggatctgagacaatataccctgtggccacgtactagttgctatttcagtcaagcactagcagaagctaagggacaaacagagctgcctgggggcttgtgatcttcagacatgtctatctacacggacacggtggtccaggcgtccctgcctgccatgcattaacatttaatcttctcgtatatatatatatgctgcgtgcagggtcgaggccgtccagcaagggcaagccactgcactggacatcgtgcatgaagatcgcagaggacgttgcggcggggctggtgcacctccaccagtggagcatcgtccacggcaacctgaagccctccaacgtcctcctaggccccgacttcgagtcgtgtctcaccgactacggcctgctgccgacgctgctaccctccaacgccgagctccactcctcgagctccctgttctaccgcgccccagaggtacgcggcgcccacgccacgtccttggaattattcacgcccgcgacagacgtgtacagcttcggggtgctcctgctggagctcctgacgggccggacaccgttccaggacctcatggagctgcatggcgacgacatccccagctgggttcgcgcggtgcgtgaggaggagagggagacggagtctgtgtccgccggtggaggtggagccgaggagaagctcacggcgctgatcaacatcgccgcgacagcaccctgtgacgcacgcagaggaaaaatttgcaaaaaagaccaggcgcaggcggcaaaaccaacagaacaggcctatgttcccatcgagtcgagacgagaccgtcctccgcccgagtctcgctcgctagctagggtttccaccaatggcggcgcccaccacctcccgccgcggccccggcggcgcccgcaacatggacgacgagaacctcaccttcgagacctccccgggggtcgaggtcgtcagcagcttcgaccagatgggcatcaaggacgacctcctccgcggcatctacggctacggtttcgagaagccctccgccatccagcagcgcgccgtgctccccatcatcaacggccgcgacgtcatcgcgcaggcccagtccggtaccggcaagacgtccatgatctccctcaccgtctgccagatcgtcgacaccgccgtgcgcgaggtgcaggctttgattctctcgcctactagggagcttgcttcccaaacagagagagttatgctggctattggggaccacctcaacgtccaagtgcacgcttgcattggtggaaagagtattggtgaggacatcaggaggctcgagaatggggtgcatgtcgtctctggaactccaggcagagtctgtgatatgatcaagaggaggacactgcggaccagagccatcaagcttctagttctggatgaagctgatgagatgttgagtagaggctttaaggatcagatttacgatgtctacagatatctccctccagaacttcaggtggttttgatctctgcaactcttcctcatgagatcttggagatgactagtaagttcatgaccgaaccggttaggatccttgtgaagcgtgatgagctgaccctggagggcatcaaacaattctttgttgctgttgagaaagaggagtggaagtttgatacactttgtgatctttatgatacactcaccatcacccaagctgttattttctgcaatactaagagaaaggtggattggctcactgaaaaaatgcgtacaaataacttcaccgtatcagctatgcacggtgacatgccccaacaagaaagggatgccattatgggtgagttcaggtctggcgcaactcgtgtgctaataactacagatgtttgggctcgaggactggacgttcagcaggtttcacttgtcataaattatgatctcccaaataatcgtgagctttacatccatcgcattggtcgttctggtcgttttgggcgcaagggtgtggcgatcaatttcgtgcgcaaggatgacatccgtatactgagagatatagagcagtactacagcacacaaattgacgagatgccaatgaatgttgctgatcttatttgagcagcaagaggatcgggaggggagcttcttgtgttggcttgaggcccttggcgcgagtgtggctgtggactggagcagatgggctttgtagttgggtgtggagcagagattatttccgtttttgccatggcatgaactgtatatattttagctcgctccagctcatgtaacactttgttgctgcgtttgtgcttgggatacgaagacctgtgttgatggcttcgttagtgtgacactgatttggcgtcggatttttgtttgtcatctgtcattcctgtgctgatctgaattgctgtttgtttattattattattattacaattactatcaattattatggttgactggtattacaattactatcaattattatggttttgactggttgcagagccgagaattgtgattctgtgcttattacatgaacctatgcttttcgtagcaggatttattattactaggggcgccctatccagcattgggaaagcatgaacaagtaattatacatgctatatttaaattagttaattagttagaggatgattgaatcttcaacaaaacagtttaatctggagaggaagaaagcaaatatcaaacaacacacacacgcttatgcttgataggaaacacattatgattgaatgaatgcaggttcttgatttcaaatacttatgctcggcagtagaaatccatacttatgctcggcattagaaatcctcggcacacgctgggtcgaacc

SEQ ID NO: 23107 - DNA, 3514 bp, Zea Mays
tttccctccagaatccctcaacggaacgctgcagcagtgcaggtcgctttcttccccaaaattttgaaccccgaaccctagctctgctcctcagttccccgtctccatggacatcggcggcagcggcggcatcatattgtcgcccggatcggaggatgataagtttgcgcggaggcgctcccgccgtgtgagcttcgcggacaccaccgcggtgcacgtgttcgaccgcgacgaggacttcgagacgcctcccgaggagcgcgagcccgactccacccccgcacccccttctcccaggaggtcctcggttggccgggaggttgaggacgacacggaggaggatttcaaccgcccccctgtcatcttcctccacgacgtcgactcgtcgtacccagacagcgccgctgaatccatcgcctccgccgatgatgaaaacttttttggacctgtgtcggcaagctttattcaaacaggaagaccatcagattctggaatgtcagaggatgacaaccatgatataactatggattccaggacgttctctttgcattttcgcaatattgctccaccagatgactgtacagcctactcagctgggagtctaatgacacctaatactgcatctgagggacccctgaaggaacttactgcatctaatcctgcaagagcatcaattaatggccgagatacattgactgacatgagtttgttgagtggtaaccccagaacttatggttatgataagttgtcacccacgttgaacagtatgatgaagaagataaaagggagcaagcaaacaaactctcctaaacttgagcacatttctatgagaaatccagtttcgaccagcacagatctgattcaagatgacaatgaaatgataattgatgtccaggagaattcaaagaactgcaaccatgatcacatggatgatgaccctggtgccaataatactgcagaacctcctgcaaagatttccccagcatataagtcattcatgattaatggtgatgtgcaatcccacctagtcgatcaatcttcgtcaaaagatcgaccatctggatcaaattgcactgcaagtgtttcctccatgtgtaatgttgacatggaaacccatcttttggatcaactacctggtaaggataacacatatgctgcccagtcgtcaagtgaagctactgccattttgctgatggatgctgagcagctgcggcagaaaaatgaggtgatggatacagaaacagttctacacactccaagaactgcaggtctgcagttgcaagttccacgaggatccatatcctccttacgctcaaaaaggcataagcttttcactaatactgtatccaatagtaaagtagcaagacaggagggttgttcttcgggtactgagtttgttcaccatgacaagagactttcttctctgaagcatcaagaattggctgcagcttcccagttacaattggttgagaagaatgaacttggtcatcgagcaagtgacatgttcagcaatactgaagatcatgattctacgttatctgtttcttctcattctgttccaaagctgaagaaaaccaatgaatcttttgtcctaggcactcctcgaagacatgggctaaatgagtctactaaggtcctagatacattatgtcatgcctttactttggatagccaacctagtcgtgaatgcaactctcatgtggatttaaatggtgttggaagaaagagaactgctgaggaaaatggttatgctgtgcaagagtgtcctgaaaaaaccactaagacagcaagaagccctagaaaatctagaaaagagattccttgtgtatctcagccttctatgattgaagaaaaacagaatggtgctcatgataatggaaagtccgtggatattgattggagcaaggtagtatgtactataactaatgccacggagcaagttttgccagcatcaataagcaagtataatctacaacagcttgacatgctaagcgataggttggatgagattcatatggctagaaaatataaaaggctttctactgctgtgaggatcaaagctttctgtggtgataagcaaaagagattagaggaggcaaggtttctccatgacaagcttttctatgaaaaggcgaagctacaaataaataatatgaagctagttaaactccaaaaaaaggctcaactatgtcaagatggaattcaagagtgctgctttctgaaatccaagattttgggcgctggacacatggaggattcttcacttcctgcagctactacagtcagtgctggtgatagacaggaagaacttgatatcatttctgaaaagaggcttgaactcaaaattattcaacggaaggtggagaaattaaggagttcccttgaatgttttcacaatattgaaggtggcattggtagtgatagtgttgtgaggtatgctgaagagcagttgatgatgagaaatcagcatcgcatcatccactggcaagcagggctctgcaagttgaatgacatagttaaaaggggcaacaagtgtgatatcatcctcaactatcacaatttgttgttccaaaggatcatcttaaacatcagtgatacatctagcatatttgtgaacaattcactgaatggaaaccaaattggaaagacatttccaaatttggatgcatctttggcattcaattttgttttcgaagccgaggagaaccaaagagttagtgatttacagtccttgcagaagaagacaatggaaacaagcttgctgcttggaaatcttattgatgttttagaagaaatcaaattatctaagttggagttagtaaatcttacctccgctgcttttgttttggagtcccagacacgtaaacttggcctccacctgtctttcatgagtttcaagagtggcaagaagattgctttcatcatcgacatgacagacttgaaccgctcggtctacccttctgaaccatctgagctcattaaggtttttgaagcacatactacgctagcacagccaagcatagacgagaccatggcttctataaggaacctgcaatctggtcgcacagcaatactaagattgtgccggatggtatcccggctgattcatggttacaatgatgacctgatcactggagtgcaagctgtaggaagtaaacatcatccggatatgtaggtagtaggcattaacagtgttggttttgtttttgtttttgcatgtaggcttaagatgtttgaatgcataaagcagtccttttcaggtggacgtgcaagcgattttggttactgcaaatccttgtaactgcccgtttattacagcaacaatgcataactggtagcttggtgcgttagagtgatggattacagtcttgcagatatgtcggcactgttgtatacgagttagtctaaaaggagccaggctaatgttttctccccgcagctgggactgttgctgaaagattgtgcattttttttacaacgactccaatatatttaattaagcattgttacgcaa

SEQ ID NO: 23108 - DNA, 2990 bp, Zea Mays
ctgctccctcaggcctcagcaggcagcaagcactttaagctgtcttctgctgaactgaacttcaggaaatcagcatgcgactttaaacttccggggaataaactactcagctgaaatgtatttaaatgggcacaaggaggtactaccaaaaggaatgttccgaaggcacaacattgatattactgatatcctccatcctgatggtaacaatctgcttgctgtccttgttcatcctcctgatcaccctggcaaaattcctcctcaggggggccagggtggtgatcatgagattggaaaagatgttgctacacaatatgttgaaggatgggattggatgtgcccaataagggatcgaaatactggtatctgggatgaggtatcaatttccatatctgggcctgtgaatataacagacccccatctggtttcaacttttcatgatgattttaagaggtcatacctacattgtacacttcagttggagaacaaaagttcttggattgcagattgtaccttgaaaatacaagtttcaactgaacttgaagggaacatttgtttggtggaacaccttcaaagttatgcaataacagttcctcctcaatcagatatagagtacaccattccttctttattcttctataagcccaacttgtggtggccaaatggcatgggaaagcaatccttatacaacattgagattagtgtggatgtaaaagggtttggagaatctgattcctggagccattattttggattccgcaagattgagagtacaattgatgattctacgggtgggaggatcttcaaggtaaatggtgaacctatttttatccgaggagggaactggatattgtcagatggccttcttagattaacaaagaagcgatatatgaccgacatcaagttccatgctgacatgaacttcaatatgcttagatgttggggtggtgggctagcagagaggcctgacttttatcatttttgcgatgtctatggtctgatggtatggcaagaattttggataactggagatgttgatggccgaggaattcctgtatctaaccctaatggccctttggatcatgatctctttcttttgtgtgctagagataccgtgaaattactcaggaatcatgctagtctagctttatgggttggtggtaatgagcaagttccaccggttgacattaacaaagcactgaagaatgatttgaagctacatccaatgtttgtaagttaccagacatcaaaaagtgaagtaatatatttatctgaagaatcaactgaccctagtaaataccttgatggtactcgggtgtatgtgcaaggatcaatgtgggatggttttgcgaatggtaaaggggacttcactgatggtccatatgagattcagtatccagagagttttttcaaggacagcttctacaaatatgggttcaaccctgaagttgggtctgtaggggttccagttgccgcaacaattagggccacaatgcctccagtaggatggagcattccgattttaaagaaaagaattgatgggtacatcgaagaagtaccaaatccaatatgggactaccacaagtatattccatactcaaaaccagggaaggtccatgatcagattgaactatatggagccccaaaagacctggatgatttttgtgaaaaggcacagctggtgaactatgttcagtacagagcacttttggaaggatggacttccttcatgtggacaaagtttacaggtgtcctaatttggaagacgcagaatccttggactggactaaggggccaattctatgatcacctccaagaccaaacggctgggttttatggttgccggtgtgctgctcaacctattcatgtccaactgaatttggttacctattttgtagaggtggtaaacactacagctgatgaactcaaagacatggctgtcgagatttcagtgtgggatctagatggtgcatgcccctattacaaagttaccgagaaaatagttataccgccaaagaaagtgaagcaaattatcgagatgaaatacccaaagatgaaagatgccaagcctgtgtattttctgctcctcaagctcttcaggctgtcagacaatggaacaatctccagaaacttctactggttacaccttcctgggcaggactacaaatcgctggagcagtatcagcagaaaaagattccattaaaaattgattctgatgtttcagtctcaggcacgaggcacaaagtaagaatgacagtagagaacatctcaaagaagtccgtagtagacagcacacgttcagtatcagcaatggatctaggtgatgcaagtggttcccacagcactcgcaaagaaactactcggaagggaaacgggagcgacggactgtggaggaaaatacgcagtggcctcggggtcgcaagaccaagcgacaaccgaagaacactggaggtcagcgggaccgattcaggggttgccttcttcctccatttctcagtgcacacctccgaatcatccacggacggggaggaatacaatgacacaagaatcctcccggtccactactcggacaactacttttcgctgacgccgggggagaacatggccgtcgacatctcgttcgaggctccccagggatccagtcccagagttgtcctcagaggctggaaccatcatctggaccacgccgtgatgatctgagatccgtgtaataaaataagcacgtaccgaataaagtgcagacatcagatcgtgttcgtgcctgttgttggattataattaggcttgtcctaattttattttattttattaaataaatcgtacgacctaaattgaattctaggttaaatggcttcaaggtactctatatccttcgtaattgttttagatgtcagtgttatttaaagcttatatatacatccttataaaagtataattattgtatttagagaagagaaagtaaaaaaagaaaatataaaaaacagattgc

SEQ ID NO: 23109 - DNA, 1844 bp, Zea Mays
tttttcttcgtttgcatgtgtggattcataaatagaccaaacatgatcacacttacaggattttcgtttctagtactatcagcgctgcttggctatatatgttcgcctcaccttgacactgctccccctaggtgggtccatcttgcccatggattacttctcttcttgtaccagacttttgatgctgttgatggtaaacaagcaaggcgtactagctcatcgagtcctcttggagaactttttgatcatggatgtgatgcacttgcgtgtgcttttgaagcattggcccttggaagcaccttgatgtgtggaggatggacactttgtttctgggtagttgccgctgtcccgttctatcttgcaacctgggaacacttctttacaaatacgctcattctgcctacaataaatggaccaacggagggcctgatgctgatctatgtatcacatttgtttacattttttactggcgctgaatggtgggcacaggattttcggaaatcactaccctttttcggttggattccacttccatttctttctgaaattgaaattcctttatatgttcttgtgctgattcttatgatcgtatgtgctgttatacctactgttagatccaatgtcagcaatgtccaagaggtagttgaggcacgaaaaggaagcatggcattagcattagccatgtttggctttgctactctgcttttggaaacaatccttccttttattgtactgttagctggagttgctatctggtgctatctttctccttcaagtataatgaggaaccagccacatttgctcgtgattggaactggctttaattttggatatttggtgggaagaatgatacttgctcatttgtgtgatgaacccaaaggtctaaaatctgggatgttcatgtctctggtgtttctttgttttccaattgcaaatgctctcattgcaaagatcaacgatgggagtcctttagttgatgagcttgttctgctgctgctttattgtgcatatacagtgggtctctacctgcacctcgctgtgtcggttgtgcatgaaatcaaggatgcccttggaatctattgcttcaggataactagaaaggaggcttgaactttgtagtgaagatatattattattacttcacaagtgctagcgaggagcaacacagttcgtcaccgtgcacgctgggagtgtgtgtgcccctctgaaatgccacagccatctgtttgttgagcagagggatctagggattgtattgcgcagttatcttggtcatataacaatatagcagtgtgatgtacactgtagtagggtcgttagaagatatactgtgaaaaacttgcttggagaaagtgatcgtagcatgtgattatcttggttattgtctacaccctccgtttttttttaaaaaaaaaatatgtattatatttcgctataaatctagataaacatctatttagactcgtagcggaaacgactcttttttttgtgtgtgatgggcactcttttggggacggagatctgactgtttatgcgtttctgccatgacagggatttttggccaagcctgagcctgacggctgaacgcgtcggccggcccctgccttctgatagctcgatagcagtcgacggcctcttctccgtctcgtggggcgtttgcgtcgaggaagaaacaacaatgcagcctttaagccttcaattctcaggcccagtttgctgctttgcatgcttgttcgtctctcaggctcttcacggtcacggcgcagcgacctggcatgttaaaaaaaatgggccgatatatatatcatgtgcaggttttctttaccacaaaacttttgcctagc

SEQ ID NO: 23110 - DNA, 3182 bp, Zea Mays
agcatgacaggagagcagattcaggccccttcaagtcccagggatggcgaggatgttgcaattaccattgggcgccccaaggaaagtggacctaagttcggcaccatgatgggtgtctttgttccatgcttgcagaacatcttgggaatcatttattatatccgttttacctggattgtaggtatgtcaggtgtatggcagtcacttgtgttggtttcattttgtggtgcatgcacatttttgacctcgatatcattaagtgccattgcaacgaatggagctatgaagggtggtgggccatattatcttataggccgtgcacttggtcctgaagttggagttagtataggattatgcttcttcctcgggaatgcagtggctggatccatgtatgtgcttggggctgtagaaacctttcttgacgctgttccttctgctggacttttccaaaagagtgtaacagttgtcaacaatacattagtgaatggtacagaaactgctggcacgtcaactatatctacacccagcttgcacgatcttcaagtgtatggtgttattgtgaccatactgctgtgttttattgtgttcggtggtgtcaaaattatcaacaaggttgcacctgctttcttaataccagtcctgttttctttgctgtgcatctatcttggtgtcttcattgcaccaaggcataatgctccaaagggaatcactggattgagtataaccacattgaaagacaattggggtgaaaactatcaacgtacaaataatgctggcgttcctgatccaagtggatcaatatattgggatttcaatgctttggtaggtctgtttttcccagcagtcactggaattatggctggctcaaaccgatctgcttcactgaaagatacacagcgttcgataccaatcggcacattatctgcaactctttcaacaactgctatgtacttgttctctgtgcttctgtttggagccttggccacacgggaagagcttctaactgataggcttcttactgctacggtggcttggcctgctcctgcagtgatttacattggtattattctgtccaccttaggtgcagcactgcagagtttgactggggctccaaggttgcttgcagcaattgcgaatgatgacattcttcctgttcttaattacttcaaagtttctgagggatctgagccacatgcggccactttattcacagctttcatctgtatttgctgtgttgttattggaaacttggatttgattacccccactatcacaatgtttttccttctgtgctatgctggcgtgaacctgtcatgctttctgcttgacctccttgatgctcctagttggcgccctagatggaaatttcaccattggagcctttcacttgttggggcattactctgtgttgtgattatgtttctgatctcctggtctttcactgttgtctcccttgcccttgcaagcctcatctattactatgtgagcataaaagggaaggctggagactggggagatgggttcaagagtgcatactttcaattggccctccgaagtctcagatcacttggagcaaaccaagtccatcctaagaattggtaccccattcctctggtattctgccgtccatggggtaaacttccggaaaatgttccttgtcatccaaaacttgcagacttcgctaattgtatgaagaagaagggtcgtggtatgtccatttttgtctcgataattgatggtgattatcatgaactagctgaggatgcaaagactgcctgccgccaactagatgcttatattgactacaaacgctgtgagggtgttgcagagatcattgtagctcctaatatgtctgatggtttccgtagcattgtgcagacaatgggcctaggaaacttaaaaccaaatattgttgtgatgcggtaccctgagatctggcgacgtgagaatttgacacagataccgtcaacatttgtcagcataataaatgattgcattattgctaacaaggcagtagtcattgtgaagggactcgatgagtggcctaatgagtaccagcgacaatacggtactattgacctctactggattgtaagagatggaggattgatgcttcttctgtctcagctcctgctgacaaaggagagttttgagagctgtaagatccaagtattctgcatatctgaagaggatacagatgcagaggagttgaaggctgatgtcaagaagttcttgtatgatcttaggatgcaagctgaggtcattgttgtcactatgaaatcatgggaatcacacatggagagcagcagtaacggcgctcagcaggataactcccatgaggcttacacaagcgcacagcaaaggatcaggacataccttgatgagatgaaggaaactgctcaaacagaaaggcagttactaatggagaatgggaggcaagttgtgaacgaacagaaggttgataaattcctttacacaatgtttaagttgaactccacgatactcaggtactccagaatggcagctgtagttcttgtgagccttcctccaccgccattataccatccttcatatttctacatggagtacatggatttgcttgtagagaatgtcccacgcatgttaatagttaggggatatacgagagatgttgtcacatttttcacatgattatacatacgaacttctcacctggagactctagtgccgtcaggctgttgtactatctcagcagagactggatacacaagagcgtggaatctaccactgaaatgacaagccctcaccttgaaggcaaccacgatgagatgtcagatgtgcagagctgttgttcgcatattggattcgtgaactattgaactgcagtgtcttcattcttttttctggatttaaaagatccacatagcgagctttgattcttacagattttgtagctatcatatgtaaacacttaccatcttgtaattgtaagcatacttacatgctggcccaaagacaaatgcaatccttaccttctcactgaaacatttatataggtattttttttgcatcacttgtatgcgtctaaaactgatggacttgttgagatgagcagagctgcgaattttgaatggctacccccaaatgaattttggttatgctttgtcgcaaatatttggttttaatggtacaagatttctgag

SEQ ID NO: 23111 - DNA, 2638 bp, Zea Mays
gctcaagctcaggcaagcggcagcaaggcgttggcaatcccagtccagtcgtcggagcactcgcaatttcccgtcacagctggccaccgccccaccctcacggcctcacctcctcccgctacacgcacgcgcccacctacccaaaacgaccgcgcgcggcgccctcctcccgcggtgccaccaccaccaccacctcgtcggaccatcaccacgccgatcggcagctaagcagctcccgcccccagcaccgcgagctgcgatggcaatggacgcggccgtggccgtgaagagcggcggtggcggcgccggatcgaccggggtcaccgcggcggcctcgcagtccccgcaggcggcgactaacggcggcgagcggcggtcccggttccagcgcatctgcgtgtactgcggcagcgccaagggccggaagcctagctaccaggacgccgccgtcgagctgggcaaggagctggtggagaggggcatagacctggtctacgggggcggttccatcggcctcatggggctggtctcgcatgcagttcatgacggagggcgccatgtgattggggtcatcccgagatccttgatgcccagagaggtcactggcgagcctgttggggaagtaagggccgtctccggcatgcacgagaggaaggccgagatggcccgcttcgccgatgccttcatagcgttacctggtggctatggaactctggaagagctgctggaggtcatcacctgggcgcaactagggatccataagaagccggtaattaatcctcctgataattgggctatcatgtgcgcggcacagaattctttttttctctttctctctctcctagcaattctgtagcaatccactagtttaattatcacaaaaagtcgttagatttagggatactgcgatcttttttcttcttctttcctttctgcgaacatcatggcttcgtggcgcacggtctgcccatgtgtgtgctagctggggttttggaagtctcaggctctagtttagctggggtgttgtggttggagattagctggggggagcacgcgatctgcgccccccgttgtttatacgctctgtccacataaacacctcagcacacggatatgttgacgagagcagtagtagatcgagtgattccgctgggatcttctgctggtcagactaaaggaatgtgcagttggcaacctctctaaacaaattgcgccacacactggtaggtagatggaagatttgtagagtcgcgcgccgatgcctcatttgctgtcggcttttgcttagtcagctgtttgactagcattgcagcccgacggcattggccccccaccggaagattgcttgttaccaatgcaaaacaccgccgcctgctagctagtctgtttgttacttaccatctgttagcttcttttttttccttctctctctgtttgtactataccactaaccgagtgttacatgtccacccccccaggtcgggcttctgaacgtggacgggttctacgacccgctgctgtccttcatcgacatggccgtcaacgaagggttcatcaaggaggacgcccgccgcatcgtcatctcggctcccacggccaaggagctggtcctcaagcttgaggagtacgttccggagtacgaggtaggcctggtgtgggaggaccagatgccaccgtccgccgccgccgcgcacgggttcgccccggagcttgtggagcccgggatcacctcctcgtcctgatctggactggacggggacgtcggccgggcctgcctacctacgctaaccccagattctgaccgacggccagcccggcaccaagtagaaaggctatccatactagtaccacctaattaataccgtaatctactactactactactaacaaagaagattgttgggatcgaggatgacagctagctagcgtctgctcagtcagcagcatatcgtcgttagccgcgcagtgtgcagctgcgtcagctctgccattgctactgctccttttgggcttttgtgttgtgctctcctagaagtagggaggaaggaaggaaggcatgctatgtatattccccgggtatatggttgtggtatggcgattggatttgtcttgctcgcagcctcgcacgtgtgatggatggatcttggaacaaaagctagttgcaatgcaaaagcgattcatttctatcctacagtaaatcataccagagtttgctgctgtgctgtgctttctgctttgtttgcttgtttactagtagttgtcgcgcgccctgtgcgcgtgctgctgcccactgatgaatataataacccgttcctttagagaattaattcatatttatgtaataatctagatgctatgtctgaatggagacctctccggacatgaaccgttgcattgccgcatcatccagggcacaggtcacaggggctaggaagcacaagcaatggtagagggaagctatttagagagcctgagcacacaatatatagataatagggttttatatgtctggaatattcacatcagcatggaatgaaaaagaggggtaaaggaatgatacatcatacctgtgggcatcactaaatgaaacaaatgtctgaaaatggaacttcattctcctttgaggatgctttacttc

SEQ ID NO: 23112 - DNA, 1238 bp, Zea Mays
gcatgccagcatggcacttctttattggtggacagaaaattggtgaagcaaactgtgatgacatctgtgtatggtgtcacatatattggagcacgtgaacaaataagaagaagactaaaggagaggggggtcattcctaatgactccgaactgtttggtgcatcatgctatgctgctaaggttactcttacagcacttggtgagatgtttcaagctgcccgtagtatcatgaactggcttggtgactgtgccaaggtaattgcttgtgaaaatgaaccagtgagatggacgactcctcttgggctcccagttgtacaaccatatcgcaaacttgggaggcatcttattaaaacgtcattgcaggttttgacccttcagcgggagacggataaggttatggtgaagcggcagaggacagctttccctccaaactttgtgcattctcttgatggttctcatatgatgatgactgctgttgcttgcaaaaggcaaggtctgaattttgcaggagttcatgattcatattggacccatgccagtgatgttgatacaatgaataaaatactccgggaaaagtttgtggaactctatgatacacctattctggaaaatctgttggagagctttgagaaatctttccctaaattaaaattcccaccgttgccggagaggggagacttcgatatgaaggaagtccttgagtctacgtattttttcaactagcacaatcaatgttaacagttgcattatacacgctgctgcccggacatatctgagttctgagtgtagatctaccaactcgaatgatgaaagctaggtcatacatgagcataacccgaagagtggctttgcagaagttatcagaagctaagttggtactctgagcattcacaaatgcatcggcatcatttatcgcgttgaagttggcaatgaggtttgctaaataaaagtgggaaccatatcaaagttaaacgagaatccctgtaaatgtaattatgtaatttttttttgtctttagtgtttttattttccttgatcttggtactgtcgagagaaattcggctgaccggtagtttgtcggctggtgctgagtagagattatttcatactttgtagtttaacaatataatttagtaataaagtgatatactagtatttttctcgttgttttagctctgcataaagtttgaaagcttttttttttctcttcaagttaaaagaatggaaactacctgtaa

SEQ ID NO: 23113 - DNA, 206 bp, Zea Mays
ccggggcttgcctggaagaaacactaggttagtgtttgttagacgacgatcacttgacgatcagcctttgttctgacacttgttccgtctgcccttcaggttggtccgactgacgacatcgttgtacgaagaagaccactccttgcaccatattgaggtcaacttagttctggttcttcgcatcacgtggttaattcacgtacctg

SEQ ID NO: 23114 - DNA, 166 bp, Zea Mays
tgggaatgaggggagtagcagcacgtccactttcactctcacaataacgttgtccaggcacagccatgatttaattagaaacctattgtcaaaggaagtttgtttattttttttatatggtcgtgcgcactggttaattcagttcaggtcgtatgtttatctttcc

SEQ ID NO: 23115 - DNA, 1308 bp, Zea Mays
tcaagaaaaattatcatttattttagaatctatcaattattggttatggactcatgatgtgtaattgaatagctttgcatattcacatcggaatgtttttgggaggaacaagaaattaaatctctctttggaaagggggcaaatcgattcaatatttagattgaactttactgacccttggattgatggagacaacaagagaacctctagaactgttatggttcagaactctaggactcctggaacacttgttcatggtggtgatcatcctgaccatgcgcctataacaattggacgtgttattgctggcttagaatatagtcgaccattcagacccaagtggagtgggacacttggcttaatttttcagcatgctggtgctcgtgatgataaagggaatccggtcatcagggatttctataacagccaattgactgccagtggacatgattatgatgatacactgttagctaagtttgaaagtatctacacagattctggagaccatagctctacaatgtttgttttcaacattgagcaaggtctccctgttctcccggagtggctaagcttcaaccgactgacagcacgcttgaggcagggctatgaaattggtcctgctaggcttcttctaagtgcctctggaggtcacatggagggaaattttccacctcatgaagcatttgcaattggtgggacaaatagtgtaagaggatatgaagaaggtgctgttggctctgggcgttcttatgctgtaggtagtggtgaagtgtcatgccgcatgtttgggccactggaaggcgtggtctttggagactatggtagtgatcttggttctggtcctaaagttcctggtgacccagccggagctcgtggaaagccagggagtggctttggctatggtgttggcgtccgcgtggactcccctctgggacctctacggcttgagtacgcctttaatgataggcaagcaagcagatttcactttggtgttggctacagaaattaacatgtatattggtcacattctgattcaatcttgttcttctgagcattttgggctggtagaaactagtgccatgccttccattttttggcgatatcaaagcaagttttgtccagatcagatttcattttttttgtaacatatagttcctttacttctgttgagtgttcttcatctagagaaattaaatggacccttactggtaggttttacctatctgaagcaatgttttcaggtcgggcgaccaactggtcgttccagaggaccgaccaggcgcctaatcacgattagggcgacgatta

SEQ ID NO: 23116 - DNA, 3036 bp, Zea Mays
cagggcttcagcagggacgctggtttagcaatggaggcgatccattccttgtctgcttcaaaatcaagttatccaatggttgatctcacccaactcttcaaacaacaaaatatctccttatgtgtgactgaatttttcatgcactctggttttggatccatccattatgttcctcataatgaagtatttcatgcttattcagtagcaaaagacgatattttttcttgaaaatcctcttaattaacacgtgcattttcttgtatgaatcgttacctattccttttaatcatgtatcttggtaattaattgcatttgcatcattaaacctggcttgactcttgtgttgcttgatagttcatttgttttgtctataaactatgtgggcgtcagctctgtataggtccatgtacaattttccaattcttcctatcaagtttacaaaaacaggtggggcctgtccagctgtacctgactatgatttggggtgggtggggtctgaatctttttctttgttcttataatctcatggtgtagaatttctgctggttgggcctgatgacatttggaatctgattacttctttacaccattgtgacattagttgactgtcatttgttgctttttatttgagttgcctggattgaattagtctcaggacagacataggataggacctaagatcgcattagcaaaagctaaaatggtctaggattagaagtgttataccaaatcttccatgaactccagatagcccagagtcttttataatgccacacacaaagctttcatgtgttggaaaaaaatcataggtcaaccgaactaagttatcacaacatttactcaaaccatatcagaaggcacatatgcttacataaatttcattttagttgataccaccggtcctgggtttcatgcttacaactagaaaagggttctattttttcagattatgaacataccatggaaacatgaagcagggttttacttttatatatgctagcaattgttatctgttgtgttgctttacatttctgttacttactcttttgcaggtaaaatatacagactgtggagttagtcctcaggatctacatcatgtattcacaaagtttgctcatcctcaaagtggaggaaaccgagggtttaatggtagtggtcttggccttgccatatgcaagagaactcatcagcatctccacaaaattctacgcagccatcccggtttctaggattccatgtcgtcccatgagaatataacgaaggaaacaagaagcacattatagaagtagcaagatcacagtacatatcagcatgacattcatgaagccatcccggtttctaggattcttgttttgctctgtccatggcacgccaccaacattcatccctaaaactgacatttttttgcaacataaatcaggtaaacgagagccctggaaataacaggaattaattcaggaaagtacacgagcaagcacccgaggtcaatgagcttacctccattgacaatggagataggaaggaatatcatgaagagaaatgaaaggaccatataattccaagaccctgatgatggccacaactgcttatattgatgattcctactcggagattattgatcctctaaagactgaggtgctgtatgttgttgaactccctggtgaccatacttagcacccaccaaaaccgaatgtggtggtgtctagcagtgtgtgcaaacttctagaatatccagtctgcttgaatgccatgtatcctattcatcagctgcacattcatactgatccatttggcatgtttatatctaaaaccctgttcaaatgtagtcgattggatgaaaattatggctttactggtttcagcgttcctttcaatatcatgtactgttatcaccattttattctgatccgtttcaatttctatggacgtttagtacataatgtttataaaccttaacttttttactcttttttcttttttgattagctacgatacagtgcagaataatatgttctgcttttttattcaactattcaaatcttattttttattcaactattcaaatcatattttttgattagctgattgcaggagagattaaaatcaaagggattgagctacaggagagttgcagtctgtcgttcttttccatgggtgtgattgagactgaaacgatgggtaccagagtgaaggagtcgaagacagttttagtagagaaagagctcgaactgatcgacgagcctcagattcaagagagccctccagttcgtgcattgttgcatgatgaggtggattttgctgaatcgtcacttgctattagagaatctgacattcccgtgaagaaggtgctgataatcgtgacaatcacttttgtttggccacaacagccatattacttgaagcccatgttttgaaagctgtattggcacttcttctatggttagtggtggaatagcccgaacagtcctatgaaacagcaaaaaatctgttacagtccacttaggtggaagaggagtcactacttatagaaaaagcttgttcctagaggtggtttctcccggcaatgcagaatcttgaagcacgtctaaagtggcttgatgatagttctaaatttcaactccctgtcattaccaggtgccagataggctgctggtcgattccatcctgaacaagttgcgccaaagattacatgaatattgcgtgccgagatctgtcttcagtaatgcgatgccatcctgaacaagttgcagcgacaattaggataggattttcccacgctttttagtcttgtgtattccttttatgctcttcatctttttttctcattatatccaccaattagatagtcatgtagactttcttttaggcgcttttgttttttatactttgtgttaccttgcttttgttttcatactttgtgttaccttacagatgtaaaaacgctcccctcccgtacattgcactatttatgaggaaaggtaaaatagcgtcatttagctttttcagtcgaggaaatgcactaatattttgtcgaat

SEQ ID NO: 23117 - DNA, 2063 bp, Zea Mays
cgcccagccgcccagggcctaggccaccgtcagcgccgcccgcctccatctccgccccgagcggctgcgccccgcccgccgcccgcccgcagtccaccaggcgtcgagccccgccccggctcgcgcgcgtcgagcctctgtccggccccggctgcaacccactcactcagccagacctggcttctctgcagactgcaggttctcagtttctcttataacagaaaaagttatcggtccgcccttggttactgaaactggtcaggtgtatgtaattttgaagtaacaaaggatttggaacccagccctctgttctccaccaccgcttcgaagatgccgcaggtaatggtggtggcacggaacttcatggatatggtggctgctcttcctgcgggcaagcttgatatgctctatgactcagcctttatctgtgaggcagtactcaggtcacttcccccactggcaaagaagtatgcactgcagatgttgtatgtgctggcaccagtgaccgctgcagcaatggaagagtgggtgcttgatgaatatgctgccaagcataaggttgccattgataagcttctacagctcagggtctttgttgaagtgcgcgacagacgacgggacgtgagctacaagatgaatcagaagttccagggaaacatgcagaagtatttggttgatggtggaagtttaccaagggaacctttaccattaagtgtcactggtcgattgcccacaccagcagatctggaagcctatgctcttgatcaatgggagtgcttcttgttgcaattgatcaattcatctcaagtcgaaaaagggtcaagttttagctcctccatgatgaagacgtttcagcgtggtcttctgagttcaagggatggtgaagcttcaaagttgactgaaaatggcttccaatttcttctgatggaaacaaatgcacaactttggtacataatgagagaatacatttcatctgctgaggaacgtggagtggaccctacggagctgatatcatttctcttggaacttagctttcataaattgggagcggcttatagcttgaacactctgactgatgtccagaggattgccatcagggatcttgcagaattaggactagtcaaacagcagcagggtcgaaaggatagctggttcattcctacccaattggctactaatctttcagcaagcttgtcagattcgtcatctaacaaagagggatttgtggttgtggagacaaactttcgaatgtatgcatactctacttccaagttgcactgtgaaattctacgcctttttgcaagggtggagtatcaacttccaaacctcatcgtaggagctgttacaaaagaaagtatctatggtgcttttgaaaatgggataactgctgagcagataatttcatttcttaggcaaaatgctcaccctcgtgttgctgacaagatacccgctgtcccggagaatgtcacagatcagattaggttgtgggaaactgacctcaacagggttgagatgattccatcgcatttgtacgaagattttcctagcaaggaatggtttgaacaatgctgtgattatgcaagggataatgggtacttgctgtgggaggaccccaagagaatgagactaattgtacgaggggagttccaccccgaaatgagggagttccttcgcaggcaaagatgaggaacgaccttgtacttgacggaccatgctatgcttctttgtagtgcatagaaacactgtatcgggtaatagttctcctttaaatatcaggaaagggtctagaaaagggctcagtttttgaattattttggtgacctgtgagctgtggaagcatatgaataatgtggtgttcaatggagcaaggcccaacatccttgatctgcttctaaatgttactagtgactgtaccctatgctggtgtatggctggtggccaggtcctgttggaactcttaggtaggtagtatggtgggatggagttggtatgctcttaatttgttgttatttggattgattctatataggacggagtgattttaaaaatgaaaaaaactcaaa

SEQ ID NO: 23118 - DNA, 1101 bp, Zea Mays
tttctgtcctaggcacgcatgcgtaatcgtgccaaaatggtcatactctgtgttccacctgcaaaactcgggtgcacaaccgctgcccaacttgtcgacaggagctcggtgacatcaggtgtctggcattagaaaaagtggctgaatcacttgagctcccctgcagatactactctcttggatgtccagaagtcttcccatactacagcaaactaagccatgagtcacagtgtagttttaggccatacaactgtccttatgctggttctgaatgttcagttgttggggatattccttttcttgtggcacatctacgagatgatcataaagtggacatgcactctggatgcacatttaatcaccgctatgtcaagtccaacccaagagaggttgaaaatgcaacctggatgctaactgtgtttcattgttttgggcagtacttttgcttgcactttgaggcatttcagcttgggttggcaccagtatacatggctttcctacgatttatgggtgacgaaaatgattctaggaattacagctatagccttgaggttggtgcaaatggcaggaagatgatatgggagggaacgccccgcagcatccgggacagccaccggaaggttagggacagccatgacggcctaataattcagcgcaacatggctctcttcttctcaggtggagataggaaagagctgaagctgcgcgtcacaggccgtatctggaaggagcagcagaaccctgactcgggggcctgcattcccaatttgttcagctgagctgagtaacaaggatgaatccaggtctgtgcttggtgttttgtccttgccaagctgccattgcagcctgccctaaattagttaggttgttggcaggataatgaaaatacagagttcctcctcctgtgggctggtgaatctcatgataagcaaatttttttctcgacgatacagatttgtgatgttatgtttgcctcggtgtattttgttgtctggaaataaactgttgcgcagtaactgcatttggttggctggtcattagcttgtcactctgagtttgacgtacatcatgtttaatgcgacagtggcaatgggttttata

SEQ ID NO: 23119 - DNA, 2234 bp, Zea Mays
ttttcttttcccgtttttataaataaatcagcccgaaaaaaggacgcggtcgtggaccgaacaaacctttccccaaaatttccccttccccgcacaccgaacgaactctcgatctgatccctatccttgcagggcccgcctcggctcaccgatccggccccggatccgctcgtcgctcgacgggatctctcgattgtgagccgttcgtgaggcaccactctgagcagcttgcgtgtggcaacatgaggggagcagataatggtcgtccgaatttccttcctgagaagtgccagattgcaggtaatgactgagcagcatcctctttgctgcactagacatttgtctaggctctaatacaggtttagtttgtcctgaagtttgccagaggggtgaaaaagttagcctatttgatgaagggctgatacatggtgttgatctaaccaatcatattgctcagtcacaattggtgccaagtggtgtcaaggaaacaccaatagtggatcaaaacaagagacctgcatccagtgacatgcttgacatagttgaatgcaaacgtctgaagcaggaaggtcaaatcgtaactaaggaagacaaccatacatctgcagaggattttcatgagtaccccacatacacgacttgcagaagaagctttgactcaccactatctgagagcgaggatagtgaagatgaaggtgtagattcacctctccatttttcacatgctcacacctatgttgaagatgatctatggcctgccagctttcatcatgctctgggcccttttcccttgaggaaacctgttcctatcgggccaaatcatcaggctgaattacctgagtgcaggccattttgtggaagaactgaagaaggcgaaagtgtcaagtggatcagaaacggtgttgtgccaatgcctgatactggtgcatcgtctttggtgttggaacctgttcactgcaaggcagactgtgagtgtcatgatgaaggttcaatcatttgtgtgaaaaagcatgtgagggaagcaagagaaaagctgaagggttctgttggtgcagacaccttcagggagttgggtttgaatgatatgggtgaagaggttggctcaaggtggacagaagaggaggaacatttgttccagcaggttgtcttgtcaaaccctgcttctctgtgcagaaacttttgggatgaactccctcttgccttcccttccaagtccagcaaagaactagtgagctactacttcaatgtattcatgttgaggaagagggctgagcagaacagatttgacccagtgaacatcgacagtgatgatgacgaatggcaggcaggtgacgatggtgagtatccaatcacaggaagaactgatgaatacttgccaactgagtctcttactgatcaagatgatgttgcatgcaatccagttcctttagaaagggatctctatgaagattctgatgatgaggatgagctggacaatgccagtggagacaggcataatggtgcccagagggctggtatgttgtcagagggtaatcgtgtaatgtcggtcatagaacataatcaacagacgttcaagttagatgcagaggcgcaagacgactcttgcacatcatttgaggctcatcaggttggtgttgaaggtgggacacatactgatattgctgatgacaatcattacaggagtgacggctttggtggtggtgcagaacatgggttcttcggtaatcagtgtgacacaaaagagtgggacttcggtctcagtatcggttgggaaaagcatgattttttgtcaacaaacaatgtcatagaagaggtgttcgggaagtgctgtgacactgctgaccaggaccttatctgagccagacgcggaggcttcttgtcagctgcgaaaactttagggttctctgaattgtacagcagtagttggctattttgatttaatgcctcacttgttcttacaggaatctcatctctgtccttggaacatcatctgcttgtgatttcgtcacatgattaatgtaaatccgtagtctgttgatagcctgtggaatgtatgtatcatctttgttgtgacggtgtctcttgacctgagcgttttttctatgtgctagcgagggtcatgtaataaaagctgttgttgttccttgaccctgtctgcaaataaatgtaacctgccagtcaatgtattccgaaaggtcatttttatctgatctgaaatctgtagtcgtttccgc

SEQ ID NO: 23120 - DNA, 2861 bp, Zea Mays
cacaaacccatcgccagaatccaaaatcaaaagcatcgatttgatctcggcacggcccgcccgcatcctcttctccttccctgtcgctttttctgtctacagcttccatggcgctctctctctctgaatgaatactcctccatcttgccttcacctttttcctcctttttatatcaatatataaaatgttgaggttccagggcaaccagcgggtttgaagtttgaactcagtccctccccccgcaagctttctctctctctctctctctctctgatcaaatgtggcgagatctgtgtgagtaagcgtgaataccactacggtttttcgtcctccccttcccttcttgagctacttgagctactctggtcacttcttggagccggcaactgccagttgggggttttttaggacaaagggagcaaaaaaaaacgaacaccttcctgagcttaagacagcatggatcagtacgaggtgctggagcagatcggcaaaggagcatttggctctgccctgctggtcaggcacaagctggagaggaagaagtatgtgttgaaaaagatccgtcttgcgcgtcagacagaccgcactcgccggtccgcccaccaagagatgcagctcattgctaatgtgaggaatccattcattgtggagcacaaggattcatgggtggataagggttgctacgtctgcattgttatagggtactgcgagggaggagacatggctgaagctattaaaagggctaatgatacccacttttctgaggagaagctttgccagtggctagtgcagcttctcatggcccttgactatttgcatgcacatcacattcttcaccgtgatgtgaagtgctcgaatatatttctcactagggaccaaaacataagactcggtgactttggtctcgcaaaaatattgaccgccgatgatttggcattctcgattgtaggaacaccaagttacatgtgcccagaactcctcgccgatataccttatggtaccaaatctgacatttggtcactaggatgctgcatgtatgaaatggctgcgctcaaacctgcttttagagcttttgatatgcaaaaccttatcaacaagattaccaagtcgatagtatcacctttgccaacaagatattctggtgcatttcgaagacttgttaggagcatgctacggagaagtccagagcataggccaagtgcagccgaactacttaagcatccacatctgcagccgtacgtcctgcaactccatctgaagtcacacctttctcgcagcatagttcctgttcaccagtctccaagcgagaagaggatgacattcgccgcagagcccgtttgcagaagcaagggcaggaggaactctttaggcagcgaaaggatgatagcagcctttagcaaaccttctcctgatagaagttctgtcagctctattcggagtgtcaaggacgactacaccgccacacagagtgtcagagagctatcggttgatgaaagcatggtcgaggttgctagtaaacccgtggcatcaaggacctcagatgtcatgaggactccgaaggcgactccgtggaagatgatgacgactctgaggaatcggctagaagctccacaagcatcatatgacagaacgagtcatacagagttttcaagaacaccggttgacaagaggaacagccgcgtggcccgcagagcatcgcttcctctgcccgtatttgagaccccgaagcagcgcagcagcatgagcgtcctggagcggctggagtcccccgacgtctccgtgaactcgcctcgcatcgacagaatcgccgagtttccgctagcttcgtgcgaggaccccttgttctcgaccgtgaagccaccgacacccgccagcgccagcgccagcgccacgcctccgttcgtggaccggtccatcaccaaggacaagtgcacggcccagacgctccggtccgcggcccacgacggtggcaacggcagaagcgaggacggcggcggtttgtcctcgggtcgcaccaccaccacggcagcgtcaagcggtgggacgtcggggtcgttgcagccgaaggggcggttcgacacgacgtcgtaccagcagcgcgcggaggcgctggagggcctgctggagttcagcgcgcagctgctgcagcaggagcggtacgaggagctcggggtcctgctgaggccgttcggccccgacgagatggtgtcccccagggagacggccatctggctcaccaagagcttcaaggaggcgatggccacgggcttgtagcggtggcctcctttcaccggcatggacggatcaggaattcaggatcgcccatcagccttgcaggctgtagacggccggatggcatcgccggtgctggcgtgtgtaggtcaggtaggtaggctatgagaattgagaagagagaggcgttagcgttgacggatcagttgttagttgctgggagtggacacaacaccatctcagtgttggccccccggtttattttgttactatgctagcagttcttagttagttaatggcgctctggctagctagctagtgatgtaccaatgcaacccccccccccccccccccccccccccagcagaattagtagcatcagggagtagcagtagaggtagagctggaggagtcttgagctaggaaggagaaggggattagtgagatataattcctatactgtgatgtagcccaagtatgtaccagtagcttcatatgcatcagtgctgactgctgaagaacattcagacatctatggattcagccattcaggccgattgctacgcttatctgcagttatttgctcctgcaatccaggagtgtggaatgggcgctgacactgttttgg

SEQ ID NO: 23121 - DNA, 1414 bp, Zea Mays
cgttggactgctcatggaatggaacataaacggtgttaggggcctgatgctcgacacgtacgacttcgacaacgatgtctggttgtgccactcgttccaaggaaaatgctacaacttcactgccttccaacctgccatcaatgtgttcaaagagatccagacattcctcgacgcgaacccgtcgcaagtggtcacgatcttcctagaagactacaccgcggtagggtccttgccgagagtgttcaacgcctccggcctcacgaagtactggttcccggtggcaaagatgccgaagagcggcggcgactggcctctgctcaaggacatgatcagccagaaccagcgcctgctagtcttcacctcaaagagagccaaggaggcgagcgaggggatcgcgtatgagtggaactacgtcgtggagaaccaatacggagatgagggcatggtagcaggcaaatgcccccaaccgcgcagagtctccggccatggattccaaaggccagtcgcttgtcctgatgaacttcttcacgactaacccgagccagaccggtgcctgcgggaacaattcggcgccactcgacagcatgctgaagacgtgccatgacgcttcaggcaaccggtggccgaactacatcgctgttgatttttacatgagaagtgacggtggaggagctcccttggctacggacattgcgaacggtcatatggtgtgcggatgcgacaacatcgcgtattgcaaggcgaattcgacattcgggacctgcgtgatacccccaccgccgccgccgtcaccgcccaaggcatccacccccggcagcagaggctcaacagcaggcggcgatgctagcgctggaacgatggccctgtcctcgcaatggagcttcttgctgggactggcttctctgcttcttttgtcgcgctcgtgagagccgagcggcattggtgactggttttgctgctcttgctacatgctctgcgagctgataggagcatcgtcccatgagatgagctgaggctgagctgaactgagctgtatatttgggtttactgcgcaacgtagttagttggatacgggaatcagttaaattcatcattcatttttattgattggcgtcgttatcgtgaatgttctaataagttccttaaaaaaatgtctcatggccctactgtcagtgacgtagccatgtgaaccgggagagagaaattacagcgtgtttatcttgttcgaagtgctttcaggtccggactatcgattttttttttctattgtctcctttagctcggcatcgctgcagtgcataggcttatctcagaaccacggcagttttagctcggtatacccaaaagcatgaaattgttactaagtgtttttgaagaactttcagtctaaagataaatttccataaaaacaaaa

SEQ ID NO: 23122 - DNA, 3329 bp, Zea Mays
atggagaaaagcaagttgaaaaaggttagagaatacagacttggaaaatgctatcataacaaaacgggagaggagtttgtggcgcactcgtccaatgttaactgcctcaagattgggaggaagacctcgcgggttcttgtcacaggaggagaggaccataaggtcaatctttgggctattgggaagcccaattcaatactggagcagccagtggaacaataaagctatgggatttggaggaggcaaagattgtccgcactcttactggacatagatcaaactgcatgtcagttgattttcatccgtttggggaattctttgcctctgggtcactggacactaatctgaagatatgggatataagaaggaagaattgcatccatacatacaaaggtcacacacgaggggtgaacactattagatttacacccgatgggcggtgggttgtgtctggtggcgaagataatatagtaaagctctgggatctgacagctggaaagttattacatgaattcaagtgtcatgagggtcagatccagtgcatagatttccacccccacgagttccttctggcaacaggttcagctgataaaactgtcaaattctgggatttggagacatttgaattgattggatctacaggacctgagacaacaggtgtccgatccatgacattcaatcctgatggaagatctttgttatgtgggctgcacgaaagcttaaaggttttctcttgggagccaataagatgccatgatactgtggacgtgggatggtctagacttgccgatttgaatgtccatgagggaaaacttcttggttgttctttcaatcaaagttgtgttggaatatgggttgttgatctgacgcgtcttgagccatatacaatgggtacttcaacaaaagtaaatggtcattctgaattgaagactgtttctagcggcactttgcctttacaaaatgatagtggttcaagggctaacatagggcgatcatcagtcttgcaaaatacagagaacaaccttaaaactacttcaggaagactgtcggcttcacagaactcagattctgcacccaaagaaactaactcggcaccttcaagcgggttgatcccaagcacaccacatagggctggagttggctcccataatagatctgttggaaattcagcttttcaatctggtggtaccaccttgaagagaagttcgttgaggaataacagtgcctctaatgttcacaatttcagtaaagctgatgtagtgcctgtcattgttcccagaactagctcaggaggggagttggctactgattctagaagcgatgctgctgatgtggcacccgttcttccgaaggtaaccagaagggttgaacctgctaccgattctagaaaagaaagtaatgatgtggaacttgttgttcctagagcaagctcaagaatggaaatagccgatttagcacccatttctagttccaagtcaggcagaaggttggagtctgcccctgattcgaaagaagaaagtgctgatacagcacctgttgttgtttccaatcccagggctaatgtaagaatggaaatagtctctgattctgcgcccgctctttcaaagtcaaacagaaagctagattctggcactaactcaaagaaagaaagtgctgatgcagtcattgtacccagaacaaattctagaatggaaatgatttctgattctaggagagaaccctctgctggaagaatatcaccattcagaatccagtcaagatatgctgagccacggaagctagcccatgccagaactgattcaaacaaagttgatagcagaagtaaaattactgaaacagaagacttcaattgccaaatatttcttccccgtagaaacagtgtttttcaaacaataagttctgaagaacctcgtgaagatgtaaagtgtggtccagttgacagggtgggattttcaaattcatcagaaccaaatgcgagtgtccgcaatgagaattatgttcctagaatgcgcaaaccaggagacaactgctatatcgaagtttcaagagcaggaagagcaaggtcaagtgtctctaattgggaagggagggatcagccccctagtcatgaagaaccaacaacaagcagttctacactggctcctaccggccatccatattcatctagaggaagcaatcaagcttctgaagctccaatcatagctagtgatgaagatgttctatctcttatcatggagcgacatgatctatttttaagctcaactaagtctcggctgatgaaattgcagattattcatcaaatgtgggaaagaaatgacatcaggggtgtgctctctgcgatggacaggatgggtgatcatgctgtctgtgctgatatggctagcgttctcatggagaaaagtgaaacaatcacactagatttatgtacctctatcctgcctgtcgtcaccgatcttctggagagcaaaattgacagacacttagtcgtcgcattggaattgttggtgaagcttgtaaggacttttggtccaatgatacattcaacagtatcgtcaggtccttgtgttggtgtagaccttgaggcagagcaaaggagggagcgctgcaacttatgcttcatcgaattggagaaggccaaaaataagcttccatctctaacaagaagaaaaggggcggttgcaaatgctgcacaagaacttgctcttgtcttccaggaaatcatgagttgactgacgacacactagatatacacaattagatgggacatgcttcggcctctgatggcaacaagattggatatcagctgccatggagggtgctagctattcagtcttagcgacgtcatcaagctccaaggccacagcaccaacaaatgcattttgttgctgctgttcgtgccttttgtacacatgctaacacataatccatgtcatttgtgaagagaagctgccatggacagtgacttcatccacaatattatgtggatggcggcagctggagatgttaggccccgatcgaatggtgatcagcagatgagacttgcttgggcttttctggcactcgtagttctttgctgtctgtaacatctttctcatgtaccgttatcatgtgcatgtgcaacagtcaagtggttgcatttggtagtttatggttgtgctgtgtgttggtcgatttagtggtcgttgatgagtgaagcgagccatgtacatcatttttttttaagatttgatatcttctttttccttgatgactcctctcgttatacttgagtgaaaatgatatcttgtgtacttgccttgacagcttttcggaaattcccttttgtctgg

SEQ ID NO: 23123 - DNA, 3197 bp, Zea Mays
ctctatccaacttcacaagcactgggttatcttgttgattggtccaggtcaagcaaattacgaataagcccacaaagtgagaaaggatcagaagttattattgatttagaagcactgtctggcttcactgaattttttcttgagatccaagataatatatttccccatcgtattgctgcttttggagtgtctttacaacctgtttcttataacttgcctgtgccatcacaagtagtactaatagctccaagatatgttctttcaaatgagtctgatgctgcaattgctgttcgtcaatgttttgttgagcacggcattgatggattgacagttgaagctaaacagcgggctgctttacagacatggaaacctgggaaaaaacgagaagtaaattactttgatttatttgttaagaagcacagaaatgtttttgaggattctcacatttttatccagttctgtccaaaagaacctggatacagttggtctggaccaatctgtgtttcatcaattggtcgttttttcttgaaatttagaagattagaaggaatgctggaagatggtattaaaagagaccctttgaatgctgggaagctgaaactatttgcttctgtcgatgttgctcaagagacaacttcttttgtgctacacttcactaaaccaccgaaggttacactcccatatcgaatagaaaattacttgagcgaatcatctatcctgtatttccagaaggattcagttgattcagatgtattacaccctcaagagtcagaacagtatgcttgggatgatttaagttcaccgcgcaaactggttgtccgaattgttgatacacctgcattgcgtgaaattaaaatagataaaatcagcccatggaagccatttttgaagatgcgccaaaatagcaggcttaatctggatttctcattcagtggtggactcaattcgagaaaacagagatttgatgaatcatttggcttgagagtgttcaaaattggctacgaagtgtatgccgatggtttaacaagagttttacgaatttgtgaacatgcagataatcccaaaattgagaaaattcaatggccaatagcaaatatacagttcagaatttcttatgtgtgtattcatcttcttgacaaggaccagaatggggaaaatgtccaattgccatctacaattttagcagcaagacttcagcatgtttcttctgattcagttgtcacaaatagattcaagcaagtatctgttgcaattcattcattgaatgtggatgaaaaatgggaaggggcttcaattgggacaattcttaggaggaacaagcttcaggatgctactctcgatgaaaatattcttcgtatgatctttgtactgaattcaactgactccagtgtcaaacaaatacagtattgtgccatcatcctacagcctgttgatcttaagattgatgaggaaacgttaatgaagctagtaccattttggagagcatctcttgcaccttcaggcacgacaagcacacaattttatttcagacgttttgaagtacatccaattaagatcatagcaagctttcggcctggtggccgacgcacaacatatagttctgctcaagaggctctgagggcactacttcatagtgttataaaggtgcctgaaattagcaactcagctgtggagctcaatggggttctcctaaatcatgctttagttacatttcgtgagctacttctaaaatgcgctcagcactactcatggtatgtattaagggcaatttatgtaacaaagggaagcaaattgcttcctccatcttttgcctcaatttttgatgactctgcttcatctgttcttgatgtcttcttcgacccttctgatggatcgctcaacgtccctggccttaccataggcatgtttaaatttataagcaagaacatgaagtcgggtggtttttctggaacaaaacggttaaaactgcaagttcgaacgctctctttgctgctgtcacagaaatttcagatagtgttgttagaggagcggaaacaaatggtttgaatggcatggttactggtttccaccagggcatgttgaggttggcgatggagccatctgtcttagggcaggctataatggagggaggtcctgacagaaagatcaaacttgatcatagccctggacttgatgagctatacattgaagggtacctgcaggctatgttggatgtcatgtataagcaagaatacctccgtgtcagggtgattgatgaccaggttatactgaagaatctaccaccaaatagcgccctgataaacgaaatcgtggacaacgtcaaaagctttcttgtgagcaaggcactgttgaaaggcgattcttccacagttcgaccgatgcgccatctgcgaaatgaacctgaatggaggattgccccaacggtgctcaccctctgcgagcacctttttgtgagcttcgctgtgcgtgtgctgcaccgggaagccagcaaggccatcgctggagtcatgtcgagagtgaagaaaccgaccggagaggaggtcgaaggcgactcgcccgcatctggtggcgtcctgtgtaagcggaataggctgtggactgtcgggaggtttgccgtctcgggcatggtcgcctatgtagatggccggctgtgccggcacatacccaaccccatagcccggaggatcgtcagcgggtttctactgagcttcatcgaaaacaggggcaacgaataagcgggcagccggacaggtgataaaagggctcgccttctgccacctgctaataaggcgtaccatggaccatggtaaataggcgtgcacgttgtacaaagaaccgaggtgtggtagtgctcttgagccgtaaccgatctctgcatagagctgtgcatcaattttgaccgccttcaggcccacgtttggtgtacagaaacactgggacagtaattccgcagatgctacttcctgcctacatttcgttgacatggactcgtgcttagagtaagtttaatagtccacaacgagccttttcacataacaaactcggttagaggccctttcacatagtctatctatatcatcttattatacttgttctacatgcaaagtgataaatagcatggctatgataaacgtatggagccgttggtgtgttgatcatgagtcactccactgggtatatctctaattttattgttt

SEQ ID NO: 23124 - DNA, 924 bp, Zea Mays
gaaagtcttgtcatttgggatgcttgcctacccttgtgacaataccagtttggattggtctatacagagctctctcaaatgtagctaatgagggacttctgactgaaggctttttttggataccttctctggctggtcctacaacaattgctgctcgacaaaacggccaggggatatcatggctttttccttttactgatggccatccacctcttggctggtcagatactttggcatacattgtgttaccagttcttcttgtcatttcacagtacatatctactcaagtaatgcagccaccacagagcaatgatcctaaccaacaaggtgctcaggctgtaacaaagttcttaccattgctaattggttattttgctctttccgtgccttcaggactaaggctgtactggcttacaaataatatcctcagtactgcacaacaagtgtggcttcaaaagcttggaggtgcaaaaaatcctgtcaaagaatatattgacaagctttcaagagaagaaacgactactgttcagaagaatgattctactgttcagagtgaacctctctctaaacatagtaaaccccagcctagccaagagccgaaaccaagtgggccacaacgtggtgaaagatttaggaaactgaaggaggaagaatctatgagaaaagaggttatgggacaaggtaaacaatcagaacagtcaagttctgaatctagagtcacggatggaacacaaaattcggatgtgtcttctggagaccaaaaagaccaacaggggtctcatgaaaatggaccggttgtagctagtataaatggtggagtcaaccatattcgaaatgaaaagactcagaacttatcctcagaaaagctgaagattgacgggataagggtagagagagacgagaactgctgcaccgctcgtcgct

SEQ ID NO: 23125 - DNA, 2677 bp, Zea Mays
agttcgttggtgcctgagaatccatggtcgatcgtctccagtcgaagcgaaaagcgaaaaggagaaggggcgggggattgcgagcctgtgctgatggcggcggcggcggtggccgcggcggggagcagcaatgtcgagttcatccgcgcgcgcagcgacaagcgggagtaccgccgcgtggtgctcgccaacgcgctcgagatcctactaatcagcgaccccgacaccgacaaggcggcggcgtgcatggaggtcgaggtgggctcgttcagcgatccggagggacttgagggcctcgcgcacttcctcgagcacatgctattttatgccagcgagaagtatcctggagaacatgaatatacgaaatatatcatagagcatggtggctcttacaatgcatatacaagctccgagacaacgaatttctttttcgatgtcaatgtggacaattttgaagaagccttagatagatttgctcagttcttcattaagccattgatgtcacaggatgctgttcttagagagataaaagctgtggattctgaacacaagaaaaatttgttgtctgatggctggaggatgtatcagcttcaaaagcattttgcttcaaaggatcacccttaccacaaattcagtacaggaagttgggaaacactagaaactaaaccaaaagcgaggggcctggatatcagacttgaacttctgaagttttacaagaattattcagcaaacgttatgcaccttgttgtttatggaaaggagaacctcgattgcattcagggcttggttgagcgtatgtttagtgacataaaaaacactgatcagagaagcttgaaatgtccaagtcatcctctttcagaggaacatttacagcttcttgtcaaagcactgccaatagtagaaggggactatctaagaattatatggccaataacacctagcatccagttttacaaagaagctccttgccattatctgagtcacctcattggacatgaaggcgaggggtccatcttccatattataaaggaactaggatgggccatgaacttaatggctggagagtgcagtgacagtaatgagtattcctttttctcagtaagcatgaggctcactgatgctggccatgaacgcatggaggatattgttgggttgatcttcaaatatcttcatctattaaaagaagacggagtccatgagtggatatttaatgagcttgcggcgataaatgaaatggagttccattatcaagacaaagtccgcccaatcaactatgtgatgcgcactgtctcaactatgcggttgttcccaccagaagaatggttggttggagcagcattaccatcaaagtatgcatcacagagaataaatatgatactcaatcaactaatacctgaaacagtaagaatattctgggagtccaaaaaatttgaaggatctacgagttctgctgagccctggtataacacaccattttcagttgaaaatgtcactccttcagttatacaggaatggattgaaaaagctcctactgaaaaactccatcttccaaaacctaatattttcataccaaaggatttatctcttaaagaagtgcatgaaaaggttacttttccaacagtgttaaggaagagcccactttcacagttgtggtataagcctgatatgctgttctccacaccaaaggttcacattatcattgatttccactgtccattatccagccactcccctgaagcagttgttgctactgagctctttgttgatttgttagtagattatttgaatgcttatgcttatgatgctcaaattgctggtttattctattcaatatatgttacttcagctggattccaggtttctttaggtggttacaatgacaagatgagagttctcttaaatgccatactagtgcaaattgtgaaatttgaagttaagccaaacagattttctgcactgaaggaaacttctgtcaaggactaccagaatttcaatttccgacaaccttattctcaagcgtcatactatgtctctttgatattgggagataaaaaatggcctgtagctgagaaacttgaagctctttctaagcttgaatcagattattttgcaaagttcgtaccacacctactgtcaaaaacatttttggaatgttatgttcaagggaacattgaaccaagtgaagcaaaatctatcgtagaagaaatcgaaaacactatatttactacgcccaattctttgttcaaatccatgtctccatcagaatatctgattaaaagggtcatcatgcttgaaaatgacttgaaatgctactaccaaactgagggattaaaccagaagaatgagaattcatcagttatccaatatattcaggtgcatcaagatgacgccattttgaatatcaaacttgagctgttctctctaatagcaaaacagccagccttcaaccagctacgaactgttgaacaacttgggtatataacaagtctttctctgagatccgactatggagtcctggcactccaggttgttatccagtccacagtaaaggatccttcatacctcgatgttagagttgatgagttctttaagatgtttgaaagcaaaatctatgaactctccgacaaggatttcaaggacttgctggatcaaaaggatgggaaactatgggttaaaa

SEQ ID NO: 23126 - DNA, 566 bp, Zea Mays
cggaatgccactcatctcttcagcaacgcatgccagttgtcaaaatcggctatccacatgccccgaattggttaccaaggtggctcccaacgatcagaatggtatacaatagaacgcctgctcaggaaacactcatctctccatggaatcgacatttttgtatactactttcagcgacgacagacagattgccagattgtaacccaggtaggtcatgctgacgattcgacccaagcgtagggatgtctctgtaaaaacccactacatcagaagaatctgggattatgtgtagctagctgcaacaatttgtcttttctttttcttttactgccccttctctctgggaccaaaacgcctatgaatagatgagggagccaaatgaattaggttttagtacatttagctaagaggtgtatgtatgtacaagtgttgtttgcatctgcagtctcttttgatgaaaatctatgtggcatttatattgcttgatttttgttttttgatttggtctattttagacctctttttcttcttcttaacatatatgatgcgtagcgaaaaaatcttac

SEQ ID NO: 23127 - DNA, 2612 bp, Zea Mays
cgtcgtttgcatcaccatcgcccgcgacagaaacacactccgccgaacggttgtgtgcatcgtcgcatctcgcggcaaagcgcacgggccggccattggtggatccggtgggggggccgccagcagccttgctccaccagccgcgatcatggcgggcctactcccagaacctcgcccagccgtggaaggtagatccgatggccaggaccccggctgacgcgggctcggggccccacgctgactcggccccgctgcatcccgaacggataagctcctgccgcgcacggagctcgccgaaccgacacccgccgcgtgtccagggagcgctcccggcgggggtcgctcgcagacgcgaggtcccggagccgcgcgcgcccccgcctataaaactgcagccattctcccctggttcccgcatcccactcgcagcacgagcgctcagcgtctcgtctcctcctccccacaaaaagccgctgaattgctccgtcggcgtcatgtgtggcatcttagccgtgctcggatgctccgactgctcccaggccaggagggctcgcatcctcgcctgctccagaaggctgaagcacaggggccccgactggtcgggcctctaccagcacgagggcaacttcctggcgcagcagcggctcgccatcgtctccccgctgtccggcgaccagccgctgttcaacgaggaccgcaccgtcgtggtggtggccaatggagagatctacaaccacaagaacgtccggaagcagttcaccggcgcgcacagcttcagcaccggcagtgactgcgaggtcatcatccccctgtacgagaagtacggcgagaacttcgtggacatgctggacggagtcttcgcgttcgtgctctacgacacgcgagacaggacctacgtggcggcacgcgacgccatcggcgtcaacccgctctacatcggctggggcagcgacggttccgtctggatgtcgtccgagatgaaggcgctgaacgaggactgcgtgcgcttcgagatcttcccgccggggcacctctactccagcgccgccggcgggttccgccggtggtacaccccgcactggttccaggagcaggtgccccggacgccgtaccagccgctcgtccttagagaggccttcgagaaggcggttatcaagaggctcatgaccgacgtcccgttcggggtcctcctctccggcggcctcgactcctccctcgtcgcctccgtcaccaagcgccacctcgtcaagaccgacgccgccggaaagttcggcacagagctccactccttcgtcgtcggcctcgagggctcccctgacctgaaggccgcacgagaggtcgctgactacctcggaaccacccatcacgagttccatttcaccgtacaggacggcatcgacgcgatcgaggaggtgatctaccacgacgagacgtacgacgtgacgacgatccgggccagcacgcccatgttcctgatggctcgcaagatcaagtcgctgggcgtgaagatggtgctgtccggggagggctccgacgagctcctgggcggctacctctacttccacttcgcccccaacagggaggagctccacagggagacctgccgcaaggtgaaggccctgcaccagtacgactgcctgcgcgccaacaaggcgacgtcggcgtggggcctggaggtccgcgtgccgttcctcgacaaggagttcgtcgacgtcgcgatgggcatggaccccgaatggaaaatgtacgacaagaacctgggtcgcatcgagaagtgggtcctgaggaaggcgttcgacgacgaggagcacccttacctgcccgagcatattctgtacaggcagaaagaacagttcagtgacggagtgggctacaactggatcgatggactcaaagccttcaccgaacagtgacggatgagatgatgaacagcgccgcccagatgttcccgtacaacacgcccgtcaacaaggaggcctactactaccggatgatattcgagaggctcttccctcaggactcggcgagggagacggtgccgtggggcccgagcatcgcctgcagcacgcccgcggccatcgagtgggtggagcagtggaaggcctccaacgacccctccggccgcttcatctcctcccacgactccgccgccaccgaccgcaccggagacaagctggcggtggtcaacggcgacgggcacggcgcggcgaacggcacggtcaacggcaacgacgtcgctgtcgccatcgcggtgtaacagtaatgaactggaggatagggacgaacgaacgactggtaggtgtggcgtacctgccgcgtgcccaccggccggccatatatatcgaatcccggcccggcgcggcagcacgtgctattgttacgtgtcaccagcgtacgtgtctgtgtagtgcctcgatcgtatctgtacgtctttaggaaaaggtgtgtccgtgtgtattgtatgtgtgtgagcaagcgtgcgtgacgcgctctgcctgtgtgacaaagcagagcagtacaagctcaggcattttctgtccgagcgatgatttgaactggatctatcatctctgaattgaactcggccggacgacgacctaccgctaaaatta

SEQ ID NO: 23128 - DNA, 3283 bp, Zea Mays
gccacgtgggcccgcacgacccaactattgaatacaatgaacaaacgcgtcggcccattgcgaagcctcacgtctccagcaccgggccaccggcggcgaggtcgcgcgagcgcaggcaggggtggtactgggaggggaggaggggaagaaggaggtgactgcgatgtcgagccggttctggaggtggtacgcggaccggcagttccacaagtgggagaagacggtgctgtgggacatggtggagccctaccgcccgccgcgctccttcgcgccactcgtcggcacctacgtcgccgccttctacaccggcgtcgtcggggccgccgtcaccgagcagctctacaaggagaagtactgggaggatcaccccggcgaggcggtgccgatcatgccgcccaagttctactgggggccttggagggtgatgaacggagaagttccgcgcttcattcagccgcccgacgaggccaagacggcgtaggagcttcgagcttgcttcaaaacttttcagaagaagcatgtatctggtctcgatcgaaaaaaagaaattggagccctgcttttgtgcctctcccactctcctggttgtacgcctgtacctgtctgtctggaatacacgagtaagataagatcaggagaactgaagacctcaaataaagaaaaaaatcagaaaacgttggcatggatacctactaccctaccctagctagattctagctcccattctgttctattgcttgagtattgttgcacgtctccacaatattctgtcgttctaacttccaggcaaacatgctgccgattgatgatcatatctgaatagaatataaagatagctcaaatatgatcgtgtttttcatgtgtgttattttccaaataaacaatacaatctccattcacctttaagcacacaaccgcggactcgaactaggctcaccggagttgaagaaaccctgtaagcacacaaccgcgtggtggatctcgcggccgactgcactgggaggtggccggcgcggcgcagcgctggcggcatgctctgggcgagttgaagcttttgggctgggctaatttcggttctttttgacgttcgggtaccgggctggtactgggagtcagtacccaaatggagggcatcagacaaacaaacagaacctttaaagtgccagaccgccgcatccgccgccactagcggagactgccccgccgcgctttctccaagttcagctgacggccgccgtgcctactccaggccccgccgacgccctgtgaagaagaccctggttgcgctggcgcccatcgcgagcaagaagctctgaaactcgacggcggagcctcaagctcgtgcgccgaagttcattctttcgccctgtagaaacaaagggcagaaattggctaggactatcctggccccccactggccatggcgtgtgctgcttacagcatcagaagccctctcaagctcgctgtaaggcacggctcggatgtgttgagtagcaacaacttgtgcaatggctttaagtcttcggtgtcttacctcaattctcaacgttggagcagcaactgctcagccgtcacaatgcggcatgtcgcatcccattgtcactcgattgttaagactccagcaatgtggccctcaaaagcttcagcaactgatgcagccacagcttccgatgagaggataactgtactggtcattggtggtggaggcagggagcatgctctttgttatgccttgaaccattccccatcatgtgctgcagttctatgtgcccctggtaatgctggtattgctcagtcccgggatgcaacatgtatcccagatttggacatctcgagtagtgatgatgttatctcattctgccgcaagaggggagtgggaatggttgtagtgggccctgaagcccctcttgtcgcgggtcttgcaaatgaccttgtcaaagttgggataccaacctttggcccttcatcagaggctgcagctttagaaggatcaaaggacttcatgaagaagctgtgtgataagtataatatccctacagctaagtatcacacatttacggatgctgtggaagctaaaaaatatgtaaaaaatgaaggagcacctattgttgttaaagctgatggactggctgctggaaagggtgtggttgttgcaatgactttggatgaggcgttggaagccatagattctatgttggttgaaggctcattcggttctgctggttcacgggttatcatcgaagaatttctagagggtgaagaagcgtctttctttgcattggtagacggcgaaaatgctttgcctcttgaatcggcacaggatcacaaaagagttggtgatggtgatgttggcccaaataccggtggtatgggtgcatactcccctgctccaatagtgacagatgagctcaaacgcattgtaatggaaagtataattatccctactgttaaaggcatggcagccgaaggttgcaaatttgttggtgtattatacgcagggcttatgatagagaagaaatctgggctgcccaagcttattgagtacaatgtaagatttggtgacccagaatgccaggttctgatgatgcgattagaatctgatctggcacaagttctgttatctgcttgcaaaggagagttgagcaatgtttcactgacctggtctcctgaaatggctatggtggttgtgatggcaagccagggataccctggctcttataagaaggggaccgtaataaaaaacgtggacaaggctgagcgagtgtctccagctgtcaagatattccatgctgggacagcagtagatggtgatggcaatcttgttgccgttggagggagagtccttggcttcactgccaagggcaaggacatcgaggaagcaagggcaagagcgtacggtgcggtagacgctatcgagtgggtagaagggttctgcaggcgtgacattggttggagagcactgaggcagaagcaagtggctaaccagtagctattccatgaccatgagatttccccagagaaccgcaactacggtgagcctgtactgtttacaagtaataaaaagggaaacggtgcgacccccattgtttttggttgtggaaagacaagtattgctgatcaaacagtagttaacacctgttgatttcagcatgattcggtatatgtttgcaccgatattgtgttcagagtccagacaagcgctagagtgaaaacagcgcgcgccatctgaattctgaccaattgtcttcagttatcggataagtggacctttccaaataattgt

SEQ ID NO: 23129 - DNA, 1946 bp, Zea Mays
ccttttcggctttcggtttcgggctcaaaagggctttccaggagaggagccgcaccgcacgtccgcacgccgctcttcttcccctgcttgctctgggttcctccattcctctccagtctccatcacaggagcacgcgacgcgcgccacaggaaggaaggggaaaaacatggcggcggcgaacggggacgcgtgccgcagcgtcggcggggtgccgcgcccgacgaaccccatggtgacgccgctgctcaccgacctgtaccagttcaccatggcctacgcctactggaaggccgtttacacttacctccaggctccagccctcgatttgtggtttgttaggccactgaggagggggtgataatctggtagacatgaccccgcctcgataaggcgtgactgggtagtgttctggaactattttgctacctgttttttttttgaaccgtgtgtgaggctgggctggctgtgacgattgagcacatttgaggctctgcttcgtagttttgtttcagtacgttataagattaggtttgcaatggggaaaccgtttttcgttaggccaagtgttttatctaggtcgtacttggtgtagcaagtgtgtaaaatcagcgtcacagttcttctaccggtcttcaagttacgctctactctctttcacctgtactaactgcgaactgaaatggtgttagctttgatctctacttccggaaaaatccatttggcggggagttcaccatcttcggtggcctcgaggaatgtataaggttcattgctaacttcaagttcacggaggaggaaatcaaatttcttcgatctgtcatgcctgcatgtgaggatgacttctttgagtacctccgttcgattgactgctcagacgtggaggtttatgccataccagagggttatgctgtgttccctaaagttccactgatgagaattgaaggacctgttgctgttgtccagcttcttgaaactccatttctaagtcttgtcaactatgcttctctggttaccacgaatgcggcacggcaccgacttgtagctgggaagtcaaagaatttacttgaatttggacttcgacgggctcaagggcctgatggaggaatcagtgcatcaagatattgttatatgggaggatttgatgcaacaagcaatgttgcagcaggaagattgtttgggataccaatacgtgggactcattcacatgcatttgtgagctccttcatgggtcttgatgaaattactgacaaaacacttactagttctgatggttcaaacacatgtgaagattttatctctctggtgcagaactggctgatcaggattcaggattctagttcattgcatggcacctttggagaaacgagccaaagtgagttggctgcattcacgtcatatgcactggcatttccaaattccttcctggccttggttgacacatatgatgtcatgagaagcggagtgccaaacttctgtgctgttgctttggccctcaatgatatggggtataaggcagtcggaattaggttggactctggtgatttagcatacctatccgttgaggcccgcaagttcttccatgcagttgaaaaagaatttgtagttgttggctttgggaaaacaagtatcacagcaagcaatgatcttaatgaagaaactatagatgctctgaacaagcagggccatgaggtagatgcatttggtattggcacctacctagttacatgctatgcacaagctgcacttggttgtgtattcaaattagttgagattaacaaacagcctcgtattaaactttctgaagatgtcatgaaggtatcgataccatgtaagaaaaaatgctacagattgtatggcaaagaagggtatccgttggttgatataatgaccggagaagatgagccaggtccaaagatggtgggttttatgatttaccattcgttta

SEQ ID NO: 23130 - DNA, 1936 bp, Zea Mays
cccgtcggcgaaccgatcacagtcggcgagggccgaggggaggccttttttttttttttgacgcggacgccagaaatcccgtcatgtcaggtcccgccgtcccggcgcagaggagagcgcgagccccgagaagcgcggagcggaattgcaagagcagacgagcagtgtagacaacgggacagccattgacttccccgcctaccctgccccgtcccgtccgtctccgtcccaatcggatccacccgcccgtcgtcgcctataaactctccctcccatccgcctctcgaggggcccggcttcctcccaactgccaccgatttgtttgttcggcttcggccccatctccagtcacccgttcccacttcattggtcgctgctccctccctccacggccgatcccgtgccggcgagagggaccatggcggggaaagggaaggaggtgtacgtggccgccatcgaccagggcaccacaagcacccggttcatcgtctacgaccgccacgccaaacccgtcgcatcgcaccagctcgagttcaagcaacactacccggaggcagggagattggaaaatgagctgtcaggcggtaggacccacttcgtggagacatgcgggttgccaatcagtacctatttcagtgctctgaaattattatggttgatggaaaatgtggatgctgtcaaggatgcagtccggactggtgacgctttattcggcacgatcgacacctggttgatttggaaccttacaggaggtgttgctggtgggcagcatgtcacggattgctcaaatgcatctcgtacaatgcttatgaatctaaagacacttgactgggataagccaacacttgctgtgttaggagttcctgttgagattttgccaaagattatcagtaattcagagaaaatcggtgtggtcgccaaagagttcccgtttgcaggagttcccatctcggggtgtcttggagatcagcatgctgctatgcttgggcagctgtgccagaagggtgaagcgaaaagcacctatggaactggtgccttcatccttcttaacacaggggaagagcctacccaatcctcccatggccttcttagtaccattgcttacaagcttggtccagctgcacccactaactatgctcttgaagggtccattgcaattgcaggcgcagcagttcagtggctgagggacagccttggaatcattcagtcagcagctgagatcgaaaagttggctgaaacagtgccagattcaggtggagtgtactttgtgccagcatttaatgggttgtttgcaccatggtggagagatgatgcgaggggaatttgcatcggaatcacaaggttcacaaataaggggcacattgctcgagcagtgctcgagagtatgtgttttcaggtgaatgatgtcctcagctccatgcacaaggatgctggagaggcaggagaagtaaagagcgcagaaggagagttcttattgcgtgttgatggtggtgctactgttaataatcttctaatgcagatccaggctgatttattaggcagccctgttgtcagaccagctgacatagagaccacagccctcggagctgcatatgctgctgggttggctgcaggagtttggaccaaggagaaggtttttgcaggtttgcacaaggagaacacgacagtcttccgcccgaaactggatgaggcgcacaggaaaaagagggcggattcatggtacaaggcggtttcaagatcattcgatctggctgatctttctctgtaaatttatcctgccagcgctcctctatctggttttggaagctgcaaatgaataaattggtcttcgctgggactaatcttaactgcttgttatttatatataacatcacgatgtttataaaagtgagtacatgaatatcctcagattttcagcaggaagtgtttttctaga

SEQ ID NO: 23131 - DNA, 6091 bp, Zea Mays
atggcgccgcctcgcgtcaccaggaagaaggggaagggcgccggcggcaagaccgacctgcgtcccgaccggaagcagttcaaaaggcaccacaaggaggatgcagccgctgagcagggggatggcaacggagagcggcagcagtcggcagcgccgggttctgcagcgctcctcgccgcagcttctgacgaagctgactttccaagagggggacacagcctcctgagcaaggatgagatggcggaggctcgtgcggaggcggagcaggatttcgagagggaggcgaagaaggggaagggaaaaaggaagaggagtggcggcgagtcgtctggttttggcgtggatgacgacttggggatactcttcggtggggccaccactgggaagctcccacgctttgctaatcgcatcacagtaaagaatatttcaccaaatatgaagctctggggtgttgtaattgaggttaaccagaaagatattgtgttaagtctacctggtggaattagaggctttgttcgctcagaggatgtttgcgacattgctttgcaggaaaatcgtaaggatagtgggaacaatttatgcgcagaagttgttcatgttggtcagcttgttccttgtatagtcctacgagtcgacgatgatagtagagaaggaaaagtaaacaaacgggtttggctatcattgcgattaagcctattgtacaagggacttgccctggatggcttgcaggaaggaatggtacttactgcccaagtcaaaagcatcgaggatcatggttacattcttcattttggagtatcttcctttagcggatttatgcagaaggatgacaaagaagatgtgaagactgagcgccgacaactgatgcaatgtgttgtgaaggcgattgacaaaactcgggccattgttcacttgagttctgatgaagacttgctttctaaatctactattaaggatctgaaaggcctttctattgatcatttgattcctgggatgatggttaatgcacgtgtccattcatttcttgaaaatggactcatgttatcatttcttacttatttcagtggaacagttgatatttttaatttgttgaattccttcccctctggtaattggaaagatgattacagtaagaataagaaggtaaatgctcgcatcctgttcgttgatccatcaacaagagcagttgggcttacattgaacaaacatttacttcatcttgaagtaccccctattaatctaaaagctggagatatctacgataaatcaaaggtgctgagggtagataaaaaggccggtctctttcttgaaataccttctccaactccatcacctggatttattagtatacgtgatgtgtcagacaaggatgcaaaaaacttggagaagttcaaggaaggcagtagcttacgtgtccgtatacttggagtgcggaatcttgaaggagttgcaataggcaccataaaagacagtgcttttgaagggtctgttttcactcatgatgatgttaaacctggaatgttagtgagagctaaggttgctactgttgagccattcggtgctattgtacagttttcaagtggcgtgaaagcactttgtccgcttcctcacatgtcagagttggaacatgttgttaaaccaccaaagaaatttaaggttggagctgagcttcttttccgtgtgttgggctgcaaatccaagagagttacagtgacatacaagaagtctctggtgaaatcaaaacttgatgtgctttcatcatatgctgatgcaaaaattggtttagtgactcatggatggattactcatattgaaaagcacggttgctttgtaaaattctacaatggagttcaaggttttgttagcagatctgaccttggattagaggctggaactgaagcagaaaatgtttatcatgttggccaagtggtcaaatgtagaattatcaatgtgatccctgcttcaaggaaactaaatgttagttttgtcatatcccataataggattgctccaatagacactccaaagttgggcagtattgtctctggtgttgtggaacggcttactcctgcagctgttgttgttagtgtaaatggcttctccaaggggacaatactgaatgaacatttggcagaccatcatggtcaagctgctcagttgaagaatgtgttgaaacctgggcacgagttcaaccaactcttagttctcgatactgaaggtcaaaatttagttctttcggcaaagcactcacttataaattgtgcaaatgacattccttcagagatatcacagatgcatcctggtgttgtagttcatggttacatctgcaacattattgaagctggttgttttgtccgtttcctcggacatttgactggtttctctcccaaggacaaagcagttgataggtggatagaaaagctttctgatgcgttctatgttggccagtcagttcggagtcatatactcagcgtaaatgcagaaactgctagagtaaaactcgcacttcaacagtcaatgtgctcctcaatggattcttcatttattcagggatactttcttctggatcagaagcattgaagtactcaagcaatgactgggctcgccattttggcattggtagcttagttgaggcggaggtgggagctatagaagaatatggtattatccttaacttcaaagaccatctggatactgttggtttaatcgagcaccatcaacttggtggcagtagtgtggaagtgggatcttctgtgaagggtcttgttttggatttatctgatggagttgttaacttgtccgtcaaaccagagctaattgacagtgtcagaattgttggaaaaaagaagaaacgccaaagggccgtagttgcagacttggagcttcatgaggaagtgaatgcagtcgtggaaataatcaaagacagctatatggtcctttccatccctgagtacaattatgcaattgggttttcaccactgatggattataactcacaactgcttccccaccaccactatgataatggacaacgcattactgtggttgttggaaatatcccaagttctgactcttctggaagacttatcttactaccaaaagcttcagcacagtattcttccctctctgattctaaaagggctaagaagaaatcaggctacaaaattgggtcacttgttgaagcagagattattgatatcaaaccgcttgagcttctactgaaatttggtggcaatcttcatggaagaatccatattactgagattcttgaagaggattctgctgagcatccctttagtgaactcagaatagggcaaaagcttactgccagaattgtttcagaggctgaaccttctggaaagagtggcaaaaaattcaaatgggaattgtctattaggccatgtatagtcaatggagagtttgctcaaaaagaacaaaatcacaccacaaatgggattgtacgtgcttatgttgtcaaggtggataaggaatgggtctggttaactgtatcaagaaatgttatggctcatttatttttacttgatagttcttccgagcccagcgaactgaaagaattccagcagcgctttagtgttggccaagcagtgaaaggtcgtgttatcagtgtgaaccaggagaaaaggttacttcggttgaaggcacttgataaccaatgcacacaaccgaatatagatgaaacacaagaaccaaagtcctctgtgtttggacaaacaaaacaaggagatatcattggtggacgtgttcaaaaaattctacctggtgttggtgggctcgtcgttcagattggacctcatctccatgggagggttcattatactgaaattgttgactcttgggtgtctgaacccttgtctggattccatgagggccagtttgtgaagtgcaaggtcctgtctgtgagccgctcatcagaaggatcacttcgagttgatctatcactccgttcatcaaacctgatcagagactctaacaactcaagactagatgatctggaaacctgtacctcccggattgagaagatcaaggatctgctccctggaactgagattaagggctatgtgaagaacgtgaattccaaaggatgttttattatgctttctcgaatggttgatgctaggattactctatcaaatttatcagatgaatatgttgaaaatccacagaaggatttccccgttggaatgcttgtacacggaaggatcctgtctacagacccatcatcagggagagttgaggcatcacttaggaagaccactggttcaaaattggaaaagctggatgatattagttatagtgacttgcatgttggggatatcgttgatggccaagttaagcgggtggaatcctttggattattcgttacaattcggagaagtgaattggttggtctgtgccatgtatcagaactttctgatgaacctgtcgttgatattaactcttgctataaagctggtgatatggttaaagccaaaattctgaagattgatgagacgcggcatcgagtatcacttggaatgaagaagtcatactttgattctgatctgactgctgacacaaatgatgatgaaagtgctcttatggacatcagcgttgcccctcagatggttgaatatcataacagaaatttagttcaccgcaaagcagaaccaagggcttctgttctgcctcttcaggtttccttggatgaatcggaaggttccgacctagaggataatattagtaatacatgtcttgaaattgctaatggaactgaagcaaatgctaaaaagagtgataaacagttaaagaaggaagcaagaaaacaaagggaactagaaatcagtgctatggaggaaagggctttgcaggaagatataccacaaactccagatgattttgagaagttagttaggagctccccaaatagtagttttatctggataaagtatatggcaactttgttagatcttgcagatgttgagaaagcacgtgcagtagctgagagggctttaaaaacaataatccccagagaagaagaagagaaactaaatgtttgggtagcatatttcaatctggaaaatgaatacggtagtccaagggaggatgctgtgaaaaaggtattccaaagagccttgcaatattgtgatcccaaaaagctgcacttggctcttcttgcgatgtacgagaggaccgaacagtatgagcttgcagatgaacttctagacagaatgaccaaaaggttcaaaacttcctgcaagatatggttatgccgcattcagtttgctctcaagcaaggcaaggatgttgagtacatcaaagccattgtaaaccgtgcacttctaagtttgccacacagaaagcgcataaaattcctctcacaaactgctattctagaattcaaatgtggggtgcctgaagaaggaagatccagatttgaactaatattgcgggagtacccaaaaagaacagacctttggagtgtttatctagaccaagaaatccgccttggtgacgtagaagttatacgggcattgtttgagagggtgacttgtctgaccctacctccaaaaaagatgcagttcttgttcaagaagtatcttaatttcgagaagtcactgggtaaagacaacgaaagaattcagcttgtgcaacagaaggcaatcgaatatgttcagagttcactgccgtcacaagacaactcttgaactacatggagacttaataagcccacaaacaatcattaggaaataccagtcgtactgtagatgtgatctctttgatgactccttgaacattattgtgaaaaggtcaatgtaaaatgtgggctgttcaaaattttgtttgaaacctttatataagttatgagtctagtatgtcatgtttcacccaattttttggaaggaactattctaagccggatctggttcgaatattgaccttttctatctgtggtattgactgatgaggcacaattgaatgggtaactgtctgtgctactctgtcacacccgggtttcggacaccaagacacgggcgcgaacataatcacctggtgttgctgggatcaggtcttacacatatgatgaatcatg

SEQ ID NO: 23132 - DNA, 1334 bp, Zea Mays
aaatgaatttcgaaataaataaataaaaagaaaaccctccataaccctaaggcccactaggggcccatctacctaaccctatcagtcgcgcgtccctggcttctctcccagccgcagccgccgccgccgcctctctctcccttccctcttctctctgccctcacctctctcccccttccatcgcctcgctagtaacaggtcaccgtgtgtgtgcgcgccatggggattcatctgtcgccgcctgccctcgccttctgcctctcggcgcccactcggttccagtggccgcttcgaggaggcgctcgcgcgcatcgaggagctccgggagcgcgacactggcgccgacgacagcagcacagcctcgtcgttcttgagcgacggagaggcggcgtccggtggcattcagagacgtgcgtgacggtcggaggtcgtcgagcgcgtctagatagcatccaagacaaatagcgttgttggcgatctgaggcagctggtaggcagtctaggcttgggcgcacgcgagccagagagggagggctgggagcacgtcatctccaagagcagcgacgacgtctcctacaaggcctggtgcgacaagcccacgttttcggcgatgcgatgagggttttcggcgatccgtgcttgctagttgcgctctacgatcaggcggagggggtttgagatgtgaatattccactttttcattctagaacatcaaacctgagttgctctacgatcaggcggaggttgttttgtagttgccaattgcgtacatgcattgcaacagatctgggctctagaagctgctaacttggtagcagaaagattgaggcattgcatagcaaaccactggatcaaagagtttagtgaatggccacagtgcatgttcttgagttggcatcaaagttccttccatataataataacaaaatatttgacataatgaatctgttggaggatagacttcaacatgcaaatggagccattgttttggcaacaattaaagtttttctccattcccatgactgttgttcatcaacagcaagagaagaaggaagacaagtcagacaaaacagaagacgagaagaactgatgtatccatgttcatgcttccactgttgaaatgcatattcaacatagcttgctcagctcctatctgttgtttcaacgttgatttaaaagaagagctggtagttgtgggcttttgaacaatagctggaatgatctagctagctatatgtaaatgatctagttgtgaatgatattataactgtgatgcttttgtgaatatataattgtggtgcttttgtgtttatgtgatggatctatgactgtgg

SEQ ID NO: 23133 - DNA, 1684 bp, Zea Mays
tcctaactggcaggctacctgcaagcatgaagcatcgcgacaaggtgctggtagtggagagagtaatcgactctctggaccttcaggggaccaggaactcgttggtgggaaccgtggaaaagcgcgggatttctggcgggcagaggaagcgcgtcaacgtgggcatcgagatggtgatggagccatcccttctaatcctggacgagccaacgtctggcctggacagctcctcgtcgcagctcctcctcagagctctccggcacgaggcgctggaaggcgtcaatgtctgtgctgtcgtccaccaacccagctacacgttgtacaacatgttcgacgatctgatgctgctcgcgaaaggaggcttggtggtctacaacggccccgtaaagacggtcgaggagtacttcacgacgactctcgggatccatgtccccgaccgtgtcaacccgccagaccactacattgacatccttgagggcatcgttaagcctgagtctgctggcatcatcaaagccaagcatctgccagtgcactggatgcttcacaatggttatgaagtgccaagcgacatgcaggacgatgccaaggagatcggcgaacagaccccacagttgaggtccggctcctcagtttctgctggctcaacccctcactgcctccccctcaggaacgccttcgcagaagagcgcgaccgtctcgagcaacatttgtcgaaacccaaggacctgtctagcagaaaaacggcagggatactcatgcagtacaaatactacttgggaagcggctgcgtgaagctaggctgctcatggttgatttcctgatacttggcctagctggtatctgcttagggacgatagcgaagctcagtgacaagacattcgggatgcctggctacatatacactatcattgcagtttctcttctgtgcaagattgcagcactgcggtcattctcactggagcggctgcagtacttcagggaaagagagtctgggatgagctctctggcatactttcttgctagggacacgattgatcatttcagtacggttgtgaagcccatcatttacctgtctatgttctactacttcaataacccaagatcaacgattgccgacaactacatcgtgctcctcgcgcttgtgtattgtgtgacggggatcggatacactttcgctatctgcttcagtcctggctcagcgcagctgtgttctgcacttgtaccggttgttctgaccctgttagccactcaaaagagcactccgacattcatcaagagactgtgctactcaaaatgggcgttggagggcttcataattgtaaatgccaagaagtatcctggagtctggcttataactcgctgcggcctgctgttccagaatcagtttgatatccacaactacaagctctgcattctgattttgttcatgtatggtctcttcttcaggatggtggcatttgctgcaatgattttactcaagaagagatgaatgtagtagtttaggtgtaccgtttagttcatatctaatttcttcattcatttgcacatgtgtaaatcatttcggatgagaggttttatagcactgaccagtgtacagatgagaaaaaaaggcaaatacaaattcagattttttttggcattattctttttatattaggtgtacatccccatctctgaaatcctg

SEQ ID NO: 23134 - DNA, 5784 bp, Zea Mays
ggacagttagctgtaacctacctttccccgctcttcatcggcaaaaaagagggggaaaaaaaacgaaccctgaagaggagagggaaaaaactcgagaaaagcaaaccctaggttgccatgtcatcgacgacatcctaattcgccgcattgcatcgcccaggcaaggggcttttggcacaggtcggcgctcccctgtcatcggattcgattcccctgctcaatttgccgccgatccgtggttcggatcttctcgccgctcggcgactgtcgcgccattttttctctcgatccgtctgcgagacactaagcgcttcgccgacggtcgaccctgctgacgccaccggcgccaggtggcttgtcgcctactctggtccgccaaccgacgcttgatgcctccagggctccaaaggattgctgatgagatcgaaactgtttctgttaatttatcgtggattcaactgaacccccatgctccacgcaaccgcccctggtctgggtcgaaactctacatatgatgggaggtgaaattctgaggaattatgttaacttgattcgtgggctcgtgaatggaacccagtggcagtgataaacccactgcaacagatgctaacgaatcagtggtgggtttagatggtgaggacactttgtctgagagggaatctgttggagcaaaagatggacctgccttgcctaatgggagtggaaaggaggctcatgcaagcagtccatctgcggcgaataagaggaagcacaacgacttgggttctaatcaaatggaactcaatgaaccagggacgccaagttccagctcaggtgattccacatggagcataaatggtctcgatgactgtcaccaactctcattgtctagaaataagaacgacgactctgaacattcggttacttcagctggagttacagtgatcaggcagcctcgtggcgtcttgaggttaagaaagctggctcagaatgttagtactgagagttggactggtggtcataatacttcacaagctaatggagttcctaggtcttcccaacacccgaggcggaacaataagagggaatcaattccgtcccaggagaatagagttagtggtgatgaacctgtcagctgcttgaggactgagaatggtacttgtgatcaggataccggcaccaagttctgttccaaaactgagttcttagctgaaaagcagtcacatctttcaggcgaacccccaaaagctgttcatgttgacaagggtgtctatgattatgtcaaagacgatgatggtgatagtttggaagaaaatgctgcctggatgctctgttctttatcagataacaaatgtgctggatcaccaaggaagggaactgataggttgtcaaagagatctttttctcagaattcaaaccattttaagaattcatatgaaaaaatcaaggatatatgtagtcctgctaggttgctgcggaagcgtgatggcaaagttccgttcttgaagcgtcgtcagcgtcggcatttttatgaagtcagccctagcgatgtggatccattctgcattgttaaagagaggatcagggttttttggcctcttgatgagacttggtactttggcatggtcaaggaatataatccggtcacaaggttacatcatgtcaggtatgatggtaaggatgaagaatggatcaaccttcaaaatgagaggattaaacttctgtttttaccagcggaagctcccaataaatctaaatgcaccaactcaaggtcagcgtttgagtcgaagcatgaacagggtgacagagaagacatgcatagaagcggaagcaatacagagagttttgagtcaggtcccatcagctcatggttggctcgatcaaaccaagcaaaatctgctgcactttgtgacatcaacaagcaagatcacagtcattccaatactgttccagtttcatttgaccaaaaacagtgtcgtgcttctgatgccaaggaatctattgattctgcaccatgtagttcacttgcaaatgggggtgtagaggttctcaaggataggaccatacctgaggacgggaggtttcactttgtttattctaggaagcgattttgcagaaaaaagaatgattttcttagcatttccgaacagcattctaattgccaaagaagagcaagttctatggttcttgcttcttgtcctgatatgaaatctagtattgcaactggtgcttcagttacatatgtcatacctgcattgagcctcccactgaaacctgtttataagttgctttgtgaagcctgttgtgtttcggtttccaatgctttctttcttcttcaatgtggtacaatggttgccttatggcctgttgtacatctggatatacttcttattgatagtgctttaggcttgaaacgtttccttcttgacacatgcatgagatcggcagtatcacttttctgtttacttgctggaagctttaagcagtgttctaggcagagaactaccaaggaatcaagaataccttgtacttcagtcagatttcagatatctggtgggcatggtagaagccaagtagtgtttatgtttttcagctttgttggtgtagagaaatggaaatgggaacaccttcaaggaaagcttcaatatcaatgttccaaaagggagttgtctaaagattccacaaaatgtacaggtcgaagagctcttccttcaatgggtctcttctctaagggttttgatgttcaagagtctgtctttcttccagagtctaattattcagatatcaaacctgccatttgttgtttggatgaccggtgtaaattcactcaaagttttctggacatgacaactgcaccttcagtactgctttggcaccatagaaaaatgttaatggaaagcaattcgactaatggttctcagcaatccatgtcatgtgctttggatgaggatcatcagcagttggtaacagaacatgcatctgatacagtttgtcatgctccacttcaagtttgttcacttaatcttggttcatcaccttatagtccattggatatggtctctgctagttgtgcaaatccatctagctctactagtagggaacccaagattactgaaaggaatataagcccagaatgtaatgacaacagtattgatgatgcaatataattgacataaagtttcgagatcaaaatgagccttgtattggtgctgataggccatgttcctccaaccttagtgttatttgctcttcacagaagtttgcagaggatcgtatttccatcaatattcctcaagacaaagcaattgatgcaacaaatgataaacctcttgacaaagatgaaaaagaaaagcatcctatatctaacttggttcaggaattgaatgaacatccaattggtcgtgttacaccaactgcccccagaactacttcccatcggaaccggtttacgtctatatcacgtgcttttggagatggttcaaagttactgccagaagaccacatgttgactggcttcgctagtggttctaagaagccacgaagtcaagtttcatactcaggttctcctagaagtgaggaacttggcttaaaaaacaaagatcatttccgcaagatacaatctcatgtcagtgttaagacaagtgatgcaaaaaaacttcctgatagttctagaagtgggcatagcagtccagagctattgacttgcattgcaaatgttcttgttacagtgggtgatagaggttggagggagtatgatacccagatcacaatggattctgatgttcacagtgaacagaggatatgcgtgaaacttgctgaagggaccaagtatgctcacaaggtctgtcaagttttgcagcctggggccacaaaccgctatacacatgccatgatgtggaagggtggggctgagtggtgcctggaatttcctgacagaagccagtggttgattttcaagcaaatgcatgatgagtgctatagccataacatcagagctgcttctgtgaggaacattccaacccctggtgtccatttggttggaatccatgatgataatgatatggtatcctttgtgcgatctgaagattatcttgtccacatcggaacagatgttgaaattgctcttgatgaggcccgtgtgttatataacatggacagtgatgatgaagagtggatatcaagccggcagaaattcttagtaagagacaacaacgccacacttgagttggcagaagatttgtttgagagggttatggacaaactagagaagtttgcatatagccacgactctaatgaactcagcattgttcagatgaaggaactggagactgatgacctacctctggacattattgaagtgatacatgcatattggcaagctaagaggcagaaaaagggaatgccacttattcgacatttccagttcgctatgtggaaggtctacgagcaacagttacatgaatgggaatcgaaagtatgcagaatgcagggttcatcaaatgggtaccaaggaaaaaaaatgcctcccaagcctgcattgtttgccttctgtttgaggcctcgtggactcgatgtaccatacaagggaccaaagcagcgttctcataagaagcttatgtctacaggctgccatagcttttcaagacagcatgatggcttttaccggcaagggtactctcccaggttctctacaagaacaggttctcttcgggcatttgagtcctcggaaagttctacaccaagatttttcaggacaaatattgtcaaaaggagtgcaaccgttgctttctctgatgatcaccagccgtcgccttccttccgccctcagagagttaaacggagcgcatctgaccattggaacactgtcattcatgactggcagaactcaaagcatctctttccgggctcgccccctgttgatattgaggagctcaaactgcgggatgctgcaagcgcagcacagcacgctgctgccatggcgaagctcaagagggaaaaggctcactgcctgatgcagaaggctgaccttgccctccataaggccacggtagccctcatgattgctgatgcaatcaaatcttccagcaggaacaagtctcgggattgccgaaggggatttgatgaatgaggaacgctgacttttttttgccttttgccgcgagcccttggcgtatacacacaacttgaactcgatgcttttgctgatgatgggagcgtgtttgcttatctaatgatcgagtcattagatagcatcccttccccccttctcccccctccccctcctttgcgtctcctgtacataggtttcttttcatcattcttttgtgctcttttacctcccgattaacatattgcccggtgatgaatgggccaggtcaccaggatgtaggttagcaatctggcgtgttgtctgaacagcggctagggaagtggcgctttacggagggttatggtcctgttgttgcactgtgatgcctttacgacattgcatattctagaaggagcacatggcatatcgtgggtcagtgggagcagtgccacatgacccctctgggtcataaataatctatttccgatggctcataggttgtgttcgatgacctaagccgtcggaaattttattgtggtcaacatatagtactcattggaattctggaggaacttgaacatgaggtccaacaacctcttagatatattttcgattccttgtgtgttctccaaatattttgcatccaataaacttacaaacactttcttaaaaatttccatgttttctcgatccctgtaggtgctgcgacatatgtt

SEQ ID NO: 23135 - DNA, 1690 bp, Zea Mays
cttagttggtggagggcatagatattttcccatacaacctaagttcattgcggcaaatttggggacctatttcttcatcttaattcttagtgaaaagccaccaagtccctcctagggtgaaggttccatggccggtttcagagagagaggctattctacactattttgaactggaatatcttaaagaagatgtcgtaattgtgataatgaaaactttatcagacttggatgccatagatgttcgaacccatggatttagtagggatggaattcctgaagctggtgacacagttcggatagatgtgtttggaggctttgtattgcaacggattacaaaagaaagaagctttttcagggcaatagctaatatggatatcaagctagattttgttccaccatggttgatcaacttcatgtcaaggcaactaataggcagcgggcataagctgtatcaaaaggcagtcagcaccgtggccagtcatgatgatgactacaggaaagctttgagaggaccgctctacgtcaggatccgtgagtaccaggattctgatgacaaggcgaaggtggcagcaacagaggaaaatgctaccgaggcgccccctgataatgccactacacaaaatcgtttgtcactaacaaataccgtatcgaatagcgagattgtggaggagtccgaacagaacacatccgtcactgtggatagtcttccaactagccaacaaccctatgtgccagttgagcaagcatggcaggtcggaaacaggccatacaccagtcctgaggtggagcgtgcgctgtgcatattagacacttctattgcacttctcagaggcgatgataaggctggaaatgtcaccacgctacaaaatctgctcagttacgatgcatctttggaagcgagtactgctgctggttccgtaacttgtcaaacaaacgttcttaacgcagacagtcttccgaatggccatcctgttgccgcagcgccacaagactccagagagaaagctagcgatagtgccgcagaggaagaagacgccggcgacgaaaactctctgaaaaatccgacagcttccactgtgacgaagagtgtgtcgatgacattgcgaagtgcaataagggtgcacggtgaagagagcctggacactgatggcttcttccatcagaacggtttcagcaacagcaaggagtcaaggcgagcgaggaagtctaagaagagatggccctgctgcttaatccctaccactatgggatgatgtgggcccatcgtaggacctcgttcgttcaagttaagttgctgattttttgagtgtactattaacaaacagtaaactacagaaatttagcgcttcgtcagttacacgatgtgggttcagacggtatgttatagcgcgtagataatgtcttggtaaatgtaaagtagaatcgttgtaaacaacacgtaattcttctcacgagagctctgatttgggggtatatgggtaaagtatatgggtaaagtacatatactattattttcacgcatggtggttatgctcagcagagcatgtaaacgtataaaccactgttttatattatagactacactattataaactcgagcttgaaatagtgagtgtgatagagagttggatgggtagtttgccggagacagcctagcctaagattggatccttccggttggagaaggaat

SEQ ID NO: 23136 - DNA, 1512 bp, Zea Mays
cggtagtgatctttgtttcctgggcacgtcaacctcgacaggcagagaagagaagcctcatccttggcgagtgattatcgagccagtaagccatttgcaagcactgaactgaaccctcagagcgttgttgcgatggaccaaatcgctacccccgacgaaacagcacatgcctctgcaccttcagttcataagctgtttgatgctaaattaggccaccatagcgtgatggatggcaccttggcatccacgagtcagtcatcaaacatcaagacccagctgatccggtcatcaagcttgtcaaggagcatatcagttaaccttgagaagaggagccctgaatctgatcctgaaagcccacagtctcacgtctcgcatcctaaatttgcagaacccatgttctcgaattcttcgacgttctgcacaagcttgttttcgtcatcttcgacaacagagccatgccgtcaaatgggcactttacctttcctgcctcacccccctaagtgtgagcagcaggtttcagctggtcactcatcgagctcctctctgcttttaagtggtgataccggtttagatgtggctgaacagtcagatgatctgaacgacttgctcaatctttcgggagatgcttctgatggcagcttccatggagaaaacaatgccttagcttttgacgaacagatggaatttcagttcctgtctgagcagctagaaattgccatcactgacaatgagaagaatcctcatttagatgacatatacggcacaccaccacagctgtcatcacttccagtatcatcttgctccaatcagaatctagggtcaccagttaaagtccagcttagctcatctcagtcatcttctagctctgcaacagctaacaagtcaagattgaggtggacacttgagcttcatgagcgttttgtggaggccgtgaaaaagcttgaaggtcctgaaaaagcaactcccaaaggtgtgctgaaactaatgaaggtagaaggtctaacaatttatcatgtgaagagccatctgcagaagtatcggcttgcaaaatatattcctgagcctaaagacgataagaaggcttcctcggaggataaaaaagcacaattaggaaagggcagcattgattcaagcaaaaacaagaatttacaagtggcagaagctctaaggatgcaaatagaggttcagaaacagcttcatgaacaattagaggtgcaaaggcagttgcagctacggatagaggaacatgcaagatacttgcagaaaatactagaagagcagcagaaggccggcaatgtgccactaaaagctccaaccaaagcacaagcaacaaagtcgtcacctgaatcgacgtcagacgagagaactgaatccgaggtagacaccatttctccgcggccacccaagaacaggaacccgggtgtagacgcagaatgcaaatcgccgggaaggatcaagcgaacgaaggttcaggctgatcttgaaaacgagggcctgtgttcatagcgaggg

SEQ ID NO: 23137 - DNA, 868 bp, Zea Mays
cagggacgtccgccacccgccaagcagggccagtccgcctgctcgcttgctccagcactatctggtgatatccatggccagtttgttgatcttctgaggttgttcgatttgggtggttatcctccagcttcaacttatgtattccttggagactatgtcgatagaggcaaacagagcttggagactatatgcctgctgctggcatacaaaatcaggtatcccgaaaaaattttcctgttgagggggaaccatgaggatgcgaagatcaacagagtctatggtttctatgacgaatgtaagaggaggttcaatgttcggctgtggaagatattctcagattgcttcaactgcctgcctattgcagcgctcattgatgacaagatactgtgcatgcatggtggtctctcaccagaatggactagtttggatcagataaaggatattgagaggcctgctgagattcctgattatggtctcttgtgtgatctgctttggtctgatcctagtcctgatggagaagggtggggggagagtgacagaggtgtttcgtgtacgtttggtgcagataagctcgtagagtttttggagaagaacgatctcgaccttatatgccgagctcatcaggtagttgaagatggttatgagttttttgcacaacgaagattagtgacaatcttttcagctccaaattactgtggagagttcgataacgccggtgctctgttgagcatagatgagagcctaatgtgttcatttcagattctgaagccaactgatatgggtccaccacatgcaagaaaacaaattccaaataaggtgtatgatttgaaggcaagcaaactgattacatgactctgtcttccacttc

SEQ ID NO: 23138 - DNA, 3049 bp, Zea Mays
ctacctgcccgccgccgccgccctgcgcgcgccccgccgccccaccgcgcgccacccagcacgccaccacccagcgcggcccgccctcaccaccccgcggccccgccgccgccgccagcgcctagccacgcgcgccccaccctcgccaccccgcggccccccgccgccgccagcgcctagccgtgcgcgccccgccgccccatcgcgcacctgctagcgcgccgcccagcacgtcgcccgccctcgccaccccaaccgccgccgcagccgccgcccgatgtgccctcgtgcacgagacctctcgaaccctctcagaaggcggtgcgatccggtttgggtcgccgtgccgagcccaatgtgcccgacgcgcgcgcggctgagtcaaagccgaaactggcgctcggagacgacgatgataggccgccccttgaggagaagcaccgctgcagcggtgagggcggattcatcttcctctgcgcccttgttggacacaccgaggctatcggtgggatttctatgccgtctggttcgaacaagctctactccggcagcgtcgacggatctgttcgcatctgggactacaattccggcaaggctaccaacaatctctttgattatggacgagtaacgggctgcttccacggaggttccagtgaggaggttgtcattgttcgtggtggttcatgtgctgattagcaatgtgtgcaccctatggaaccaaccataaccgaatggtgactcctaattttttctgattggttgtgcctaaatcaccaatcgtcagcggatttcttatgattagttgggtgatcctgtgctcctggtttggattggatgttatctgtcaggctagccttgttgctatatattggaggctcttcgcctgattcggttacccgtttgcctgggatcagtttgtggcgctatctggttggttgtcacttggttgatacatatgattgcatgatctgcaagtgaatcttcagagattacaactatctcattagtggatagtcatgcatttatgtaaaaatatagcaatgagaaaaaggaacaaagtaaagaaaaagagaaaatatagatggagatatgtgggagtatatccaagaggatggaaaaaatataatttgttatcatattacaatttttgttcttaatgtttctgcaatagtgtgttgatgtcatcaagatgggaggcaaggttagctgcatgatcacccatggcccatgggtactcattggaattccaaagtttgtggaggcattgaacacaaagacagggatgaaactaagatttcaagggccttctagtctagtttgttccatggctatcacgaatgagatgttgtttgctggtactggagatggtcgcatcatggcctggagatttcctgctaaggatagtaacactgaaccagtgttgatcctcagtggccatcaacggccagtgatttcactgtctatcttggcaagaagactttactctggctcacttgacaagtccatcaaagcatgggaccttacaactcggcagtgtgtccaaacactctctgagcataaagcttctgtaacatctgtgctttgttgggatgagaagttattatcttgctcccttgacaagactgtaaaactctagactctgtcagagtctggaaaccttcaagtcaaatatgcccatgccgaggagaatggtttgcgcacactcttcggcatgcaccgagttgggaagacaccagttctcttctgctccctccacaacagcaattgcgtccgcttgctcgacttgccatcgtttggcggtctgctgctacgcgtagcagctttgcatcgcgtgaatgattggcacgctggatgttgcaggctgcttgattttttttactgatttttttttttacttacgccatgattttaaatttgggagacagtttgaattgaatgtgttccctgcctggcagcagttcgttagatcacatgcccgtcgtctacctcaaaacagtctcatcttttggaccgttcaattcaacttacttagttcaaacccaaggaggacggagggagggagattcagttctgaaatgtttattctgttattagtttaatcgcagcttctggaacaacagctctgtgccttttccctgcttaaattaaacggcaacaaggtctcagagcacctgccatttttcctgaaaaattgtttgtttaatagatgagagctacatctagttgtaggtgtccgtaggcctcttctttctgaacagatccactagtgtggaacatgcagaaatgcaggctgccaagaggcaaacagttgctactggatcaccgaccccagggcgcactgcatgggttggcaagggaacagtaacagcactaatgataatctgcaaaatgaagacgcaaatgatgcttctaggtggccatatccctggtgggcccatatccctggtgctttgttctttgatgttgatggaatatccgacagaacatctagtttaccacacatgctgccatctgaaaaggcattttcagttgctgtatctgctcttggcatctacaacaaagatgggatagtagtttatgatggaaaggggatgttcagtgctgcttgtgtttggtggtggggaggactgcacagttcgcatttggagcatcaaaacaggcgagctaatctttgtgcggagcatggcagacagtcccttcacgacatcttgttggcccaaaagcagccatggcttgtagtccttggctgtttgatgtaaaccacagctgggaagtcagacatcacctagagctagggtgtccattcttgacatgtttctcttagtgataggtggatactgtctaggtaggaacagagtcttgagggattgatgggcgcatgcatcttcaattcctgtgtgttgtattactactggtacaatctccaatgcttgtgaacttatgtgtttggactgtgaatttgtgatatgaacatatatcaatatgtttaaaatctgtattgtttgtgatattctgtgttgcatgtgatattatgtgtgtctaattttta

SEQ ID NO: 23139 - DNA, 227 bp, Zea Mays
gttatgatgccccaaacacagcaaaagatcactgaaacctccaattttcagttactgaacagcacagcctcaacttgacagggaactttctgacacaacttactcccggttttgtaccgcaccaagtcccaccttcctaagagaatttgttcactactctatggactttcattttgttatagggactttagcttaaaactccttagattaagtacaaaagatcccca

SEQ ID NO: 23140 - DNA, 1628 bp, Zea Mays
agaacacaaccaaagcatctagtttcgtccctgcttcctgcctacagcgtcgtgcgtatgatacttcttcctaatcattcgcgtgcaccgacaaacaagagagcaggtctccaaaactattgcccccagagatcttgtatcaggagagggcgtcaagttgtcttctctacccgatcgtcggcaaggaacaaacgttcattcaaatcaaagcgcaagtacccgatgtacaagatgacgtggccatcatagcaacaatcaaaaggtttcatatgggacaaatgcacatcacactttgctcgagaaccaacaagcaacaatataagaactttatgaagtcatgcaaaaacttctgcaagtcaaacatggaccatagaaaaatagtcgaagaagaagctaacttctaaactcaagccaaaagtggtaacaattacaaccaatccaaaactagcaactttgagtgaaggcctctaccttcgtatcaccaactaaaccaaatagacaatcaactactggcgagagcaaccactaagagagaactcattatagtgaaacaacattcaatagaggagggacaaaccacaaaggacagagaggaggtagaattggtggggggtgaaagggaaatgtgcctttgggccatttctaagtattttggtgatttagtgtccaacacaagtgcctaagtgttgatctatgcaaagtggtggacaaagagcaaatcaagtcaaaaggtatgtttctagacttagtacattgttttatggactgatgtattgtgtctaagtgctggaaacaggagaaatcaaattgaaaaagagatggctttattcagccaaagtcagctctgtctgggtgcaccggactgtccggtggcgcaccggacagtgtccggtgcgccaggctggctcaggcgaacttgctgctctcgggaagtaattaacggcgtacggctaaaattcaccggactgtccggtatgcaccggactgtccggtgagccaacggtcggccgcgcgatccgcgcgagacacgtggccgagccaacggtcagaagggggcaccggactgtccggtgtgcaccggacagtgtccggtgcgccaacggctccaaagtgccaacggtcggcttcgctaaagaaggaaagaaatccgcaccggacagtgtccggtggcgcactggactgtccggtgcgccaggcgacagaaggcaagaattgccttcctggaatgctctcaacggctcctagctgccttggggctataaaagggacccctaggcgcatggaagaaagcaccaagcaacctttgagcattgttgatcattcacacttcactcttgcgcactaattcgacattcttagtgatttgagctctgttctagtgagaaccttgagatattgttttgagctcaagttttgatcgtgtgtgcgcgtatttgctgtggttttgagtgtgttgcttccctcccttactcttgtgcttcatattgattcttattgtaagggcgagagactccaagttgtggagattcctcgcaaacgggaaaagagcaaagtaaaaagaacactgatgaggacatcctccactattacccgttggcaaagacgaaattggcccagttggctcaatt

SEQ ID NO: 23141 - DNA, 3501 bp, Zea Mays
gaagaaaatacaggcggagagaggcgaggaaggaagaaatcgacgaggggattggattggactgcgactgttgttgattctctcttgcacgcggcggtcctcctccagagtccagacccaatcccaaatccctaatcctacagagggatcccaaatccggcgtccagtccagtccaacctgtagtagatatccccgccggcttggccgtccgtccttgccccaattccgattgaccggagaggagttggatcagggagcattggaatggccgccgccgcataggatggagctggattcctccggccgctgctcggttgctcccgtgaatgctgtgatcgtcgcgattggaggtggaggcgaaggttctcttcagtaagagcttcaagagctgtgatctagctgattgggtatggaggagagtggcggcagctgcggaaagcgggaggacgcggcgccgccgtggaggccgagcgactccacggcgttcggccgttttgcggcggccgcttctccgccggaggcgtccccgtcggcctccgccaatggggctgctgcccgcgtcagcagccttcatggggtcaggcggaaaccgtctgttgcgagattaacagcaggcatcattcagacatatctacaatgtgatcccgagtttaagtactcagaggttctaaatccaaaacgtttcctcacgaatccctctaccccagcccacaacgatgggcttgacaatgcaaattgggatctcatattgtatgtcaacttggagttggttaataagatgtcgaacagaaggtttattgtcaaggaaatgcttgggcagggaacttttggtcaagtagttaaatgctgggacacagaaactaacgactatgttgctgtgaaggtgataaaaaaccagcctgcattttaccatcaagctatcatggaggtttcactattaagaacgaaatttgatcctgatgatcagcataacattgtccgtatgcttgattatctgtcatttcaaaaccatttgtgtatagcttttgagatgcttggccaaaacctatatgaactgctcaaaaggaatcacttaagaggtctgaaattgaaatatgttcaagccttctcaaaacagatattggatgccatggttgtgatgagagaagctggaatcatccattgtgatttgaagccagaaaatatcctgttagctcccagtgtcacaacagctgcagaagtgaaagttattgattttggatcagcctgcctggagggtaaaacggtttactcgtacatccagagccgctattacaggtctccagaggttctccttggctatccatatactaccgcgatcgacatgtggtcgtttggctgcatagttgctgaactgtttctaggtttgccattgtttcctggagcgtcagaatatgatgtgcttcagcgaatgatgaaaattcttgggggccaaccaccagatgaactgctaagggaagctaaaaacactgcaaggttttttaaacatgttggaagtatctatcctggcaatgaggcacctactggtctttgtagtgcgtacaaaagtttaagtgaagaagatgttgaagtgagagactccaagaagccacagatgggaaagtggtacttcccacacctaaagcttgacaaactcatatgtacctatccttggaacaattccgaactgacagagacagaaaaaatggatcgtttgggattagttgatttcttgaagggtctccttgaatttgatccaaataagagatggtcaccattgcaggctctataccatccattcataacaggcaaatcgttcaccggtccatatgaacctgtacctgagaccacaagaattcctgttgttcgtgctgcagcaattgatcacaatcctggagggggccactggctacattcaggtctttccccgcaggttggaagtgtcaacagatacctaccttcgaataatgcctaccctccaaaggttcctttttcttatgggagtagttatggaagctttggtagccatggtagctataccgccaatgctggttttggtaacagctacggaagcattggtgatgttaatgctatcaatatgtattattcacccttaagttcttctggattaacgcaaattggctctagtccagatgttagactaaggatgcttctcccacatgatagaggaattcgattgagccctggtagtcttgggcctatgtctcttggagccagtccatcacagtttaccccaccaaactaccagatgcaaatcccagctaattcggttgggaagcatggttctggttctcctgcaagtggaggcattcatggttctccgttaggaaaatctgcaggagtgggcccatacaacatgaggaggaacttgccaatgccgccacatgattatgtatctcagcatggacacgggcgttgtggagatggtgtcagtttcagtcattttgatgcctgtgctcgaggacatacaggtcactctcatagtgcagcgggacctagttcttatcattctggttggagaccacaaataggttcaaggagtggtatttccttggaggcctcgtctagtcatgtgctttcacaggctccatcacaatcgtttgacttttcaccttcatcagcacttgatcctgctaattgggaccctaattatagtgatgagtcactactgcaggacaattcactgtcagctgaactaagtagcaacctccactttggagatgcaactggccaagggagtggatctatcaggtcagcaaatttccaaggccacgtcttcgctacatctaaccctgtaccaacaaaccaaagagcagatcaattatttcatgtgtcttctcaaggattgagtgcccattccagtgttcccgtcaactacggtggttacaaccctccaaattatcctccgcaaaatctccgtcctcgtcgtggacaaccaattcttcatcagcgatataaccaggcaacttccagtccgatgcggccaatgggaagccatcacagtgggcagcctgcgtggcctagttttggcatgggcgatggagtgccctggggaggaacaggagggcactcatttacgacaagtgggctatcttcatctcttgcaagaaaggattatgggagcatcttttagtgtgttgtggacaggaggaatggcgttgattcattgcagtcgtaaattatttgtattagcaaaattggagtgcgatgattctggtttattgtttcgatgttgttaccccatccctccaattggtcctttgtgaacaagacagttgatatacaatatatgatcgatgacaatagcattcctttgcagccctttttttatcagtcagaagtttgggtgttcgcctgattgctgactatgttgtagttgccttgtcagctatgtaatatgaaggcgtgatgtgcttaggttcaggtgtgtttggttcagctttctcaactagattggtcaccaaataaaatctggaatcgac

SEQ ID NO: 23142 - DNA, 144 bp, Zea Mays
cagatacaaccatggtttgttatggagttttttatatagattattaagctggtggtggaagagtttaagtgttaaatatgacctacagttggatcacgatctaacggatcagatggtttgcttgcacgcttgcacggaaagact

SEQ ID NO: 23143 - DNA, 2340 bp, Zea Mays
agccactagctgccagatcatctgagggttaccaggttgagagagaaagggggattactgtcaaagcacaaacagcaaccatgttctacaggcacattactgcatctcaggactcagatatgccaagatatttgcttaatctgattgatacaccaggccatgtggatttcagctatgaggtatccaggtcccttgcggcttgccagggtgctcttttagtagttgacgcagcacaaggagtacaagctcaaacaatagcgaacttttaccttgcatttgaatcaaatttgagcatcattcctgtgattaacaagattgatcaaccgactgctgatccagataatgtaaaggatcaattgaagaggttatttgatattgatccaagtgaagctctgcttacttctgccaagactggtagaggccttgaacaggtattgcctgctgttattgaacgcataccttccccgcccgggaaatgtgatgcacctgtacggatgttgcttttggattcctactatgatgaatacagaggagtgatttgccatgttgctgttgttgatggtgctctgcgtaaaggtgataagattgcttcggctgcaactagccgtgcatatgaagttcttgacgttggcattatgcaccctgagcttacacctactggagttctctacactggacaagttggatatgttattagtggaatgcgttcaactaaagaagcacgcatcggtgatacccttcaccaggcaaagagtactgttgagccacttcctggtttcaagcctgtaaaacacatggtcttctctggtctctatcctgccgatggttccgactttgaagctcttagccatgcgattgagaaactaacatgtaatgatgccagtgtctctgttacaaaggagacaagtaatgcacttggcatgggattcagatgtggcttcctaggattgctacacatggatgtgttccatcaacggcttgagcaagaatatggagctcaagtcatatcgaccataccaaccgtaccttatatttttgaatacggtgatggaagcaaggtgcaagttgagaaccctgctgctttggcttcgaatcctggaaagcgtgtagcagcctgttgggagcccacagttattgcaacaatcattattcctagtgagtatgttgggcctgtcattatgctttgttcagaaagaaggggcgaacagctagaatatacatttatcgatgcccaaagggctctgttgaagtaccgattaccattgaaggagataattgtggacttctacaatgagttgaagggcattacgtctggctatgctacttttgactacgaagattcagaataccaacaagctgatctagttaagatggatatccttctcaatggtcaacctgttgatgctatggcaactatagtgcataaccagaaggctcagcgggttggaaaggatttagtggagaagctcaagaaatttatagaaaggcaaatgtttgagatcaccatacaagcagcaattggttcaaaagttattgcaagggaaaccctgtccgcaatgaggaagaatgtcctggccaagtgctatggcggtgatattactcggaagaagaagttgctagagaagcaaaaggaaggcaagaagcgcatgaaacgtgtgggatctgtcgacattcctcaggaagccttccatgagctactgaaggtctccaattcaaaatagatggtgatccactgcaaatttagtttctgtagctgtccaaattttataagtagctgtgtggtgatgagtagcagcaaccttttctagtcatcttctgacagatcttgacagaatgatcgattccattgagtacataatggcctctcctgcgccttgtcagacgagccaacttgtgctggaagttgctcctcctgtagtcctgtcatccatcctgtggtgattgatatacacacaagtcttctcagctggccgcagacggatttcagtagagccaccatctttgtatttgttgattgattgatggaaaaccatcctttgagcacttgctgaacccagttttctctgctgacctgacttgtcacgttacactctattttttgtgttagataacggttttgagcaaaaataataggtcatatacacattaattggtcactgaaacaatgtggtacatgtaataagaggagctgcattgaataaagacatagtagtatcacgtttttggagtttgcgggctatctccttttcatcctgaaatgaacccctcttctaagccgagagtatcgtttggcttcgaacacagaagttgataaataaacacaaaaaataaaaaaaaaga

SEQ ID NO: 23144 - DNA, 2455 bp, Zea Mays
atgggcactctcccctacctcttacttgtcgtgctgtcctctctgtcgctcgtcccccgcgccgccgcgtactcggagtactcgtgcaacggtaccacgggcaacttcacggcggccagcgcgttcggcgccaacctggcccgcctcgtcgcggcgctgcccgccaacgcctcctcctctccgtcgctcttcgcctcggcggccgtcggcgcggctccggacacggcctacggcctcgcgctgtgccgcggcgacgtcacggacgccggggtctgctcggcgtgcctagccgacgcgttcggcaggctgcggcggctctgcggcgcggacagggacgccacgttctacgccgacctgtgcacggcgcggtactccggcggggacttcctggcgcggcccgacgacaactcccccgtgatcaacgcgctggacgtgaacgggtcgacgtactacgggtgggacgcccggaacgcgacgagccggaccctgttcctgtcgctggtgggcacgctgttcggggagatggccatgtacgccgcctacaactcctcggccgcgcgcatgttcgcgagcgccgccatgtacgtcaacccgcagctgcccacggtgtacgggttcgtgcagtgcacgccggacctgtcgcgggcgcagtgctgggactgcttccaggtgctccaggaccagaaccggcggtggtacgacggccgcgagggcggccgcatcctcggcgtccgctgcagcttccggtacgaggcgtaccatttcttcggcggcatgccggaggtcagaatcggcctcaagggcgacccatcttcaccagctgcggaaacggaaatccatggtagcaatcacagggtggtcttaattgtcgctgtcatcgtatcaatcacggcgttctccgctatgatggctgccggccttgtgataatcagagcacgacgacgaaaaggagccgagaagaagagaaagctgcagctggaggcgcaatcccggaacagctctaccacagaggatgcgctgaagctgtggcggatcgaggagagcagctcggagttcacgctgtacgacttcgccgagctggcggccgccacgggcggtttctccgacgagaatctgctcggcagaggcggcttcggccccgtctacaaggggaagctgccggacggcgccgagatcgcggtgaagcggctggcggcgcattctggacagggcctggaggagttcaagaacgagatccagctgatcgccaagctgcagcacaccaacctggtgcggctcgtcggctgctgcgtccaggaggaggagaagctgctggtgtacgagtacatgcccaaccgcagcctcaactgcttcatcttcgaccagcagcgggggccgttgctggactgggagaaacggcgccgtatcatcgagggcgtcgcgcaggggctgctctacctgcacaagcactcgcgggtgcgcatcatccaccgcgacctcaaggctagcaacatcctgctggacaaggacctcaaccccaagatctccgacttcggcatggccaggatctttggatccaacatgacggaggccaacaccaacagggtcgtcgggacatatggctacatggctcctgagtatgcttcggagggcatcttctcggtgaagtcggacgtgtacagcttcggcgtgctgctgctagagatcgtcagcggcaagaggaacactggccaccacaactacggcgacttcgtcaacctgctcggatatgcatggcagctgtggagagacgggagggtgttcgagctgattgacccgacgctgggcgagcgcggcgacgtggcgaccatcgtgcggtgcgtcaaggtggcgctgctgtgcgtgcaggaaagcgccaccgaccggccgaccatggcggacgtcacggcgatgctggccaccgccggcgacgccgcgtccgccgggccgctcccggacccgaagcggccgccgcacttctccctcagggtggcgacgaccagcggcagcgacgacgactgtgggtcgcggacgcggttcaccacgtcgtgcagcaccaacgacctcaccatcacctccatccacgagggcaggtgatttaagcagcggaggcgtcttttgatggtcggtcgatcgagctttcgtgtgaatgagttgacaatccgttggccgttgtcggctgaagacgagacgagtagtgttatcttgcttgcatctgttgcttacttttgagaccgtgacaggtcacatgacgatcgtttacgtttggatggtgctccgctgtgcagattaatgctagcagtgtggaattattattattgattagggacaagtcgccgtgctgctttgatggcgaaaggttggtgatatgcatgggcggcagggttcattcaaaaggacgcctcctggtttcctgtagagggctctttcagttcagctggcctgcactgcactaaac

SEQ ID NO: 23145 - DNA, 1653 bp, Zea Mays
accggctcgagcctgaccgtcccgtactgtcgcacgaaccctaactactagccgtccctgccgccttccccttcggaggtactactggattcaacaacaaccccctctcgcgggtcccgggccgacgcgacgaaagacaaaggcagcggaggtggcgctgcagtccaccagttcttgggctcttggcaacgtcgccatcgtcatcggccatggttcttggcaacgtcgccatcgtcatcggctccggaattgtcggatcagtacttacaggcggtgagtttggccttcccgacttcagggatgcaatctctggtgctttcaagttcttgaccaagagtgcaaagccaggcaaggatgggccgtctaccagcagtccacatactgctgagttgttcagccaggtcaatcatctcagagaggagctgcaaatgttgtctaaatcaaatcatgtttccattgtcactgttgatggtagacctggccctggtgcatacggtataacagctgttgttattggaggagctattggctatttattcataagatggaaggggtggaaactttctgatatgatgtttgtgacgaagcgtgggttatcagatgcttgcaatgtagtggggaaacaagtggatcaggtttcagaaagtgttaatgttgcaaagaaacatcttgctggaaggattgatcgtgtagattgtagtttagatgaatgccaagaaattacagaagccacaaaggaagaggttacaatcatccatggagatctaagtgccttccagaaggaaatggaaacagttcatctcgtagttcgtagtctggatcggacaacacgaggaatatatgatttgtgtgaattcactaaaagattggatcagagcccgaaagctgatactcgtcaggttacatcatcaacttctcgtcctgctattgaatcctcagagagaattgttagggttgcttctttacccctggctttggaaccggagtctcctagaattgaggcacctaaggttgtgcgctcatctacagtcatgtcagcatcgggtcttagtttgctagctggaactacaataccacctaaaagagatcaaccgggtgtgtacagcagagcaagttcaatgaaggaaggatcctctgagttgccgagtggcgtgcgaaactcagcagaaccaagccccaggagatctggtgcttcaaccctgtttggagggcttgggtttctaaggaactacaccagctgagatgtatgtgctcagataggtgttttttttcccaaggagaccagcagtttgagctgtatatgtaggtagtaggtaatagggcagttgccaaaaggacggctcccttttcctattgggaattgcgaatttttgtaggaactaataccttgcagagcaatgcctcgatgccaagatacaaactttaaatttaatgttgggttagatgctggaagagaaacatcctattgtatattgcagtggaatgtactgctggaatacatgtttgggaaggagcaattacaactaagtttgtgcttttggtggactggactctacttgctggctgatgttaggatagcatgcactgtatgcagctgcaggctgcagccatgtctggaatacacggttggatttccacccagagctatgggct

SEQ ID NO: 23146 - DNA, 2380 bp, Zea Mays
ggacgctgccggctgccccaccccgtcccctaccttcgtagttcctccctctttttctctctctctccttcatcagcttcgccctccacctccatcctcttctttactttaaagttactcccactagccccagcccccgcgccgtcccatcacccccaatcccagccttctcctcctcgacgacaccacacgcccccaaaaaatcccccttcgcctcggattcccacgcggccctcgagtcgccggcgcccgccgacgccacagcgaggtggttccgttcaaggcttgggaggcggaagtagggagcgggaggatccgttcgcgtccagcgcccgttgacgcgcccatgtcgggccacctcgatcgcttcgcgcggccatgttttgaagggcgctcaagtcatgatgaatgcagagaccataagtcagactttgaagtctctgaagacgaaaagaagaccagaatgggctctttgaagaaaaaagcaatagatgcatcaactaagattaggcattcattaaagaagaacaggaggaagagtggtagccgggtcctttctgtgtctattgaggatgtgcgtgatctagaggagctgcaagctgttgaagcatttagacaagcactactcttggatgagctgttgcctgcaagacacgatgactatcatatgatgctgagatttctaaaagcaaggaaatttgatatcgacaaagcaaagcaaatgtggatggatatgcttcattggcggagggagtatggcactgatacgattttggaggacttcgaatacactgagttggacgctgttttgcaatattatcctcatggttatcatggagttgacaaagaggggagacccgtttatattgaaaggcttggaaagcttgctctgttgctgcaaaaaggcacattgattccagcacaacaattctggatgtccagggcgtgggtttgaaaaatttcagcaaaactgcacgtgaattaattcagcgactgcagaaaattgacaatgataactacccagagactctataccaaatgtttattgtcaatgctggtccgggtttccggctactatggaacactgtgaagtcctttcttgatcccaaaactaccgccaagatacatgttcttgggaacaaataccaaagtaagctgcttgaaataattgacgccagtgaattgccggaattccttggtggcacttgtacctgtcctgaatacggaggctgccttaaggctgaaaagggaccatggaaggacccaaacatacttaagatagtccaaagtggtgaggttcattgtgctcgtcaaattgtaactatttccaatggtgaagaaaaaattattacttatgccaaaccgaagcaccattcaatgcgagggagtgacacatcaactgctgagtctggctcagaagctgacgatgctatctcccccaaagctctcagaagttacatacaacatcctaagttgaccccagttcgtgaagaggtcaaaattgtcagggctacgagcttttctactcgtctccctgaatatgatgtacctgttgttgacaaggctgtggatgctacatggagaagagagcagccacgaaagataccattcatgccccaagatgcagactcttctgtgaaaactatgtccaggccatctgattcctcctgggataagatcgttgcaactctgatggcttgtcttatggctattgtaatgttggttcgatcagtcaaagatcttgtcacaaggagattgccatataaaggcgggtcagaagaaatccactctacgctgtacccagaccccatccagaaagaggaattccgtcctccttctccgatccctggatttgctgaagccgacctgttcgccgtggtcttgcaaaggctgggagagcttgaagagaaggttcagatgcttcaagaaaagccttccgaaatgccttgcgagaaagaagagttgcttaacgccgctgtgcgtcgtgtcgatgcattggaagccgaactaattgtaacaaagaaggctttgcacgaggctcttatcaggcaagaggaactgcttgcgtacatcgaccgcaaagagattgccaaggctcagagaaagaagaaagcaatgctttgctactaggacaaggagggagatacttctgcttcctcagaggagatgccaaagatggcgcctgagatgtaaccagcgatccccttcattttcctgacacttgtgaatcttctacaagtttccgttgtaaatcgagaatattctgacatgaataaagtgttttttggcatcatgagctttgctgcctccggtcttgcaatctggttgttcgttgcagcataattggttggttggttgggtggccttagccgagccgata

SEQ ID NO: 23147 - DNA, 2551 bp, Zea Mays
ggtagaagcatcagtgaggtggcacctgaggttcttgagcatgtatctaagtgtgttgtttccaaaaggctggtaaaagatgctctaacaaatctgaattgggtggctgatataaggggtgcactttcagttagggcgcttgcacaggttttggatctctgtgacttgctggagggcttagttcttcaacctgggattcctgataagcattcttggaagttcagcgcgtcgggggattactcctctagttctgcctaccaggttcttctccttggagctgttgagtttaggccggctgaacggagtgctctgtccctctgcaggggatggctgctttgactcttggtgggagaagagtgccgaggtggtgggcaagcctttgtcggatggtttcaactcgctgaaattgcaggaatgccctttgggaacatacaaaaatgttactggatcttctaaatctttatgctttccatgccctccgggtgaactccctcatcgtgctatatacacaaatgttcgaggaggtgctgctgaaactccatgtccatacagatgcgtgtctgacagatatcgcatgcctcactgttatacagctctggaggagttaatatatacttttgggggaccttggctatttggtctatttctttcaggcctccttatcttgttagctcttgttttaagtgttgctcgtatgaagtttgttggcactgatgagttacctgggccggcaccaactcatcaagggtcccaaattgatcattcctttcccttcctagaatcactaaatgaggtcattgaaactaatagggctgaagagtcacaaggtcatgtacacaggatgtatttcatgggtcccaacaccttcagtgaaccttggcatctcccacacagtccgccagaacaaataacagagatcgtatatgaagatgcatttaatagatttgtcgatgagataaacacccttgcagcttatcaatggtgggaaggatctatttacagtatcctctgtatacttgcctaccccctggcttggtcatggcagcagtggcgtaggagaaagaaattacagagacttcgtgaatttgttcgctctgaatatgatcattcatgcttaaagtcttgccgttcacgtgcactctacgaaggcctcaaggtgactgcaaccccagatctaatgctagggtatttagatttcttccttgggggagatgaaaaaaggcctgatcttccacctcgtcttcgtcaaaggtttccaatgtccctgatctttggaggtgatggaagttacatggctccgttttcacttaatagtgacagtgtgcttactagtcttatgagccaggctgttccctcatggatatggcaccgtcttgtagctggattgaatgcacagctgcgtttggtccgtggtggaaatctgaaagtaacgtttcttccggtcatcaactggcttgaatctcatgcaaatccctctttagctgagaatggtatccgtgttgatcttgcctggttccaagctacagcattagggtactgccaacttggtcttcttgtttatgctgttgaaggagaagctgcacttaccgaacctgatggaagccctagagtaaaaatagagcaacacacacccacacagaacatgctcgctgatactcaactaagtcagtccaggattaaggatgctctaatgcgcaaaaggatcactggtggagttctcaatagtaatagcttaaggacactaaaagacaggagagatttgttttacccattttctcatatcttgcacaattcgaaaccagttgggcatcaggatcttgttggtttggtaatctcaatactgcttcttgcagatttcagcttagttttgcttacttttctccagctgtattcatattctatggtcgatgttctcttggttttgtttattctaccgcttgggattttgtcgccttttcctgccggtataaatgctctatttagtcatggaccgaggcggtcagcaggccttgctcgtgtgtatgcattgtggaacataacttcactggtcaatgttgttgtggctttcatatgtggttttgtacattataagttatcaaccaaaacacacccgagcgtgcagccctggaacctgggaacggatgaaagcggttggtggctcttcccaaccggactcatgctgttgaaatgcattcaagcaaggcttgttgattggcacgttgctaatttagagattcaagaccgtgcgatgggtaaaacaattatattattaacatgttccatggtcttcgctgacagcaaggctggtaaagctgtgagaaatcggtgtggtctgggtgatgtgccgtttgcagctttgcaattcatcgagggatgcaaaaaccttctgacatatctgacgctgtgtcacttgcagacctgtagtggtggatggatggctaagtgggtcacctaaacaaaaccgggtgctatgtactcggcagagaatgtcctcgacgatggatggacaactttaggggctgtttggaactggttttaagtctaaaaccac

SEQ ID NO: 23148 - DNA, 2179 bp, Zea Mays
ctaatgtccagaagagcagtgtgttcccaatctgatgtggggaagaagagtttactgaacagggccacatctttgttcaagtccatttggtcaaggaactaaacaggaaaggaaacaatttttgtgatgtttctgctcataacagagaaattctgtatgattctgacaactcgatgctatggaacacactaagcggacttgaagtagcagatagctggaggtccttggagaattttacgatgttcaagaattcaaatggtgaaacagatacaattaggttagctgtcagagttgaagacaccggcataggaataacaaaagatgctcaaatgcgtatttttacacctttcatgcaagctgacagttccacctcacgaacatatggtggaactggaattggcttgagtattacaaaacgtttagttgaattgatgggtggagaaatagggtttactagtaaatcaggagttggtagtacattttcttttactgccattttcaaggagaacagaggatgtcctggagatatgaaaagatactattctgaacctactccgttggattttcaaggaatgagggctcttattattgatggaaggagtgcacgtgcagaggttactatgtaccatcttcgtagacttggaatacagtgcagtcttgttgccacatctgaatctgaatctgcatcttcagctttgatgaaagcctgcacctcaagcaaaaacaatccggacatggtccttgttgatacagaagcttggggtaaaggttcaggtttggcattctatcatcgttttgtagattgtcaactaaagggcgcacacaagttttctcagcccatgccaaagactattcttttgggaagctcaataagccctgttgaatctgattatttaagattgacaggatttggtgattgcataaggaaacccctccgtcttagtactattgttgcctgtcttcgcaaaaccttaggggttggggttacaaggcagcagagtagagaccaatctttggttcttcaaagtgtactaactggaaaacagattctggttgtggatgataatgcagtcaaccgtaaagttgcagctggttctttgaagaaatatggatctaaagttacatgtgttgatagtgggagtgatgcaattgatatgctcaagccacctcacacatttgatgcttgcttcatggatgttcagatgcccgagatggacgggtttgaagctacaagattaatccggtccatagagaaaaaaataaacgatatgatcatgatgggtgaaatatccgctaataattatggaaataaggcccattggcatgtaccaatattagctatgacggcagatgtaatccaagcgacttttgaaaaatgtatgcagtgtggaatggatggatatgtgtcaaagccatttgaagaacagcagctctactttgctgttgctcatttcttagagactgatgaaacagaataacaaatccaacttcgtaggagattgatttgccgcaacactgtttcaacatctgccaaaagaccatctgttcaacaggttctgaaaaacagcgatcggcagcatatttggaaacaaaatacattggactcccactgaccagaagaaagaagataagatagtagggggtacaaaatgtttggtctggtttccgcagcaattttttttctggccgtgttttctggaaccaatacaacatgaccttgcaacagtggtgtcagttgcttctgtaatgccttatgacaccacgatatttccaaatgctgtgttgtaagtgctttacagacaaaccgaggtccagctttctaaaacattgagttcaatgacatcacttcatccattatttaagaaagcgagggtcttcaaatcaggaggatacaattgtatcaccaagtcaggcacacagtttcaaggtgactttgttctgatctgattgttaatgcaatctgtaaagaggcaactatgagttagggattgtttgatgccttgaatgtcgtatattcatattccatcatttttgtgggcacttgtatatacattgatgattaattgtattgttagataattgtgcattttaagattaaatgaattcctaaagcaaatcgttacataaacaatgtataaagcacacataacaaataaaggcatgtcttagtagattaaac

SEQ ID NO: 23149 - DNA, 1049 bp, Zea Mays
gcatggtaatgcaaagcatataagcaacgaggttagttaggctgtttggttggtagcagaagcgatgtggcgcatgtaggtttcgtgtaccctttttacagatgctatttctgttctatcacaaaagaggggactgccacaacaccaaaggggagaagaacatgtgcgtggtcggagccatcaacaactacacggcggcgctgaaagactcatcaagtccatttgatccgacggagagcttgatgttcctggcgcacttcgtcggcgacgtccaccagcctctccactgcggccacaccgacgacctcggcggcaacaccatcgtcgtccactggtaccgaaggaagaccaacctgcaccacgtctgggacgtgaacgtcatcgagacggccatgaaggacttctacggcaacgaccagagcaccatgatacaggccatccagcagaacatcacggaggagtgggctgatgaggagaagaagtgggaggcctgccgtagccggacaaagacctgtgctgacaagtacgctgcagagagcgcgaagctggcctgcacggcgtacgagggtgtcgaccaggactccaccttggaagatgactacttcttcgccgcgctgccggtggttcagaagaggatcgcgcaaggaggcgtcaggctggccgcgatcctcaacaggatatttggtgggaacagcagatcaggcttcagagcagttgattgatcgatccataccagtagtagatatcaaacgattggacatgtggaggagtgggtggggaggggcagacatgatctgccatctgaattagaataataagaggtatcttgttgccgtctggcaatattgtaacttcagtcttcagtagccactagctcacgaattttattatttcagaatcgaagcacttgtacgtactgtgcaatagaatagatgacgcggtcacacattcgtattcatatatgttcgcgtatctttcagatcgacgtgatgagaaatgtcttagaaggatatttgaaggattcacattcatctgcaagtgggcacatg

SEQ ID NO: 23150 - DNA, 4436 bp, Zea Mays
gaaaaaaccggcccaccacaaggcccgcgcatccccttccgctgattctccccttccatccgctgcattcctcccacattccaccgcacccacacgtttctttaccctaaccccgacagccgccgccgtttcttcatcttcctcgcagcgccggcgctccatcttccgctccctccccgactcgcgatcggcacgcaggcgacgtcggggcagtctcggactcggcggcggcgtcagcggctccccctcccgccctcgccagtcgcttccggtcctccgcacaccaaccggcgactctgcgtgcgcgcctcctgcttccggtggaccgtcgacggcgcccgggccccggtggccggcgggcagcgagagccagcagcctggcagttttcctcattggaaaggaaggacaatcagagccaagagtttcttcataaacctgaataaaaggacatgcgattacggaatacagacagggcaccgcgtagctcaggtcgtcgcaataatgttctttcatggatctctgaagttaaagacacatctaatgtgggcgtaagaaagaaaagggggagaagagcacctccatctgctaaaagattgcgtgataaaagggtggataaggcgattgaaagtgatggtgctgttgacagtgacagcgatgatacagatggacaggttgacaagaatcagcctagtgcacacattgaggaacatgttgatgggagaactggtgatgacttagcaacagcaggccactcaggcaattcttccaatggtccatcctcagcttcagaagaacaggaccattcaacaaactctaaagacaagctccaaaaagctagctctcaaaacacaaagaaggtttttggaaactcaacaaacggcaagcaaggtgcatctaatttggaacaggaatgtgcaaatgaagatgggtctcatgtgctagttgctgctgtgtacaaggatattgataatgaaagaagctctcaaaagattagggatgatgtatcagatgcacaactggatacagcttcatctgatgacaaaagttcagaagaagtcgaagacgtgaaggtttgtgacatttgtggagatgttggtgaggaggagaagctcgctgtctgtagcagatgcaatgacggcgcagagcacacgtattgcatgcgggtaatgatggaagaggttccagatagtgagtggttgtgtgaagactgccaaactgctgtagaatctgaaaatgagaatagactacaaaagtctcaggtgaaggctggcacttcaaaagagctttccttagaaggggagattaacaaacctgccattgctgcaaagggaagaagttcatctgactgtgaattgaaggctgggaatatagaaaacaaagagtcaaataccacaaatgagaggaatggcacagtcaaaaccaggacggaagaagatgctgtgacgacatcctcaactagagatattttttctgaaactggtggcttgtacatgggggctgactctagaaagagaatggaaccatcacacgagacattcgtgtctgatgctgacaaaggaaagcaacctagccatcaagtatcaacttcattggtggttaatgctctgaagaatcaggcaccacagtctcgtggtcaactttccaaatccacttctttcaataactcaaaggtccccaaagtgaaacagctattgaatgaagttcctcagaagccaaaatttttgaaggaatcttggtcctctattatcaataaaaaggaaggaccaatcagcatgactactaagtcagcgaccttcaaaaagcctaagccttgtgagccaacaaacaaggcaaagtcttccgtcttgtcacctgtcgaggagccaagggtgccgaatcagttggcgagccacaatgtaacaaatggtcagtgttctatattggggcctccctctgccacatcatcaatggttgctcctgttctaagaactgatagcacaactcagctgctctctacaagaaataacacagttgactcaaataatttaggttctgttcatctacaaggaaacagtgagctaaagaagcctcgtttagcaaaagtgccgggaagtatgatgctatctaatgctgaaagatccgcaggtgggattcttggttccggtgctcatcgagaagtgattcaaaattcagacccttcacatagggatgctaaaataaaggaccaaactggcttcagacagggtgcttctagcagcaatcggacaatccgttgccaaagatgtaatgaatatggccattctacacatttttgcgaagttgaaaaacttcgtttgtcttcaggaaaacctttgagtgagcgaaacttgaaggatgcatctgccaaaagaaataagacatccgaagttagtacattggcttctagtgaaaaaactccttccagagaaccagagcatgtcgtaaagtgtgctattaatcagaatctgataaatgggcctaatgatggtatacctgccccattcagccatgtaaagaagcactcattatcacctcgagctaatgtgtccatccctgggagcggagtagattgtagcaagcctaagttcaaaaataatgatccatctctatctggcacagcaggaatctttgttcataatggtcgcattatgccaaatgatcatagggatgaacctgctcaagggttttcagctggtgatgaaccaacgtcttcaactgtccctgagctgggctggatatggcaaggtggttttgagctgcagaggactggaagttcaccggagctgtgtgatggtttccaagcccatttatcatgttctgcttcacagttagtgctggacgcagttaagaaattcccttctaaagtccagcttgaggaagttcctcggaagaattcatggccaacacagtttcagaaaaacggtccaacttatgacaacataggtctttttttctttgctagagatgttcaaagctatgaaaatcactacagtaaattagttgagaatatgctgaagaatgatttagttctcagaggaagtgttggtactgttgagttgcttatattcccttccaatatcctatcaaagaacttccaaaggtggaatatgttgtactttctatggggtctattcagagttagcaaaaaagattcctctaacctcccatcttatctatccacaagtagagtagaacgaaattttaatgatgatctccaggccatggattggatgccatctacccattcattctcacagaacaggagtgatttagctgaaccggaccctgatttgttaaagtcaactaattttgaaccgagtttggaagccagtcgtgaggtgtgtttggatggagagaactctttgaatcaacttgtacgcagaagagctctagatgatcacctagattcagatgcaaaagcatgttcaacgattagcaatggtgccatgggttcctctgccatgtctatgcaaagaaaacatcagaaacctgattatccagaacatcaagataaaaagagggacacttttggtggtaatgttagtgaaagagatttcgatgtgaacacggtgccagttacttgttctgtctccttaactcaccttcaggaagaacctggtaagctgagcacagccatcgacctcatggatatagaccatggggttagcgcaggtgcactggatcgttcacatgcatcaggtggtgcaggtaaaagaagttttgagacggccgaagtagctgctgaagtacccgagcataagaaaactaagctggataataatgttgtgcctataagctctggtccacgcgagaatgcctgtacgaatgatggcaatagcgataaactgatgcctggaagctcaagcagtgatggcaagcgcgtgtttccacttgatctaaatgcagtgggggatgaggacatcgtaaatattccagccttcaggtgatgaagagttcgctgttccatgacaaaccaaccgtggtggtttggttcagaatgagagatgtgcattgtaaatcgcatgtgcagtttttgacctaatgttttcagacaacacttacagatgtgatgttcccctctttggcagtgaataattctgctccagaatatgcttacagatgtgatctcatctgccagattccttgtgatgtcatgctaatatcgtacaccacctggcttcgcttggcaggatacacgtccatcaagttactaattaggatgcgtgtatgcacgtggagacaccgttcaaacggacgtgtaaaacactgttttctactctgtaggtgacaatttatagatagccttaccatcttcagggatttgcccaaatggccgacgccgcgagaggtttgatctgcgacaatagacatgcttaattttcgtttttgttcattgtatcaagaagcacgaacaagacttatatcccatgaaagagaa

SEQ ID NO: 23151 - DNA, 1295 bp, Zea Mays
gctaaggcgcatgaacaaaaggagccctcaattagtgacaactggtgctctcatggcaattcaggaaaaggcaaagaaatggattccaaaagatggataagattaaagattcaaataggcaagctaagcaattggaagatcttactgtgaaaatgaaggagtgcaagcgcttgatcaaagagtttgatcgcattctcaaagatgaggagtcaaataatccacctgagatcaacaagcagctaaatgacagaaaacagttcatgatcaaagagttgaattcctatgtcaccttgaggaaaacataccaaagtagccttggtaacaacaataagagggttgagctctttgatatgggtgctggaagtagtgagcctgctgctgaggacaatattcaaatggcatcagccatgacaaatcaacaactcattgatacgggaaggaaccaaatggaccaaacagatcaagctattgaacgttcaaaaatggttacttcccttactatacacccttgtcctgtttgccatggcaaaatttacaagacattcttgtaggtcgtagcacaaactgttgagactggagctcaaactgctgcgacattaacacagcaaacagagcaaatgaagagaattggtaatgagctagatactgtccacttctcactgaagaaagctagccaactagtgaaggagattggtcgccaggttgcgactgacaaatgtatcatggcattcctcttcctgatcgttttgggtgtgattgctatcattgttgtcaagatcgtccatccgaataacaaaaacattcgagacattccagggctggccccgcctgctcaaaactatcagattcacaacaggagattgttgtgggcagaagcttccataggcatgtgatggctctgaatgtaggcttcatgtggacgcactgcctgcgaagcagcagctatccatagggcgaaagatacatagtaacaattctttgtgcctgtatatctattttgtcttgttaactccgagccctaggtctgtattcctgcgtctggtgtttgtacaccgctggccgtttggctgtgtatatggtacagagatgagatcttaaaaccaaaccagtaattatgacaaatacttgaaagagctacagtaccgaaatactccagttggtactcgctgcacttcatgggcgaatatataaagggtgccggttgggccgtgtaacacattctgaattccgaagacccatgaaaagaatgtgaacgtttaaggctatctctagaaactctttttatatcatttcct

SEQ ID NO: 23152 - DNA, 2165 bp, Zea Mays
ctcatgttgggtcagccatggggacgtccctcccggcctcccccacccgccatcgcccaaaaggagcagcgatccatccatcctatcccctgtgccaaaccctagccggctatggagcatcccgccgccacctcctcacctgatccgacgccgtagcacctctccctgtccctgtccccatctccctccgtctccctggccaagcactccacctggaagcaccctgccccgaactgcaccgcagtcgtcgacgctaagcgctggcccacgctctccaaggttgcaagggtgatcaacttgctattgggaaggaaacaacacgtcgtttgggaatgggtactaaatgtaaggatgagtcacttgcttcattgccaattgatgaattgaccgagaaggctgatggctttgctagagtctttccaggtacaactatgcagattgccttttttttattactcctgtttgataggctcaacagttcttcaacatatataggcagtacttatgtctaattcatattttgttaatgcttgatagaacacatgtatgaaaaacatttatgtggcatgacttgggatggtgtaaatgatgccccaactttaaaaaaggcggatattggtattgcaatagcagactctactgacgcagcccgtggtgcttctgacattgtcctaaatgaacccggccttagtgtaattaatagagttgtgctgatgagtcgagcaattttccaaagggttaagaattacacaataagtcaatactgcagtttcttttcggtctcctcagggtgattctagtatggggcggagggggcaatgtcccacctaaggccatctctagcaggctgtgtaaacggccgtgcaaagtactattttacactgtaaattgcactgtttgcaggattgaagtttgaaataaggagtgagatagagaatgggatatggagtctattgaagatagtctaaccctcctcaaattttataggagctactaaaatttttagctaatcaccatataaataatgtaaaataccttctaacagccctcacaatctgatttgtcaccgcaatctcaaatcctcgctttgccccctgagtctcctagcattctgtttctatgttcagtattttcaaagtttatttttgtttgcagatctatgttgaatcaattaccatctgtattgtggtatgtatagacttctgcttaatttttagaaaataacgctcgcttgactgaatagataaataatactcacttcatttttttatatttgtcgcattttagttcaaaaatgaactggtcagacgataaatattcgagaacagatgtaatatatctgactcatacatactttgttgtaacagcttggttttatgcttcttgcgctgatatggaagtttgacttcccaacatttaccgtccagatcattgccatcctcaatgacggtaagcctccttttggttggctatagttcatgatgagggtaaaatctgtagttgatcctaatttcttcggttcatattgtcagtacaagcagcatattaggtaaactaacaacatcaacctggcgacatgaataagtaccattgtggctatctcgaaggacatagtaaaaccacctgcacaacctgacagttggaagttatttggtcgtgatgactgtcattttttcttctgggctacgtacaagactgacttcttctcgaatgccactctgattgttgtatatgccaactgggcatttgctgctattaagggcattggatggggctgggccggtgtcaaatggctctacatcattgtcttctacttcctgctgcgcatcatcaatttcctcatcctgctatacgctgagtaggagggcatggaacctcgtccttatgtatatactaggtgtgtgcccgtacgttgcaacgggagtatgttaggatgagcatcgacacatatttgatcggatattatattttttgggatctggagaaagtttgctcggaagccaaacatgttaagacctgagcatgtgtatgatatgcaaaggctggggctcgaacgcgcttgtatgagtcttgttaatttgcatgtctcgtgcatagtctctcaccatctattcactataatatacaaaatctgtgtctatctatatttattttaagcttctaac

SEQ ID NO: 23153 - DNA, 1717 bp, Zea Mays
ctctgcgggtgtgtttgtgggtgggtgtgagaaagattattgacctcagcagggttgagatatacaagctccgtcttgccctgcaagcatcaaagcaacagaatctacaccttacacaaaccaattcgcagatgcttgcggaaataaacacagggaaagatcgtattaagatgctgcagcatgagctttcttgtacaacagcactgcttaaagtaaaggattcagagcttgatagaaagaaaaacgctggtaatgtacagcagaagggagtaaaatctcaggtcttgaaaaccaaagcttccacagtagcagtagaggctcaccacgttggtgactcagtaaccagtggtgttgaacaccatgtggttgaatctcaatctgccgtatcatcaaatactgtctgccaggagccaccacaagatggaaagcaaaagagaatgcctcaacggagaaggtcttcaagactgaaccaaggttcctgtgagatcaggggagtatctcagaacacactgcatgagaaccctgtagtgcctgtagctccttccactttaagtcttgagaaacagtatggacaaaccactggaaaacatatgaagtcactgcaaaatgagtgcagtgcaactgtgcatgaagtaataatggcttcagaattcgaggtgctatatgtctatgttgcagttttttagctctagtcattggtgttaatacgtatcttttgacaactggtgtttgatcctatcagaaaactgagataaatgagctaccacaaaaaacagatctgaaggagataccagaagcatgttccagtgaaactgaagttcagtctcataaaattggtgataaggccttcaacagtaaacaaaaccatttgacaggaagccaatcatctttgtcattcaataccgttgacacccccgagccaccagaagacaacactgtcaagcggtgctcaaaaaaacggtcatccatagaggatgtaaatgccaaactagacacgattaccagtgagccattgcgacatgaagaaaagagaaaatctcgaaggaaaatatctgcaagactgaattcagtatcttctgagcacacagatatcgttgttgagactgagcacaaagatgttattgtttctttggccggttccacttcaaatgtctcaatggagcagcggacaaatcaagagcaggatggtgattgtttctcaaggaaatccaatgaaaatcagatattagggaggaggtctctaagacgagctgctgaaaaggtcgtctcttacaaggagatgcccttgaatgttaagatgcgacgaccttaactgccaggaggatgaccatggtgacatgttgtagcttgctgtcctgactagccttaagcaggtatccttctgtttttttgtgtgctccagaatcagtgattgcttgcacatctcgttctacttcaaacgaaccaccaaacagtggcgaagctagagcaaacttgaaggttgtacaattgttttgtgggtgcatagacatcatgtgatcgttgtgtatgtaagatgaaagtttgttctttataattagttctgcactttttagactccaacagcgaactcgttaaatataggggttggtcagctcctttctcttttcaacaagagactgtaaaaagtctgtaatacctaaaattctattttaggaaatgtcttctaaaaatgggttccccactttattctttttgt

SEQ ID NO: 23154 - DNA, 769 bp, Zea Mays
ccggggtgtctgccccattcaacgaacgctgcgcatggtggaggccagaggcgcgccattgtcatgcgtttcgttaccgcagaaagatcacgggagccctcggtgtggtgtccgcgcagaagttaggggggcaccacggattgtggtgtagcgtcttcacatcggcgaggacgcataccctaggagcatcgcaagatcacaccaagcgtacccgtggaggtggtgggctctgacggtaggggtagaagagtggattgctcgccggagttcaacgagagcctccgtccgccccacgcccggttctgcgcgcacgtcatcacgattttcgggctgtcgccggtgatgttccgccatatggggacggtggcgccgccattcaaaacgaaacgggtgaggaaaaatggcgtatgccgttgatgagcaagcgaatggctgggattatccggcgcgtacccgttcggcggtgtcaatccggaccgtccatctctgatcgagcgcatgtgattcaccgtgggcaacgtaagatccggacggttgaactaagatcctagggccaaatatgcgtaccagttcacttaatgcgacatctaatcatggccctcagaatgagatccaatggctagaatccatccatactctcggtcgcgacagatttacatctgaggccctcaggattcgctaaatagaacccgcaatccacccaggtgttgtctgagtcttggaaaactttgcaagttaacccttgtgctatttggtatttaatgtgcag

SEQ ID NO: 23155 - DNA, 208 bp, Zea Mays
gcctcatgcgctgctcgtctgaaatacccaagtcaagtgagcatcctgtgcgactcaagctcggttcgtcaagatttttcagtcaaggagagattccaagagtatgtggataaacaagccctaggtcgatgcccccaagtgctcggcgaaaggcctgaacaaggatcatcgtcgtttattcggattgctagtcgatatggtacgataa

SEQ ID NO: 23156 - DNA, 2110 bp, Zea Mays
ctcgtctctcacagtcacagcatccttccttgcttctcgtctcgtcgcctctcggagatcagaaagagaacaccggacacctagcctgcgcccttgccttccctccgcgcgcgcgtgctatctatggcgatggaagacgtcgcgggtgcctcctcctcctcggtggcggccgccgcctccgaccccacgcacggctggcagacggtgtcgtaccccaagcgccaccgcaagcaggcgcatcagccaccccgcgccatggctcccgatctggcgctgcaggccaacggcaaaggctccggtgtcttcgacgccgtcgagaagcgctcccaggagcgccaccgcgcgctgcagcagcagctcgcatccagggcggccgacctcgacgacgcgcggatcgccccggtcacaggcggcgcttactccgacgactccgactccgacgaggccaccgccccgcgccaggtgggggaggtgaagaagcctaagaagcctaaaaagcctaaggtgacggtcgccgaggctgccgccctgatcgacgccgagaacctcgcagcgcacctcgtcgagatctcgtcatcatacgagaatcaacaggacattcaactcatgaggtttgctgattactttggccgggcatttgtagctgtaagcgcatcccaatttgcatgggcaaagatgttcaaggaatcaacagtgtctaagatggttgacatcccactgtgccatattcctgaggctgtcatcaagactgcgagtgattggatcagtcaaagatcttatgatgccctgggagactttgttttgtggtgtatagatagcatcatgtctgaattgtcaggcccatcagcaggacctaagggttcaaagaaggttgcccaacagtctccaagggcccaggttgcaatctttgttgttcttgccatgactttaagaagaaagcctgatgtacttgtaaatgttatgccaaagataatgggaaacaataaatatcttggacaggaaaagcttcccatcattgtctggtttattgctcaggcatctcaaggtgacctagtgactggcatgttttgctgggctcattttctatttcccacgttatgtgcgaagccaagtgggaatccccttgcaagagatttggttttgcagttgcttgaaagaattttatctgtcaccaaagctcgttctatcttattgaatggtgctgttagaaagggggaacgcctagttccccctgtttcatttgacttgttcatgagagccacatttccggtttctggtgctcgggtgaaggctacagaaaggtttgaagtagcttatcgaacaatcaaggagttggctcttgccggttctcctggctctaaaactgtgaaacaagcatcacagcaacttttacctttgtgtgcaaaagcaatgcaagaaaacaatgcagagctcaccagggaggctgttgatgtgttcatttggtgcttgacacaaaatgcagagtcctacaagcagtgggaaagaatttatcctgaaaatactgaagccagtgttgctgtcctgagcaaaattgtgattgattggaaggatgtgtctcctaagctcagttctgaagctctcaaggcaacagtgaagaacttgaaggctaagaatgaggcagcgctggagtcagcaacagatgctggaaagcaggcatctatcaagaagcagacaagcactgcaaggtgatccttggaaagctgacgcgcagttccacctgcctgaagagcagccttgtgggcatcgccctcgcagttgcagctagtctcgtgctatcatctcccgacatggaccttccgctcgagtgggagaagatccaggcgatggtctcatcgcacctgtcgttctgaacatacctgtccaggatctccagacgtgggtggatctaagtcatggatggctgactcagcagtgaagagagctcaacgggtggtgagaataaggaggggggggggtggataggtggtagaaccgaaaggttacagttttcatgagtcgccgttttttcccgcgcttcctccagcagcagcggtgcatggtaggagggagatgcagtagtcgactttgcagagagttggtttaatcgggg

SEQ ID NO: 23157 - DNA, 1189 bp, Zea Mays
cttccttccttctccgctcgtcgtcgttctaccggcatggccggcattaccaagcgccgcacctccccggcctccacctcctcttcgtccggcgacgtcttgccgcagcgggtcacccggaagcgtcggtccgcccgccgcgggccccggagcaccgcccgtaggccgtcggcgcctccacctatgaatgaactggacttgaatacagctgctcttgatccggatgattgagagttcttcttcagaaggagctccgaaatagcgatgtaagccagcttgggagaattgttctcccaaagaaggaggcggagtcttacctccctattctgatggcaaaggatggaaagagtttatgcatgcatgacttgctaaattcacaactgtggaccttcaagtatagatattggttcaacaacaaaagcaggatgtatgtgcttgaaaataccggagattatgtaaaagctcatgaccttcagcaaggagacttcatcgtgatctacaaggacgacgagaacaaccgctttgtcataggagcaaagaaggcaggagatgagcagaccgccactgtacctcaagtccatgaacacatgcacatctctgccgcactgccagctccacaagcgttccatgactatgcaggccccgtcgcagcagaagctggtatgctcgcgatcgtgccacagggtgacgagatattcgacggcatactgaactccctgccggagataccagtggcgaacgtgaggtactccgacttcttcgacccgttcggtgactccatggacatggcgaatccgctgagctcctccaataacccctcggtcaacctggctacgcatttccatgacgagaggatcgggagctgctcgtttccctacccaaaatccgggcctcagatgtgagatccgggcagaaaaactgccgcggtcaaaaccatcatcccctgcgtggaactcagagatcccctggttgacgccattgctgtacatccaaataaatggcgtcctcattttgtatgtttagtagtatatgattgggtacgcgtgttgtttatgtgtaaaagggtaactctgcaaaactgaactgagcgttacatcagatgcaacgctgtgacgactgacgaggaggcaggctctggtgtttcctgtcctgcaccctgtgaatgtgtgtgcaggtacataaacgaaag

SEQ ID NO: 23158 - DNA, 1795 bp, Zea Mays
ggaatctcttgcgtttgtatgaattttgcatgacctctaaagaacgattgcttgtatatccatatatgctaaatggcagtgttgctgaccgcttgagaggaagctatgcattctaaagggtgtctttccacgtcagccaaagaagaaggtggaagggaaccacaagacctactaccacacaaaggatattgcattcctcgctcatgaccctttgatcgagaagttcagggagattaaggtccatcgaaggaaggttaaaaaggctgttgctaagaaaaacagggatcttgcagacaggctgttgaatcggccaccaacttacaagcttgataggcttgtccttgaaaggtatccaacattcgttgatgctcttcgtgacttggatgactgccttacaatggtgcatctgtttgcggcattacctgctgttgacggtgaacgtgttgaggtcaaacgaatccataactgccgcaggttaagccatgaatgcttgacatttatttccgtgaagggcatatattatcaggctgaagttcaaggacaaaagatcacctggctaactccgcatgctcttcagcaagtattaactgatgatgttgatttcaatgtgatgctttcttttctagaattctatgagactcttctaggatttgtgaacttcaaaatctatcattcaataaatgtaaattatcctcctattctggatccacgtctggaagctttagctgttgagctctatgcattgtgccgatacatgtctgctggttccagaagaatgattgggaattcacaaactgacgaagtaatggaagataaggatgagaaaagtaaagctgaggaagtaattgaggaagagaaggttgtgaagaataaagcaagctcaaaagcagatgaatctgagttcagattagcacagcttcaacatcagctcccaaccaatgaacctggtgcactgatgaatcttgtagaagaatcaactgccgatgatgcagatgatgatgatactaaagattgtaaaggtttatttaagaacttaaagttctacttgagtcgagaggtgcctagggagtccctgttatttataattccagcatttggagggactgtttcatgggaaggagaaggagctccatttaaagaaatagacgaagatatcactcaccagctgaaaacttgcccaacacattagaatatattgaaggcgaggttgaagctcttgacgaagttattggtagccatgctgacttctgcgccctggtagcttctcggggcacagctaccgcttttctgaaagctggttgcacgcatggaaaaattgttaataggcccaactacagcttatcatcatcagatctgatagatattccaagcctagctcgaagtatcggaaatagatttatgacccagatttgggtaaatggcgggcggaaaatggcgggtgacgaagctcgaagtcatcttaagccggtaaaaagcttatatttgttacttttaccttcttcttgaaatttgcacctttcttattctgttctttaatactcgtaggatgacgaagctgaagtataacaaatctgaagtatgacgaagctgaagcttgatagttgctacaatattctttcctgtaaaaattctggagagacttttgtaatattattatgtaaaaactcatgtaaatttgtacataccttgtaatatattttgtttccgctatctgtgtacaatctgctttgttgtggacgaaacttcttttttgagccgaaggcgaaaaacatattcccttcttttcgtacataac

SEQ ID NO: 23159 - DNA, 2244 bp, Zea Mays
aacatgtaaaagaagaagagattcatccctccgccactccccaacatgtaaaccagaccattctcctctccgaattcaataattcctccgccgcaccacgcttcctcctcctctgctccgcctcttcatccagcgagcgtcctccgattgctgacggatccctcctcgccgccgccgcgggccgaccgtggggagaggaggggaggcgggagtgatggaggccgccgaccacgggaagctctttgtcggcggcatctcgtgggagacgagcgaggaccgcctccgcgagtacttcggccgcttcggcgaggtcaccgaggccgtcatcatgcgggaccgcagcacggggcgtgcccgcgggttcggctttgtggtcttcgccgatgctgctgtcgccgagcgcgtcactacggaaaaacatatgatcgacggacgaatggtggaagcaaagaaggctgttcccagggacgaccacagtattgtgaccaagagcaacgccagcagcatagggtcacctggaccgggacgcaccaggaagatctttgttggaggcctgccctcgaacgtcacggaggctgacttcagaaggtactttgagcagtttggcgtcatcactgatgtggttgtgatgtacgaccacaacacgcagaggccgaggggctttggattcatcacctacgattcagaagacgccgtggacaaagccctgcacaagagcttccatgagctcaatggtaaaatggttgaggtcaagagggctgttccaaaggagcagtcgcctggacctgccgcacgctcacctgtgggagtggggcagaactatgctatgaacagggttcatagcttcctcaatggcttcaaccagggttacaatccgaaccccataggaggttacggcatcagggtggatggaaggtatggcttgatttcaggtgcacgaaatgggttctcttcttttggaccagggtatgggatgggcatgaatgttgaaggtgggttgggcggaacatttggtgcaagctctggtttcatcagcaactccaacgggaggcaaatgggttcgtacttcaatgcaagttcgaacagattgggtagccctattgggtaccttggccttaatgatgttccgggatcaatgttgagttccatgtctaggaatgtttggggtaatgggagtctaaactacccgagcaatcctacaaatatgagtgcttttgcttcacctaggaatgggggccaagtcagtcttcccagtgacaattggggaggtcttccttctgctcatgggatggacaacatttcaagccttgggtcagggaaccttggtcgtggaactggagataataactttggtttgccttctggtagctatggcaggaacaactcaactggtacaattggtgagcctttttctgcagcaggcaatacatatgaagtaaacaatcgagatacatatgggagcagctctatttatggtggcacagcctggaggttcgcatcatctgaggttgacatgccttcttttgttcatgatattggaaatgttgatccgactattaaatgatacatgtcagcaagtcacatgggcaactaccctgttaacaacaatcagccaagcagaggcatcagttcctagggggcggcgagtattacacttgggggtagtagaagaaagaaacacccattcagccaggcaatcccggcgcacacggctgtgaatcggtcggtgattgtcaggttaatacacaggttagtttttgtgtagctaacccagcggcgtggtttgcgaacaccgacatgctagaggtggaagctgctaggctagctagaggaaaggagcgcggatggatatacagaaacatttcgtgaaggttttgtttttgttttgttttttggtttttgcgggggtggtggtcatgttctagttttggttcgtacgcgcgtggtgaggccttttggagttttgaaatgagatgtagtagtaattgttgcggcacatattttagaagtcaagccatgttccaacagaagctggaaagagatgtccgctgtatacgggtgagcatgtataccaaccaaagggatgctgtattatacattagcctgtgtgtgtgtgtgcgtgtttttatttttgtttgatccggtttttagccatttgtcttttttttttcaatctggagattttgctgacttgctctgaattattatgcatgcagtggtgtttattttattgcaaaaaaaaaa

SEQ ID NO: 23160 - DNA, 1681 bp, Zea Mays
actgtagtggagctggagcgcgcacgcacacacgagtacacgacacgagacacaagccgggaattgaagcatcaagccctttctctgagcgccgatggcacggtatcttctcgcccccacttccacctcctcctctacctttctccccaaggatggagtcaagaactcgccgacgtcacggcccctccgcctccgtgcgctcggctccaggaccagcaaggcgcggcacatcatggcggtggcgtccgagcaggccgcgccgccggccaggtaccccaaggtggccgcccctaccaccggcccgatccccgccgccgagctgctcggagtcatcgaggccgccgcaaaagctggggccgatgttataatggaagctgttaataagccacgcaatatccactataaaggtgttgcagacctggtgacagacacagacaagttgagtgaatcagtcattttggaagttgtcaccaagaacttcaaagaccacctcatacttggggaggaaggcggccttgttggagattccctatcagagtacctctggtgcattgaccctttagatggaacaacgaactttgcacatggttaccccagcttttctgtgtccattagtgttctcttccgtggaaagcctgctgcttctactgtggtggaattttgtggcgggcctatgtgctggagcacccgtacaatttctgcatctgctggcggaggagcttactgtaatgggcaaaagattcatgtcagtcagacagacaaggtggaacaatcacttctcgtcacaggttttggatatgaacacgatgatgcctggacgaccaatatgaatctgttcaaggaatttactgacattagcaggggagtgcgaaggctagggtctgctgctgctgacatgtcccacattggacttggtattacagaagcttactgggaataccgacttaagccatgggatatggctgctggcgtcctgtagaggaagctggtggggtggtaactcgcatggacggtggagagtttacggtcttcgatcgctctgttcttgtttccaacggacttgttcatggacagcttttggaccggatcggccctcctactgaagaccttaagaagaaagggatcgacttctcgttgtggttcaagcctgacaagtacccgactgacttttgagctgcatcaagggcaccaccaccagccatgggccaccataataaagcagccatcatttttttttgggaaatttggatctgtaccatcaaaagattacaactttagatatataccattgtatctcacttatatgtggggtccatatgaggcaatgacatgtggagccaatggtatatatctaaagttgtaatcttttaatggtatagatccaattattccttttttttggggggtgtccttcaagaagaaacaataatgtttttagttcaatagcactgtacttgtaatggcaatacgatgtacagttcttcgactcgagtttcaaatcagagtttcaagagagccaagctcctgaaagaacagagcttcacaactgaacatggaatgtgcccccattgctctggcttttcgattgttacatgtatcggacgagatcgagattttggaagaggccagctcatttctacatctaagaattgattccatcgtgagccgctttggcctgcta

SEQ ID NO: 23161 - DNA, 1609 bp, Zea Mays
ctttaagaaggcccgagtacaaactctcaagagagatcttgatgtttcgagcagttttgcatcaacttaactaacgagaagctgcagcaacactttaatcagcatgtgtttaagatggaacaagaagaatatacaaaggaagaaattgattggagttatatccagtttgtagacaaccaagagattcttgatcttattgagaagaaacctgggggtataattgctctactggatgaaacttgcatgctgcgaaattcaacccatgaaatatttgctgaaaagctgtatcaaaaatttaaggggaacttgcacttcagtaggccaaagttctcacggtctgatttcactattcatcactacgctggaaatgttacgtaccaaacagatctgttcttggataagaacattgattatgctgtgaatgagcatcaagttttgttacatgcttcgagatgttcgttcgtttccagtctttttccacatgaagtatcagctaaatctacgaaatttacatcaataggttcaagctttaagcaacaattacaagctttgctggaaactttgagcgcaacagagccacattacatccgctgcataaagcccaataatgttctcaagccagcgattttcgagaacagtaatgttctccagcagcttcgatgtgggggagtattagaggcaataagaataagctgccttggatatccaacaaggaggagatttgatgaatttgttgaccgttttggtgttttactacctgaagttcttggtgaaagttatgatgaagttactgctacaaacatgcttcttgacaaagtcaatctcacaggatatcagatagggaaaactaaagtgtttctgcgtgctggtcaaatggctgaattagatgctatgagaactgaggtcttgggatgttctgctagtaaaatccagagaaaagtacggtcatacttagctcgaaaaaaattcattcagttgcgaatatctgctactcatctccaggctatttgcagagggcaaattgcaaggcattattacgatgatctccgcagggaggctgcttcattgaccatacaaacctgctaccgtatgtactttgcaaggaagaactacataaatctctgtactgcatcaactactatccaatctggtctacgtggtatggctgctcgcaagaaactccagttccgtcaacatacaaaagctgcggtgaccattcagagtttctggcgtagttatgtagcacgctctcgattcatgagtttgaagaaggcagccattgctactcaatgtgcttggagaggaagagtggccagaaaagagcttcgaaaacttaaaatggctgctaaagaaactggtgctctccaagctgctaagaataaattagagaaacaagttgaggagctcacgtggcggctgcaactagagaaacgcatgagggagtacaatatgttgatctctaccgatgaccaggaggtgatctgggagatcaggtacataagccaaccagagaatcacgtaaacagggaaataaggtaaccaatcaatcacctaaacaggaaaagggtgcctaaggcaactacccaatcacctaaacaggaaaggacat

SEQ ID NO: 23162 - DNA, 1241 bp, Zea Mays
gtacatggacgaggtgcatatgcgaatagtgggagcatgggagactcggctctcggctacagatgcccgatagatccaggtgtttctgtgttcgagatcgactacagccactgggtggacgagcagaagagacacacggcggagctgacgtcggcgctccaggggcagcagacatcggagctggagctccgcctgctggtggagacgggactcagcaactacgagcacctgttcaagatcaaggcggcggcggccaacgcggacgtgttctacgtcatgtcgggcttgtggaagacccccgccgagaggttctttctctggatcggcgggttccggccgtcggaagtcctcaagatcctgagcccgcagctggagccgctggcggaggcgcagcgcatgctggtgggcggcctgcagcacacgtcggcgcaggcggaggacgcgctgtcgcagggcatggagaagctgcagcagaacctcgcggagaccctgacggccgaggccgacccgttcgggccccccgacccctacatgctgcagatggccaccgcggtgggcatactgaaagagctcgtcaacttcgtgacccaggcggaccatctccggctgacgacgctgcagcagatgcacaagatcctgacgccgcggcaggcggccaggggcctcctggcgctcggcgactacttccagcgcctccgcacgctcagctcgatgtgggcggcgcgcccgcgggaggcggcggtcagctagatgcgcctgcggcgtggcaggccaaaagctcgctcactggtgaggcgaccgtaccaaagaacacgacgccgacgacgacgaagactaaagatgagtggtagcagttcgctgtatacttgccccccaatgcaaggtgtaaagcccagtggaggacgaagagatcgacctcgctgtacgagtacgacgaacggaagggacgcttctcggtcagcggcggcggcgacctcgctgtacaaggcgattagtagacatacaaaatgtaaatggaaatcgatcgatgggcggaggatatgtacgtatcttgttttgatacccgcggccggggccctcctagaggcgtactgtatgattgattatgcgggccttctacaactactactggtgttgggctatatgtatatctctacaactattaagactcatctatagactgcccccgctccttcccaatgaaccccccgctcccgcacgccccgccgacctctgctgcc

SEQ ID NO: 23163 - DNA, 1181 bp, Zea Mays
tcagtatctctgaacttgctgtttatgctcaattctcaaagacaacggaaagaccttgtggttgcggccaccttttcttgtaaactgggaggtgtttcttgtttatgttgtaattctgcagagatcgcagacatctattatcacatagtttgttgattattcacttttcttcattgttatgtttcctcctggatgtttctaattatatgagatgcaaacatccaggtattggctatatgcagcgatcaaactaaattgtttgcttgtgactaatgatgaaatgagagatcacatattcgagcttctagggccgtctttttttccaaagtggaagcaacgccatcgggtaaagtacacctttaataaaggaaaagcggtgcttgtgatgccacccccttactcttcagaacttcaagagtcggagatgggatcttggcacattccaattgaagagaagtctgggaatgagagaggcaggatttggctttgtattggcaggggaggttcctgcaaagaacatggcgaagttccttcgactaatggagctgtccacaaagttcctcaaactgaggcatctaacgtggtgcagcaggggctgacagaaaataaggatgaatcgataactggtaaaagaaaggatagagattgatcaccttcacctatccaggagcaccatctgctcttgagtctgccatcttgtgagcgattgtggccacttgttgttgattcagctgaggcatttcaagaatagggatgcagcgataatgccatcccagatatgtagggtgtgataattattaatcactttcgctgggttgcagactttcattcttcacaaattgggtgtgatcttagacgatttctgtgctatgtatctgactgcatccatgatcatctagtgttaactccagaataccagctaatgaacttttttattaccatcaaactgaggcacatttgcaagtgcattgttgagctactgcaccagaatggtaccgacgctattgatgttgcagcactgctggagctattagtgtatactatgtaggtttgatggtgtagcagcacttagtattactattagtgtatactagttctataatcccctcctgttcaagtcgaattatcctaatcttcctatgtttaccgtttgctattaccaaaaagacttagtattacag

SEQ ID NO: 23164 - DNA, 173 bp, Zea Mays
tcgagcatattgaaggtgaaattaatgatcttgacgaagttatagctgggcatggtgacttctgtgccctggtagcttctcggggcacagctgttgcctttctgaagtctggctatgaacacggaaaagttgtcaatagacccaacttcagcttgtcaccagcagacttagat

SEQ ID NO: 23165 - DNA, 1522 bp, Zea Mays
atccatgtcatatttatcagccagggctcaggccgtgatgaaaagttttagtgtaagtggttcagacccttcaaaacaagagaagtttttggcatacatggccccagcaccccatgagcttaccagagacttggatgatgaaaacgatgacatccagtattcctggctaagagaatatcactgggaagtaagaggagatgataaagacgatcctacaacataccttgtcacatttgataagaaggatggtgcaaaatatttggtaattagtgatgtgcattctgtattatagcacctccagttcctgggttcgatccccatcgaggacgaatttctggcttggttaaaaaaaatctcctcgctgtgccccgcccgctcccaggttacgtccttctcgcgaccctctggctgggccgttgcagagtgggcggtgacggcccgctagtgatgggggctagggttcagggattttctcggccgggaccatgtttcggtctcttcttaatataataccaggaggacggtctttccctcttcggacgagtattacatttggtttctgtgaatggttcatttcacattagtgtaacatatgtcatgatctttatttcagcctcttcctaccaagctagttttgcagaagaaaaaggcaaaggaggggaggtctggagatgaaatcgaacattttccagtaccttcccgtatcactgtgagtaaaacagctcatggtggtaccatggagcgcggagaatcttctggcatgcatgcgaattcaaagccacgaagatctcatgttgatgatgatcttgatgagcatccaaagcgtactcgggtagaagatattgaccaatatagtgaagaatattctgagtgatgaactgataaatcataattatcttgcaccaacgaatttgatcagtacatgtgaagccgtcaaggcataagtggttttatggtgcatggtgatgcagtgaaagagaatacctggcagtgggaggacatcatggcttggccagtttcttaagggcagagtatgtgaagcaaagctgagtgtaaccagacttcaagactttgatctctgtagtgatcatagaaagtatcacattgttgtaaagaagttttgcctttaaagtcttggagcggttctcaactgtttgttttgataatatatagaccccccattttgcaaatttcttcccgcttttctttcccaatcgactgtgcaagtacagaaatttgtttacattattaggatgggcaggtcatattatgctagacacatcttttttggcagccctgagggcctgctaatcgaaggtcatatgtttatgcacttgaacatccagtgaaaattagggtagcatgacgaggagtaaattgcagctggtggacacgttccaggatagtcaatggttgcctgatagcctctggaattatattcattttcaacattaattgttttattattaacattactttttgtctaaaatattgcagaagtatatgagatgataggagggta

SEQ ID NO: 23166 - DNA, 1658 bp, Zea Mays
aaatgtacaaactctaggaagttacgtaacttcctacgactttactctaggaagttattttttattttaaacctcccctcgaccttatctcttctctcacctttctcaaccccatctctctctcgcgtctatctcctcccttagtgccgcccgccatcatcgcccccgccgcacccgcccacgccgcgcccgctcccggcctcggccccgtccgccgtggaggcccccgccgcgcccgcccccggcactagccccgtccgccatggaagcccccgccgtacccacccctggccccgtccgccatggacgcccgtgcccgcccccggcctcgtccgccatggacgcccccgcactggccgcatccgccatggaagccctcgccgcgcccgcccctggccccgaccccgtccgccgtggagtggatttggaatttgaccccgctgtcgtgctcgcacgtacatgatgcctctaaaccagagccatctgctgcaggaggagtgctgaatttcttttgattgcagggggaaatgaacgaaccgatcaacaaccctcatttgattagtacttcattcaatctattattactgttactgagttcaggactcaggtagcagtcgatgccacattgttagattgcgatctgcaaaaacgctactgattcataaataaaatcgacccagcatgtacacacgcacagcttcaggctggtccaagcaaaaactgcattcatgtttttgcttgtacactgcaccgtactcatattggttttagcagtaagagcgtgcttatgggtgcaaaatgtcatagtgaaagatgttttattgcattgcatttagttaataacatgtcattcaaagttttgtggtaaaatttcttctgacctggatatggcgcggaaaatttgaacggtcctatgggagaattataccagaaaagagaagggtatgcgttactagtagcttcccccaaactgctggcgctatgatcaaaatgtgctttcccaatttagccactgcatgttgcctcataatttctagtttttcgatatctgacaatgccctgaccgccgcggaatgtcacgccaccggacaccgacatctactccattccgagggttcttgccccgatgccgtagaagtacgcgaggtgcacgaagaaaaactttggccgttaccacgtgagcgagccaccagttgagcatttgcgcgattcactgtacaagacagagagggatgtcatgaaggtgattagtccagctatgtttggtagtgaagggcgatgtccagagagtaagaatgaggcgacacagtatggactcgatatgactgagcaataatatcttgagcattcgattccatggatagctgccaatgatgttgtacatttatattagacccctccagctaccttgtcgatgcatgaacaagaagacaggttagactttgttgaaaccctcttcactagtggaggtatcgaccatcactcgtcattgtaacccgatggtgatcgacgaccatgagcttccatgttattgcgttctgatacttgagacttttattatgactatgtataagatattttctcttattagtactggatgatgagatgtgtcttattatgactatggatgagacttttgtgatgtaattgatgagact

SEQ ID NO: 23167 - DNA, 3998 bp, Zea Mays
ccgacgcctgtaacggccccaagttccaaagtacgaaagccaggagttggcactcggcacagtcgagtcgagtggcggccttcgagatctcatcggtgttcgtctcagcccagaaggggctacggcgcggagtcggcgagttccgagtggaacctgggttcgattcggtgatcggcggcggaatgggggtgccggaggcggtggcgctggagatacctgcggtggaggaggggtcgccgacgccactggccagggtgccaccaaggatcaggcggaggctcctccaggcgggcagcggagaaaacggcggcaaggcgccgacggccgaggagatcgagaccaagctacgccaggcgcatctccggagcaattccatgaagcattgtcctccaaagcaaggcgctcaattaagagcccttcagggtcattgcaggaggaggatcgagggcagcttcttgaggcaaagctcctggctgccaggcagaagaggttgaccctcttggaaaaggaacagagccggttggctaagctggacaaactgcgacaggctgttaagagtgatgcagagatgaggttcgagagggaaagggaagaactcggaatgaaagttgaatcacgggttcaaaaggctgagaacaatcgtatgcaactaatgcatgatcgtttgaagaggcaggctgcattagaggagaggacaaaaaggtactttatgcaaagattgacttgggaaaacaagtacagggagcgtgtacaatctgcaatacagaagtgtaatgctgctgagaagagacgattggggctgcttgaatctgagaaaagacgggcacagagtaggctcttgcaggttcaacttgctgtgaagactgcctctaaccagagagaaactgagaggagcaagttaaatgagcaattagaagaaaagcttcagaaggcagagcagcagagggctgactatttgaagcagcggggaaatcctcacagttctatgcacagcagttcagttaaaaatggagaatttctttcaagaaaattggcaagatgctggagaagattcagaacttctaggaaaacaacagtagtattggctagggcctttgatgcactggggataaatcagcgatcagttgtgtctatgccatttgaagaattagctctctgcattgaatctcctgcagttctccagaccactaaggcattgcttgaccgtcttgagagtcgttttgtcttttctcagtcatcaacttcatcaaaaccagaaaacattgaccaccttctgaagcatctaggatcaccgaagaggaagatcccactgagcaatgtggggacaagtgaagcaacactgaaaaacgcagttggaaattatgattccagtacgttgtctagatattcgcaaaggattgcactttgtgcttatatgattctaggtcatccaaaatctgttcttagtggacaaggtgaacaagagaaatttcttatggaatcagcaacaatctttgtaaaggaatttgaactgctggttaaaacagtacttgatgccctagatggtgcatgcatattgagctggtcagttatagatgatgccacacctgttcgttctagctacgaggaatcttcatccattgttgctgatctgaagaaattcagaactcagctgcttgcctttgacaaagcttggtgtgcttatctttaccattttgtggcatggaaagcaaaagatgctaaatcattagaggatgaactcattagggctgcatgcaagcttgagctgtcaatgattcaaacatgcaaaataactgaaggtgaatctgataacctgggtggtgatttgaaagccatccggaaacaggtcgcagaagaccagaaacttttaagggagagtattcaacacctgggcggtgaagctggtatcggaatgatggaatctgctttatttgaaacacggtcaaagttctttcaagcaaaagagaagaggagttccattgcaactacagttgcaaatgtagcatctccttcagttacatgttcttcaggacagtctaatgattctgaaactggtatcggaatgatggaatctgctttatttgaaacacggtcaaaattctttcaagcaaaagagaagaggagttccattgcaactacagttgcaaatgtagcatctccttcagttacatgttattcaggacagtctaatgattctgatactggggagaattgtaacatggatgctgaaaaggcaagtcgagttgtccaatctctttttggagcattgtcttcacgatatgaaaatagcaaaggtggcaagctgatgagtaacgcagcaccagaaaaaatgcctactgagaatgagcaaatagtcaatgagatactacatgatatacatggttcttttgctgacatctctgatggtgctggtaccgttgaaggtgacttcaaggtaaaagtcaaggaaacaatggagaaggctttctgggatgtggttgctgattcaatgagaggagacatgccagactactgttatctggtcagcctggtaaaggaaatcagggaagcactggaagagttatctcctacagggtggaaagaagaaatcagtgacaatattaaccttgaaatattgacccagttacttgaatcaggttcccaggacagacaataccttggacaaattttgcagtactctctggataagctgcgaaaactgtcttctcctgtgaaggaacacgagatgaagaagagtcatgatacattgttgggagaattggtcgaagactctaaatccaattataaagatccaaattcatttgttctttgcgttatcaagggtttgcgcttcactatggaggaattacaggctctaaaaacagaagttactagagcacgcatccaactattggaaccattgattaagggatcaggtggagtggagtacctgcagaagtcttttgctggtcgctgtggttccccttctgatgcgttagcttctctcccttcaactgcccggtggattttctctttgaaagatgtcgtggaagaacaatggaatgaacatgtcagctcgttatcaattctgccagaagcagaccatgttcagacacttgttgccaccctccgaactggccatgcagttgcaggtgtacaatctgtgatacctgcagcagacaatacaggattaccagagtgtaggggagaaatacttggcaagctaataaggattgggctattacagctcatcagcagcatggagggtgtagaaagggaatcggttcctgagacctttatgttgaattggttgaggctgcggtctgttcagagtaagtttcaacaagtgattgtgatagcgacaagcatgcttgttttgcatcaggtgttagcgagtgagaacccaaagatcacttcttctgagctggagaatgccacttcggaactgttcaacgtcctcacaaggctgctagacaactttccagatgttggcactgagaaaatcattgaggccatgatgtactcgtcaacctcaaggagcttgtcagatcatgaaaggatgaacgccagaaaagagatattgactagggtcttccttagaagcctccagaccgatgacaccgtcttcaagaaggtctctcagtccgtatactgtgcattccgtgcagtcaccctgggcggcagtggggagaagggccggatgctcgccgatgcatccctgaggcgcgtcggggcaacaaaactcactgcgcggctggtgaaggcagctgaagtgcttatcaaagcagcaatggtgtcagagcaggtccatggcccatggtacacgcagttattgtgaatggctctgctaccgcgatatatatatatatatagctctgctcatgccccgttgttacaactgaatgaatggtttgtgggagtgccgtgatgtctgaattccaataagcataggcgacctgaatgcatgtatatgtaaatatacacgaaacgtaatacgactccgaaatgctcctttctcc

SEQ ID NO: 23168 - DNA, 1022 bp, Zea Mays
gtgcacagttacaaaatctgacgcctttaatgtaaatggacacaagaccttcgttgcaatggatgattatcttgtcactgacaaaatcactgcattcatagtgcaaacgcaacatgcagcaactgaagtccttaaagaaaagcaaccaaaagactgtatgaaatggaccaagtattgcagacaatattacaaatattggacacgttcatggctctttctgaagatactcatggagaaattatcttgtacctgagaatcccccttatttttgcacaattgatggttgtgtcctgtagtggctttgataattcatcactcctaaacgattttagaaagctataccaactaatgtgtggaggacctgggcaaggggtggtagtcgcgctggttcgctatccacggcggcaagccgcctactcgaagatcccacctccgaggacgccgctacggggaggacatgggcactaatcttgaactaaaactaggggggtgtctatgacggctggttccgcctacaaccacgtggacaacttcttgcccgacatcatctcccagcttgttccacctacaaccgcgtggacaacttttcacccgacatcatctcctagctcctcgcattcgccaacaagttctgctatgagggcttgaagccaacctacgacaatcgggtcacaaccatggtgttggctcttgacgacgcctgatccctcatcgacatcggcctctaggaggcctcccacctcctcgtcacctcgtgcctctagcattcctatgggagcccccaaagtcactcacccacctagacatcgcccgtgttgttatttggtggtcagtatgtcacaatatagtcagttttttttgcttatgttgttggtactgattttattggatgtgaatttatttatcctttcattgtatattggaattcatgacattatctacatatgtacatgcttacatatctattatatttttgtataaatatttttttgatagtttttaatttgtatggcaaagcaagg

SEQ ID NO: 23169 - DNA, 1797 bp, Zea Mays
ctacgcgcacacgtcaaactgtcccacacgacctgtacctgccccgccgcccaccggacgcaaccgcgtccgaccaccgccgccggaaccctacgcccccgcctcgccgcgccatggcggatccgccgcccgtggctgcctccgccttgccggcgcagcccgaccaggtcgccgcctccgtgtccaccccgcagaaccccaaccctaaccccctcctctccccccaaatccccccgtccccgaccgtctccgacctctccgcgcacatctcgtcccctcagcagctcgacccggtggctgcggcagctgccgcttcgggcggcgggggatccatggattaccccccgcgcccgccgcagctgcaggcgccttcgcccacgcaggcggggcccggcgccgccgggtttggccagatcccccgctcggggtcggcctcacgcctctccacggccagccagctccagcagtacgcggctaggatgtacggcgggcagatgagcttctcgggtggcggaggtctcgtgggccaacagcagcagctggcggggcgcacccccgtgcttgggcagggccagctggggatgctgcaaggccagggtaacgcgggatctgcggcacattttgggcttcagtcgcagatgatggcgcaggcaaaagggcatggcacaaggcacccaattgaataatgctaatacagctcaagcgctacaagggatgcagcacatgggtgtcatgggtactatggggatgaaccagatgagaccaaatggaactattccctatggtgctcaacaaaggttcgcccatgcgcaaatgagaccacaagcgtctcaacaacctgcactgtctccacagaaggtgcctggtcaaggtctgtcgaggacagcatcaattgcagcattaaattcacaactgtctggatcatcacaaaatggacagatggtggcaatgtctatgcctcagcaacagcagtggttgaagcaaatacaatcatccatgggctcaccagtttccccacagcaacaatatcagcagcagaggctcctgtttatgcagcaactgcagcagaagacaggattgagccaacaacaacttctccaaatccaacaacagcatccacatctcactgcccaacagctgattcagcagcaacaaattttgcagcagtttcagcagcagcaactgctacaatctccgcgtgtttcagcatctggttcacagaagtctgcgaaccttacaggctcgcagccgggtacaccattgtcaggtggaaccatgactggtggaagtgcaagtcagggagccgaaggaactagccaacttcttgggaaaagaaaaatacaagatctggttgcacaggtagaccccctaggcaaggttgaccctgaagtggaggatttacttctagaaatcgccgatgacttcattgactcggtgactgcatttgcgtgtaccttggcaaagcacaggaaatcatcagttgtcgaagccaaggatgtgttgctgcacttagaaagaaattggcatttatctgttcctggtttctcaagggaggataagaatccccaaagaaattctgtaaagccattggtagatccccaacaatcagaaagtgacgttactggtattagaggtacaagcaataaactaggtgctaataactcagttggcaaccatcaaatacgacctccaatggcagaaacttcggctgtgccaacagtgggctctctatcgaaagcccctcgcttctaagggctatgctgctcttccctattgaaggaaaaattcctccttctg

SEQ ID NO: 23170 - DNA, 3256 bp, Zea Mays
ccgccgcagacggcgacgcctccacctcctccaccgtgtccgctgccaaccaacggggctcttccgcttcctccgtcctcaccttccagcaggccatccagcgcctccaggagtactgggcctccgtaggatgcgccgtcatgcagtgtagcaacaccgaggttggagcgggcacaatgaatcctctcacatttcttagggtcttaggtcctgagccatggaatgtcgcttacgtggagccaagtataagaccagacgacagtcgctatggggacaatcccaataggcttcagcgccatactcagtttcaggtaattctgaagcctgatcctggaaattcgcaagatctctttctgcacagcctttcagcaataggtattaacatccatgaacatgacatccgcttcgttgaagacaactgggagagtccggttcttggtgcttggggactgggctgggaggtttggatggatggcatggaaatcacacagttcacatattttcagcagtcaggaagccttccattgcagccggtttctgttgaaataacatatggacttgaacgtatcctcatgtcactccaggaagttgatcacttcaagaatatactatacaccgaaggaatcacatatggagagctgttccttgagaacgagaaggagatgagtgcatattatttagaacatgcggatgtcagtcacattcaaaagcactttgacaattttgaagaagaggctcgatctttattatcactggggctgccaattccagcgtatgatcaggttctgaaggcctctcatgctttcaatatattagattctagaggttttgttggtgtaactgagcgtgcaagatattttggtcgcatgcgaagccttgctcgtcaatgtgctcagctttgggtggaaactcgagaaaaccttggacatcctttgggtgcttatgaagaggataaccttatctatcctcatgtctccaaaaaaactcatagagaggaagtgctggtacaaccacgtgcatttgttcttgaaataggaacagaagagttgccaccccgtgacgtcgtagaagcaactgaacagcttgagaaatctctagttaatacattggagaaacgtagattgacccatgggaaagtgcacacttacgggacaccaaggagattggcgattgttgttgaaaatcttagtatgaagcaaacagaggtagaggtggaactacgtggcccaccagttgcgaaggcatttgacgaagaaggaaaccccactaaggccgctgagggattttgtcgaaagaataatgtctctgtcgatcacctatatagaagaatagatggtaaaacagaatatatctacgctagagtcagagagtctgctcgttttgctgatgaggtcctaactgaagatttacctactattgtttctggtatttcatttcccaagtcgatgcgctggaactccaatattgtttttagtcgtccaatacgctggatcctggcacttcatggcgattttgttgtgccattttattttgctggcatctcaagtgggaatcagtcatgtggccttcgtaactcttctttggctaattttaaggtggaaactgcagaatcatatttaggtactgtggaaaaagctgggatcttgattaatatgcaggagcggaaggaaaaagtcttacatgcctctactgtattggctcaaggtgttggtggcgatttcattgcgcctgatagcttgctgcaggaggttgtcaatcttgtggaggcacctgtgcccatccttggtcgatatgatgattccttcttagaacttcctaaagatgtactgattacggttatgcagaaacatcagaagtattttgctgtaatctccaagtccactggcgatctgctaccttattttattgctgttgccaatggtgcaattagcaaggaagttgttcgcaaagggaatgaagctgttctcagggcaaggtatgaggatgccaaattcttttataagatggatacacaaaagaaattttctgaattccgaggccagcttagtggcattctttttcatgaaaaacttgggacaatgctcgataaaatgacacgtgtcgagaataccgttgctgaattggcccttattcttggaataaatgagagaacggtcccaattatcaaagatgcggctgcattggctatgtcagatcttgccacttctattgtcacagaatttacttcacttgctggaattatggcacgccattatgctttgagagacagcatccctgaagagattgcagaagcactatttgagataacactccctcggtcttcgggtgatgtgtttccaagaacagatgctggtatagttcttgcggttgctgatagattggatagcctagttggattgtttggagctggatgccagccaagttctaccaatgatccatttggacttcgaagggtctcttatggattggtccaaatattagttgagaacaaaaagagctttgacctcagacgagctctcaccttattggcaggggtgcaacccatagcaatagagagtgatgttatagatgaggcagtacagttcgtcacaaggagactggaacagcttctggtggatgagggaattaactgcgagatagtccgatcagtgcttatggagcgtgcaaactgcccttatctagcagcacaaacagcgaccgaaatggaagcattttcgagaacagaaacatttcaaaaaatcgttgaagcgtattcaaggccaacaaggatcatccgtggaaaagaaattgagtctgctttggaggttgacccacacgtatttgagaaagatgaagagaaagttttgtggagcgcctacttggaggttgctgataagatccatcctggtgttgatattaagacctttgtggatgcttctcttatcctgatacaacccctagaagatttcttcaatagtgtcttcgtgatggcggaagacgagagagttcgcaacaaccggctaacgttgctgaggaagattgagagtttgcccaaggggattgcggacctgtcagttttacctgggttttaagctgcctattccagccagggggtgtgagcaatagccgtagcggagagatgattttgattttacaagtatttctgattaaaggaaaaaaaaacgtcgtcgcagtagggcacggcaatcccagtaaacgctgtacttgtaattctgattaatacagtcaacaaacggaatcatatctcaaatcttgt

SEQ ID NO: 23171 - DNA, 1487 bp, Zea Mays
agcgcactcccactcccaccggttccgccctggtctacgttctgtcgttctgtggctgagctccaaagtccaaagattagtgaatccaaaaggcgaccaaacagatcccccgctcctgtgctccgctcatgttagagaaccccctgggaaaacgcagcggagaaactctggagatcgaaaccccggcacgcagctaggcgaactgcacgcaactgcaggtcgacgtctgatccatttcttgtcgcttcagcttctggtgctggtcttcttccagttgcatcctggttacctgtgtcaaggggcggttggtgtctggtgtagttggagggcagagcttcgcgggcggcgaagaagaagagcagcagagagactctgctgacactgaccgagggagatatggcgaggaagctgagagagttgctgcagaagagcggcaaccgcgtatgtgccgactgcggcgcacctgatcccaaatgggcatcggctaacattggagtattcatttgcctaaagtgttctggtgttcacagaagcctcgggacacatgtttcaaaggtgctgtcagtcacactagatcaatggacggatgatgagatcaactccatgatagaagttggtggaaactcttatgccaatgctatatatgaagcatttctgccagagggctatcagaagccgcatccagattctagccaagaagagagagctgatttcatcaggtcgaagtatgagttgcaagaattcctgaagccaagcctaaggttagtttccagcaataagggctctttagaggcgaccagctctcgaaagcatatggataattctgtgtctctttctgctagtttcagcagtgaggctggaatggttgagttcattggaatactaaaagttaaagtgataagagggactaaactagctgtaagagacctgatgagtagtgacccctatgttgtactgaccctaggacagcagaaagcaaaaacttctgtgagtaaacgtaatctgaatcctgtttggaatgaagagcttaagctgtcagttccccagcactacgggcctctgaaacttcaagtgttcgaccacgacatgctatcgaaggatgacgagatgggtgacgcagagattgacctgcagccgatgatcagtgcagctacagcgtttggcgaccctgatctgctcgcggacatgcagatcggcaagtggctcaggtccccagataatgcgctggcaagggacagcgccgtcaatgtcgttggtggcaaggtcaagcaggaggtctctctgaggctgcagaacgtggaatcgggggaggtggaactggagctggagtggataccactcaatcagtagagtttaaatccacctgtaggctatatgtgatgcatgtttcatgtgtgcgacacaagtcctgatgctcttgatcatcttcagtttgtcagggtgcctgcagtgttgtagactatctttgcggtttgcaaaaaaaaaaa

SEQ ID NO: 23172 - DNA, 850 bp, Zea Mays
aaaaacggcattaggaactaagcggttggcttcagaggacctggccaatgactgggataataaaaggctaaatccaggaaatgacaattatccactttcaacaggagctgcaaataatttatttttgggtattgagcaaggagctggaagcagcaatggccagtctgcctttcccaagtttgacaatgggagctcagtggcattaccatctgggcagggaatgtctggtcttatgggaaaaggggcaaaatggcgtgacggggactggttgtgcaacaactgcaacaatcacaactatgcatctcgtgcgttttgcaacaggtgcaaaactcagaaagaatctgcagttcaccctggtgtgttatagcttgctgttggattattttgttccaggatatgttgctgcctgttctagctccttcctcaaggctgcggtttgagttttttcgattctgcagtgtttttgctgctctaaaatgtttgtctcgatatttcattagtgcttgttgaagttccccatttgtttatggtataagcgcttgaataaaatgtttctggaaagtaccggcctacaatctggattttggcaaaataattgaattagttgttgtacaatgaggcaaattgtcttacgttgtacttgatgaactctggagtattatcactcgtcgggttgaaaaggggaactatacaatgtaatttcagtacagattattattttttcctgagaactccagttgtgctgttatgcgagttttgcccattcagaatacttttgatgcattcatcagaattcggctgttactttttcatcttttatgcccctttgcatctattaaattgcccttaa

SEQ ID NO: 23173 - DNA, 1133 bp, Zea Mays
gtacacgccaaccagcaccttttgcctaccccggcaccaccccgcctttgccttggtgttgaaaagtcgccgcgttcctcttgcctgatgaaatcaatcctcttctcgtctagatctgagcctccgcgtggcttccagatcagatgcttggtccgatcaacgacgaccttcagagctgcgacgttccggcttccgggggatctggatcttggctgactggacaattgcgaggcgttgacgggcttctaaagcgtggctggattgctggatctcctttctgccccgcgactcgatgatatctctttgtattggtaattattggatgaaatttcgataattattagatcggagagatgttggtcgcggcggtccgtgcctaactgaaggcaaggtaaggtccgagacaaaagaggggaaaaggatacatgaaaaagaagtgagatgtgacatcttgaaggcctttgccatgttgggtgcgctcgcatggcaggcatcgtaataaagatgttggttttgtgtgctgggtgggagatcgcacagggaattgtttttttcatccctgggttctcccgcccattgtgtccctgtgccctgcttcgtgttgtttggcttctcgtcctacgcttcatcaccggtgctgctgcaaattgaacggcgtttctcgtctcacggcgtgctgcaaattgaacggggctacatcgcaacgcaacacacaagatcaactgcagtgcctacacggtggacggagtatttgtatgatgtgaaggtcactattcagcatcgtcagtatgaaatggctatggccttcaaagctttctttcttggtcaccggacagggaagaaatattctgctcaagctcacaattagatacaagacataactcagataagagcttgttcaacttgcactatagttcatttgagtatttacctattattgatctcttgagttgaagctaggtttcaagtatctcctaaggattcgtatatgtgaaaaccagggattctcttttttttttgcactacaatctgtgacgttttaatatttgatgactagttgttcatgcattgctattgtatttgcatatcccctaggtttaagagcatttctaacaaggtgactcaatgatgtc

SEQ ID NO: 23174 - DNA, 327 bp, Zea Mays
atatgtcggttttagtgaggacgtacagaaaaatgtcaacgccgcgttagaaccaaaatcaaagaaggtcactgcagacctgaagcctagcaactaagttgtgcctaaaaggtctcttcagccaaaaccccgcaagctcagttttccattgagaagatgcctggagattgcagggtggacagctgttgatgaggttccgaggaggactatatggcatactgaagatccaatcagtaaagaaacatatatttttatccttcagcctttggtatgttagtttcaccctctttaaaaagttcattttcaagtaattgtcacagatttcct

SEQ ID NO: 23175 - DNA, 1830 bp, Zea Mays
ctctcctcgcgtctcgttgtcccatctagcccatctgctatcagcgaggacgaaggcacaaacccctcacctccctcaaaccctagccctcgctctcccgcttgttcccgtcaccgccatcatgggctcagatgcggacatggaggactacgggttcgagtactctgacgaagagccggaggagcaggatgtcgacattgagaaccagtattacaactccaaaggtttggtcgagacagacccagagggtgcacttgctggttttgatcaagtggtcagtatggagcctgaaaaggctgaatggggatttaaagctcttaaacaaactgtcaagctttactataagctggggaaatacaaagaaatgatggatgcatatagagagatgttaacatacataaaatctgcggtcacccggaactacagcgagaaatgtataaacaacataatggattttgtttctggatcagctagtcagaattttactcttctgcaagagttctaccagacaacactgaaagcgcttgaagaagcgaaaaatgagagattatggttcaagacaaacttgaagctttgcaaaatttggtttgatataggcgagtacggtcgcatgagcaagatattgaaggaactgcataaatcttgccaaagggaagatggttctgatgatcaaaagaaaggcacacaacttttggaagtctatgctattgaaatacaaatgtacactgaaacaaagaataataaaaagcttaaggaattgtatcaaagggctctttccatcaaatcagcgatacctcatccaagaatcatgggtataattcgcgagtgtggtggaaagatgcatatggctgagaggcagtgggctgaggctgcgactgatttctttgaagctttcaagaactacgatgaagcaggcaatccacggagaatccaatgcctaaaatatcttgtccttgccaatatgttgatggaatctgaagtgaatccttttgatggacaagaggccaagccgtacaagaatgatcctgaaatccttgcaatgacaaacctgattgcagcgtaccagaagaatgacatcatggaatttgaaaagatcctgaagagtaatagaagaacaataatggacgatccttttatccgtaactatattgaggacttattgaagaacatcagaacccaagtgctgctcaagcttattaaaccatatactcgaatcaggataccattcatttcacaggaactcaattttccagaaaaggatgtcgagcagctgttggtgtcactcattctggacaaccgtatccaaggccacatagatcaggttaacaagctgctagaacgtggagaaaggtccaaggggatgaggaagtacaatgctatcgacaagtggaatactcagctgaagtccatttaccaaacattgtccaacagagtttgatgagaaggatcgctgctgctgcgtgcattgcacacctagcattgttgatagcctgttttgcggatttgagggcaactgcaaagaactgtctggtgacgcttgcgatagaatcctggatctgggtaaagttaatattgactacgaggtcgtctctgaattgaatctggtgttttgataaaaaaaaatgaaggacatgaatggcagctaacaatacttgcccttacgaaccatggttgaacaaaagtgtgaattagtcgcagatattaaaaaaaatgagcgctgctctaataaagctgcagctcattttaacgtgactacatgacaataactagtgatcctgtcatactctagaatctaggttggttccttcagtcatttgactcctaatgtac

SEQ ID NO: 23176 - DNA, 4499 bp, Zea Mays
gtacgatcgttggtgttgcccatccaaatttctagactagaggaccttggcaaacgcccaaacagacttgactgtgtagaaccactgaaccagcgtcgtcttctcgagttgaagtgtgctgcctgttcacccctgcgtctttccctcccctgttacgattatttgcctattgggtgaccgccgacgccgccccacgccaggtgctcaggtcttcggcgggccctttgctggcgaggagcaccaaccctatacggaggatattttggttgcgcataacaagttggatagttctgggttttcgctctgaacaaaatggacaatgctcagagtgagaaccgaattgataccaagcaagatgatgatgtgcgccagatcaaacatgatgatgaggaggctcgccttgaagaatataaaaagatcattgatcaaaagacttccctccgccggagcaacctaaaccctgaaaggcctgatgcaaactacctgagaaccctggactccagtatcaagcgaaatacaacagttataaagaagttgaagacaataaatgatgagcagaaggatgggctaatggatgagttaaaaagtgtgaatttgagcaaatttgtcagcgaagcagtttcttatatttgtgaggccaaacttcgctctgctgatatacaagctgctgttcaggtttgctcactccttcatcaaagatacaaggacttctctccttgtcttatacaaggtctactgaaggtcttctttccgggaaaatctgtagatgacttggatgcagataaaaattcgagagccatgaagaagagaagcacactgaaacttttgattgaactgtattttgttggaattgtcgaagatgctagcatatttgtaaatattataaaagatcttacatcagcggaacatttgaaggaccgtgaaggaactcaaaccaacttgtctcttctatctacctttgctcgtcaagggaagttttttttagggctacaacctcatggtcaagaagcttatgatgagttctttaaggagctaaatgttaccgctgagcagaagaagttctttaagaaagccttgaactcttattatgatactgtagctgaactactgcaatcagaacatgtgtctcttcgtctaatggaggcagagaatgcaaaagttttaagtgccaaaggtgaactaagtgatgagaacacagcctcatatgagaaactcaggaagtcttttgatcagttactacgtggtgtatcctcgttggctgaatctcttgatatgcagcctccagtgatgccagatgatggaaatacaacaagagttactacaagaactgatgccttgccttcttctggaaaagattcatctgcattggaacctatctgggatgatgaagataccaaagctttttatgaatctttacctgatctcagagcatttgtgccggctgtattactgggagaggttgagccaaagtcgaatgagcaacatgctaagggccgtgagcaatctagtgagtccacttcagaacaagagactgaactacatgacgattttcaaacttctgcaactgaacatcaactagaagttaaattagatggtggagtgaaagagagtgatgacaaagataaagagaagggaaaggatggagaaaaggaaaaatctaaggagaaggatctggataagaaaaatgacagagagaaggagaaaggaagagccatggacggtgcaagtctggataacatcttgcagaggctaccgggatgtgtcagtcgtgatctcattgatcagttgacggttgagttttgctacctaaattctaaagcaaatcgaaagaaacttgcgcgtgccttattcaatgttaataggacttcactggaactgttgccttactattctcgtttggttgcgacactatcaacttgtatgaaagatgttccaagtatgcttctgtctatgcttgaagaggagttcaactttttaataaataagaaggatcagatcaacattgaaacaaaaataaaaaatatacggtttattggggagttgtgcaagttcaagatggctcctccagctcttgtttttagctgtttgaagtcctgccttgatgatttcagtcatcataatattgatgtggcttgcaaccttctcgagacttgtggccgatttttgtaccgctcacctgaaactacgattcgcatggctaacatgctggagatactgatgagattgaaaaatgttaagaatttggatccacgtcacagtacacttgtagaaaacgcttactacctttgtaaaccacccgaaagatctgcacggatatcaaaagttcggccacctttgcatcaatacataagaaagttgcttttctcagatcttgacaaatcaagtgttgaacatgttttgcgccaactacgcaaagttaccttgggcagaatgtcaacaataccttctgaagtgctttctaaaggttcacaaaggaaagtacagccaagttcatctgattgctcttctcactgctagtctcagccgctatcatgatgactttgctgtcgcagtggtagatgaggttttagaagagataagggttggattggagttgaatgactatgggatgcaacaaaggcggcttgcccacatgcggttccttggagagctatacagctacaagcatatagattcatcagttgtttttgatacactgtaccttatcattgtgtttggtcatggaacacctgaacaagatgtgttggatccaccagaagattgcttcagaatcaggttgatcattacacttttacagacctgtggtcactatttcagtaagggatcttcaaaaaggaagctggacaaattcttgctacactttcaaagatacattattagtaaagggcccttaccactcgacatagaatttgacattcaggatttatttggagagctacgaccaaacatgtctaggtatttatcaatcgaggaacttgttgctgcgttagttgagcttgaagaaaatgagcgctcagccccagtagaaaaggttgaaaatgaaagacactcggacaatgaatctcataaaagacaggcacgagatgctggtccatctgtgaatggtggaagcgctgcaaatggaattgaggaaaatggcaaggatcatgaaatagcagatagtgagagctattcagatagtggcagcattgatggacgggaagatgaggatatattatctgaggataaatcaaatgatggctcagataatgaaggcgacgatgaagatgatggcattcctgttggttctgatgaagatgaaaatgttgaggttagacagaaagttatgaaggttgatcctaaggagcaagaagactttgatcgagagctcaaagcccttcttcaggagagcttggagtcccgcaaatcagaggcccgttcaaggctccctctgaatatgatggtaccgatgaatgtccttgaaggttcatcaaaagactcgagggccacagaatctgagagtggagaagaaacagtagatgaagagggtggcaatgctgggggtagcagcaaggtgcgcgttaaggtgctaatgaagaaagggcacaaacaacagacgaggcaaatgttaattcccgctgatagttcaatcgttcgaagcacgaagcagcaagaagctgccgagcttgaggagaagcagagcattaagcggaggatccttgaatacaatgaaagggaggaggaagaactgaatggagcatcacaaatggggaactggggtcaaggagctaccaacaccagcagtatcagatcaggtggccggggcagctgggatggttcagcacggggaggtggtcgacaacgacaccacatcgccggttctggtggtttctatcacagttatggcaggagaagatgagtttgtcctgatgggaggtggttggcagaggcgccacactgtgggttcttgtggtttctatcagttgttgcaggagaacagttagctgtgtgagctattttgtcctgagcttttttttggcagggccatgcttctctctatttaaccgcctaacgatcagattaacagggaagaaatttcggggaggttaacacagcttgatggacaattgcttccaccaccctaatctgaaagataagataattctaccactgatgggagatagcaatgccttgaaggagctatttttctggtggcccgaatggcttgagttgcttggtagttatgggcttatggctgtacctggagagcatagataccccggttgctcatgtacatataataataacataatttggcaacgagtgtgagtcgtttggagattgtgtgcgcacttgtatctgagtatggatctgatggtggtacttgcatagtttagatgtgcatactgtttcgacgccatgtgtgtgtatggggcacctgataaaaaaattactgtttgattcccatttagttatgcgtgcaggagttattatgattaggggtggtaatagatgacgat

SEQ ID NO: 23177 - DNA, 1411 bp, Zea Mays
tcctggtatccagttcctttctttgcccctcctccgctttcttcggttcttcctctcccccactccccacgctgcctgagaggctgagactaggaaggggaaggaaaataatagtttggcgcgcaaatatccgcctccattcgtacgccgctattctcgtctgcgatccgcagcgcgatgatgatcccgtggggcggcgtggggtgctgtctcagcgccgctgcgctgtatctcctcgggaggagcagcggaagtgatgcggaggtgctgaggtcggtggcgagggcgggcagcatgaaggatttagctgctatcttggacactgcaagtaaggtcctaccacttgtagttgccatctctgggagagttggttcagacacaccacttatatgccaacaaagcggcatgagaggtgtaattgttgaagaaacggcagagcaacacttcctgaagcacaatgatgccggatcctggattcaagattcggcagtgatgctttctgttagcaaagaggttccatggtatctgtttacaactgggatgcttctctaacctttaaacaatcactaggatgatggaactggacgtgtttatgtggtcggtgctcgttctgcagctggtttaattttaactgttgccagtgaggtttttgaggaatcagggaggacacttgtacgtggaactctagattatttacaagggttgaagatgctgggagtaaagcgaactgaaagggttcttccaactggaacctcattgacagttgttggtgaggccattaaagatgatgttggaactattcgaattcagcgaccgcacaaaggacccttttatgcatcatcaaagagcattgatcaacttattgtgaatcttgggaaatgggccaagttataccgaattgcttccatgggttttgcaacatttggtgtcttccttcttgcaaagcgtgcactacagcattttctagaaagaagacggcggcatgaactgcaaaaaagggttcttaatgcagcagcacaaaggcaagctagagaagctgaagggagcaaaggtacatcagacgcagagcctaacagtaaaaaagatcaattagtgttggacatatgtgtcatatgccttgagcaagagtacaatgctgtttttgtgccgtaagtattgtatcttttccagaacttgaatgctctttgttgagaatgaagcaacttgattttctctatttttctatttcctttttcccataattccaaatatactaggcaacattatggttttcatatttcctgttcactagtagtttcttgatttttctcttaatggcttgcctcataacttgatagaacttgaatactgctaaggccttctttggatgttcagtactaaggaactataattctagaacccattgatctgc

SEQ ID NO: 23178 - DNA, 1308 bp, Zea Mays
gtcaaccctgcttctcgagaacaggagtctcccgcgatgggattgaggtcggcgccgcggttggcactgcgtcgtcccggcgcggtctccgggcacaggagtaggactggcagagggaagtttccagtagcatccacaagtctagatgactatcttccaatgcgaagcactgaagtgaaaaatcggacattaactggtgatatcacaagtctcagactaatcactgcagtgaaaacaccttatttgccagatggaagattcgatcttgaagcatatgattctttgataaacatgcagatagagggtggttctgaaggcgtaattgttggtggaacaacaggagagggtcacctaatgagctgggatgaacacattatgcttattgggcataccgttaactgctttggcactagaattaaagtgataggcaacacaggaagtaattctaccagagaggctgttcacgcaacagagcagggatttgctgttggcatgcatgcagctctccacatcaacccctactatgggaaggtatcaactgaaggattgatctctcattttgaggctgttctgccgatgggtccaaccatcatttacaatgtgccatccaggagtggccaggatattcctcctcaagttatcgagacactctcaggttatccaaacatggcaggagtgaaagaatgtgtcggacatgagagggtcaagtgctacaccgacaaaggtataacagtatggagcggtaatgatgatgagtgccatgattctaggtggaaatatggcgccactggagttatttctgtagcaagcaaccttgttcctggcctcatgcgtagtctcatgtatgaaggggagaatgcgttgctaaatgagaagctgttgcctctgacgaaatggttgttctgtctgccgaatcccatcgcactcaacactgctctggctcagcttggggtggcaaggcctgttttcaggttgccgtatgttcctcttcctcttgagaagaggattgagtttgtccggatagttgaagctattggacggggaaactttgtaggacagcaagaggcacgtgttctcgacgatgatgattttgttttgatcagtaggtattagtaagcgagcttgtttactttggtgaataaaatataatagcatcatgttatgaggatttttcagtcttttgtaaagaaataaaacagctaatcctgattttgcttacagtttcctgtagatctaggtggccatttcatatgcggaactgccctatatcattagggaataaagtaagagatgtatagcatcacttat

SEQ ID NO: 23179 - DNA, 1686 bp, Zea Mays
accatacgagggagccgtgaagacggatggcagagggcaaacgatctgggacacgtttgcacacacttttggcaagatttcagacttcagcaacgcggatgttgcagttgaccagtaccaccgtttcgaggaggacgtgcagctcatggcggacatgggaatggatgcgtatcgcttctctattgcctggtcaagaattttgccaaatggtacgggccaagtcaatcaggccggcatcgaccactacaacaaagtgatcaatgcactactatcaaaaggaattcagccatatgtaaccctgtaccactgggacctcccccaggccctggaagacaggtacaacggatggctggacaggcagatagttaatgactttgcggcttatgctgagacatgcttcaaggcgttcggagaccgtgttaagcactggatcacgctcaacgagccgcacacggttgcagtccaaggctacgatgctgggcttcatgcgccagggcgttgctcggtgctgctccatctatactgcaggacagggaactctggcactgagccctacatcgttgctcacaacttcatcctagctcatgccaccgtttcagacatgtacaggaggaaatacaaggcagctcagaatggtgagcttgggatcgcatttgacgtcatctggtacgaaccaatgacaaacagcacgatcgacattgaagctaccaagagggcgcaggagtttcagctaggatggttcgcggacccgttcttcttcggagactacccggcgacgatgcgggctcgggttggagagaggctgcccaagttcaccgcagacgaggctgcccttgtcaagggggccctggacttcatgggcataaaccactacaccactttctacacgaggcataacgacaccaacatcatcggacggctgctgaacgacaccttggcggacaccggaaccatcagcctgcccttcgacaagaacgggaagcccattggagatcgggctaattcgatatggctgtacatcgtacccagcgggatcaggaagctgatgaactatgtcaaggagcggtacaatagcccaacggtttacatcactgaaaatgggatggacgacggcaacagccctttcacctccctccagaacgccctcaaggacagcaagaggatcaagtaccacaacggctacctcaacaacgttgctgcctccataaaggaggacgggtgtgacgtgcgtgggtacttcgcgtggtcgttgctggacaactgggaatgggccgccgggtacacctccagattcgggctctacttcgtggactacaaggataacctcaagaggcaccccaagaactcggtccagtggttcaagaccctgctgagctccagctgaaggcgtcacacgggctgtgattggactgaccatttacccgacaccatacccttatcctgttgtgtcaagcactcaagctccaatcaatgtaaaataatgttacccctctctctctctctctggtagaaaaacatgtcgtgtagggctacatttagttacacattaaaagggcatatcagtaacttcaaacttagttcgtttgaaagcataagttacacgtgtggatttgtattgaaatacactttgtaaaaaaaagtcatgtttgtaaataaattaaataatatagcctagaataaatcagc

SEQ ID NO: 23180 - DNA, 1380 bp, Zea Mays
tcagccatgttgaagcaaaacctaagaaacttggttgtttctatttatccgagagtctggatgaagatatggactatatatttagggtgccggaagcataccagcgtgaagaagtccatgacttcaaccacataccagctgagactgccttatattctgatggtaatctggaaaaatacaaggacaaacacttttgcttgtaccttggtcccgaagatggcgaaatgggacagtgcaatggtcctgaagcttttgcaaacttttttggtctacttgactcccttccgcataatggaagcaaaccaaatggttcacactcctttggcaacacgatcgatttcaggtacaagctcaagagaaggtttgatcgtgggtcgtacggtgaagtctggttggcatttcattggaattgttctgaagatacagatgttcataaagagcctccacactttacaaatatatctcaatcagagatgtataattgcacaagttcaggcagaatgtcatctgatgaagatcatggttcaggcacagtaaatggtgatttattcatactgaagcgcataatggtggagaggggaaatgcagcttacttgagtggattgcgggagaaatactttggggaattattttcaaatgcttccaggactcttgaaggtttgtcgaggatagaatcatcgactatctcagtggacatgctatatgatcctgatatccatctagaaaagaacttgtcagctactgaagaaccacttaagcatgtggctaggtttatagaatcttttgaatcagaatcaagggaaatttggctggtgtatcacaatgaaggccactcattatcaaaattgatatatacagctgaagaaacgaagttagtcactggcaacaataatgagagggtcagacatatccaagttttgcacccatcgaagtggtggcattggctaaggacaacaaaagctgggctaaagcagatgcaaaacctcttatggcagctgagaacatgatcatttgctttgaggacatggagactggaaagtgtctaagagaggttccatctgaagcaaagcaaaataagctgaacatgcgtctgattgacttcggcagtgccattgatgattacacgttgaagaatctttatggtccaggacctactcgatctgaacagacatttgagtacactcctccagaggcactccttaattcaaactggtttcaaggatcaagaagtgcaaggcttaaataagtgaccgtacacgcattttaatggatcagcatctcggagggtggagtgaacaaacaaaggagcttgcatacaactttccttggtttcctgttctgatgttaggttgaggtcatacatggagttgtgcattttag

SEQ ID NO: 23181 - DNA, 1677 bp, Zea Mays
cggggctccgagccattcgatctccaatcggacggcctagacggctcccttcctctccttgccacacttgcgctcctctccgagttgtcgtctccgtcgctgctggctgctgcgccactcccccagccccgagatctgctcaacaatggcgacgcggcgccacatcctcctcctcgccgctgccttcgtgtcccttctcgcgctcgaggctgtggagggcctcgaagaggggccccgcgggcgccggctgctggtcctgctggacgacctggccgtgcggtcgtcgcactcggccttcttcggctcgctccaggcgcgcgggttttggtggatcagtggaccagaacgcagtccttgaatttattgatgctgggcttgatatgatcctggcggcagattcctctgcctctgatcttattcgtggcattgcgacagagtgtggggttgattttgatgaggatccagaggcaatggttattgaccacattaactatgccgctatggatgttgaaggcgatcacaccttgattgttggtgatgatcttattcagtcagatgtcatactggggtctaaaaagattgaggctcctgtattatttcgtggaattggacacacggctaatccatcaaacagtttggttctgaaagtcctatctgcctctccatcagcatactcagctaacccaaagactaagttatcgttgcctccatcgcttactgggtcagctatatcactggtttcggttatgcaggcaagaaataatgctcgggtgctgctatctggatcacttgatctttttagcaaccggttcctgaagtctggtgttcaaaaggctggtagcaaaacgagatacgagagagctggaaatgagcaatttgtgacagagacaagcaaatgggtcttccatgagagggggcaccttaaggctgttaatgttaagcaccacaaggttggggagaccaatgaaccaggcatgtaccgcattaacgatgacctggaatactctgttgagatctatgaatggtctggaacaagctggaagccatatgttgctgatgatgtgcaactccagtttttcatgatgagtccttatgttctgaaaactatgtcgaatgacaacaagggtttatactcaacatccttcaaagttcctgatgtctacggagttttccagttcaaagttgagtaccagaggctgggatatactggtttgtcttttacaaagcagattccagtgcgcccttacaggcataacgagtatgagaggttcataacatcagcgtacccatactacactgcctcattttcaacgatgtgtgctttcttcatattctcgcttgtgtacctgtaccacaaataaaggactcacgggagcgcacaagtttctggaggctgctgatgcgacctagatctgtggccaagtgttacccggtgcaattttatggaatcatatatttgtagtaggccaacttagctagaattagacgaccgtgaccgcaatcatgggaaatttactcgtgctagtaggatgttcgatctgccccacaaattttttttgttcggatccttctgatcagcacttgtgaaaacgtttacagtctgtagcattgaaaggatgacgaagcatgtagtgattttgaaactactgctcttgctcagttcttcctcgttgcacg

SEQ ID NO: 23182 - DNA, 2301 bp, Zea Mays
ttattactggaggatctttgcatgtcagaagacaacagccaacaattaaaggatggagatggggaccgtgttacccaaggcctgggaactgtatggagccttatcttgggtcggcctccgcttcgccatgtttgcttggatattgctctgaagtgtgctgcccactctcaagatgaagtcaggggaaaagcagttagattggttgcaaaaaggctctatgatctaacatatgcaacagaaaaaatagagcagtttgccatagagagccttgtgggagttgctaatgagcatactgtggacacagatattaattcgaaatctttgaaagaatcgacagctgagattgaggtaggtagtcagggaacttcagtaagtggctcccagatcccagatactgagttctctgaaaatgggccattcaagacatcatcggtttctacaaaacagtcagcagtatctgtatctgaggcaaagcggcgtacttctttgttctttgcactttgcaccaagagatctagtcttcttcaacatctgttcaatgcttatggaaggtccccaaaagttgtcaagcagtgtatccattggcatatgcccaaccttataagaaatctggggccctcgtgtcctgaattgctgaacattattcataatccacctgaaggcagtgaacatcttattaccttgacactgcaaacattgactgaagattcaaatccctcagctgacctagttgctgctgttaaacaattatataataccaagctgaaggatgcatctattctgattcccttactgccttcatttccaaaggaggaggtattgcctatatttcctaggctagttgatctcccgcttgagagattccaagacgtacttgctcggatattgcagggaactgctcatactggtccagcattgactcctgctgaagttctcattgcaattcatgatattaaccctgaaaaagataaagttgccctaaaaaaggtcacggatgcttgcacggcttgctttgagcaacgcacggtatttactcagcaggttttggagaagtcacttaatcaattggttgacagaataccaattcctcttctttttatgagaacagttattcaagcgcttgatgcttttcctgctttggttgattttgtcatgggaatactctccaggctcatcgataaacagatatggaaaatgccgaagctctgggttgggtttttaaaattgtcattccagactcagccacgttcttttgatgtcttattacagctacctccaccacaacttgaatttatgttgaataaatatcccaatcttcggacacctctttcttcctttgttaatcagcggaatatgcataacaccttgcccagacagattttgaacattctgggtatttttagtgaaacacagcaggcaccgatggcatttgtgacagctacattacaaacagcggatgcaaccacctctcttcctggtgcaactctgatgtgaatatactgtggaagccatcagatgcaagaaaggtcgatgcacatacagatctttgtagacattagtacgcagaacagacagatctgtgtcaatgaagattgccgcccctctgatgtatactattttgcaatgacgggttgattataagctactccgcatggagaaagagatgttgacagaagccaccgaggtgattgtatggcgtgagatcctgtctgtcctggagattggagagtttgctccagcggaacggaagtcatccaacttgtatagtagctttactgctgtggcaaaatgtagtcccgtcgtcgtggtcctgggagtctggcccttgcaggcagagacgaagaagacgcaaggaggatgattacaggaaagtccatattaccccatcttaactgttttcctaagtcagattacagctgctgcattccttttatagggagcaggcatttgaccgatttagtctaaccattgttgtaacaacttctgtacattagttaattgagttttgctactagtgttagcaaacacataatcgctgtcgttagcaatttcctgcggtgacctggtaatcaaggaaaatattttacatcgggtcaatgcatcatatttgtttatttctttgatttcattttccggtaggtttcattggagtttgtaatgatccaaatgaccattagtaagttaataataagcattacgcgagctacatctactggacgtgaatagcatttaatgtgctgtttggtttatatatttgtaacgtaataagtaattgataatgttaaactatgtttgaagtcc

SEQ ID NO: 23183 - DNA, 2203 bp, Zea Mays
cggacaccggtgtctgcttggaccaaatccgatctcgtggccacggccagaacacacctcctcacgtccacctgacctcttgctcctccccaataatgcccagtgcggcagtgcctgccaccgtctaagcccaccccaagtctccgccgtcaacccgtcctcccccatggccgccgccgccgccatctctctatccttccactttcgtttccgcccgccctttccatctccacgtacccccacgcgccacgctcccttttccttgttctccccttcccttcttgccccctgccgcctccgcgtcgctcccggccgcccctcaccgtccccgtggcgccccgacgtgcgggcgcgcgctggaagcaccatcggggcgccgcctgcgcttgtgcgcccaggcggagccgtggagacggaccgcctcccctccgacgtgcgggaccgggccatggaggcggtcgaccacttcggcggtcgcgtcaccataggagacgtcgcttctcgcgctgggctgcagctcgcgcaggcggagcgcgcgctccaagcactcgccgccgacactgaaggcttcctggaggtatcggaggacggggaggtgctatacgtcttcccaaaggactacagggcaaagctggctggcaaatcgtttaggatgcgggtcgagcctctggttgacaaagccaagcaagtgggtgcttatctggtacgtgtttcatttggcactgcgctcattgcctcaattgtgctggtgtacactacaatcattgccattctctcaagctcaagtagtgatgaagatggtcgtgggaggcggaggagatcttatggttctactatcatcattccgacggatatgttttggtacttggatgcagattattatagaagacgtcgagtagaaaacgaaaatgggatgaactttattgaatctgtattttcatttgtgtttggggatggtgatccaaacgatgggcttgaagaaaagcggtggaagatgattggacagtatatttcatcaaatggtggagttgttacagctgaagaactggcaccatttcttgatgtgccacctccatcagaagagtccaaggacgatgaatcatttgttcttccagttcttttacgctttcagggacatccagaaattgatgagcagggaaatatcctgtatcgattcccatcgctgcaacgtactgcttcatcaaaaagtggtaggagcagggaatatgtgggtaccaaatggtctgcaatgtttagcggagttgaaaagtacttagaggagaaaccgtggaaattcagtaaagcgaatgcaacagagaaggcgatggttgctggtttgggaggactcaatctctttggtgtcatcattcttggaaacttgttgaagcaaatgacagtgacacctggtggactaatctcatttgccgcacagttatatcctttgcttcagatatacgctggctccttttttgcaatacctttgtttagatggtttctgctacgcaagaccaacaatggcattaaaaagaggaataaggccagagaacagagagctcaggagctcgtgtcaccagattcttctctaagaagaaagttgctcagtgcacgtgatatggctgaacggaaagtaatcacgccagaggagattgtctatactactgaaaaggatctattggagcaggattatgaagtcaaggagtgggagaggagatttaaggagctcgagtcagagtgatggacatgaccgatatacttgacacttgcagtagctctacatggtcctcaccatacttgtcggtgatttttatccgcatccaacggagtggaagatggatctgactgaaccactcgagcaagcgaaactggatggtactggacctcactaattgtcgtgtcaccaccagcccaccactgaccacttcgctatggaagttttgtggaagctgttggtttaattggaaccgaccattatttgcaagatgatgttcgtatctgtgccattgacctgcatatatgtatagttccaatcacggatcaaattcagaatttgacacgaaaaagaaaaaaaacagggaatatggctaggatgctactcggtttgaatggagtccaatcaaaacatgtaaaaaggtcagcctgtgaacagggactcagactgtttgctgcggctttaatccactggctcctgttttttcataaaaaa

SEQ ID NO: 23184 - DNA, 2526 bp, Zea Mays
atggaggagagcgacgcggcggagggggtggcggtgcagctgatcgatggcgagggcgagttcgcggccgcggcggcggagcgattcatggcagccgcgggagtcgccggatgcgggctctcctacgccgtcgtctccatcatggggccacagagcagcggaaagagtaccttattgaaccaactatttggaaccaattttagggagatggatgcattcaggggaaggagccaaactactaaaggtatctggatagcacgttgtgttggtgttgaaccttgtactgttgtattggatctggagggtactgatggaagagagagaggagaggatgacactgcatttgagaagcaaagttcgttatttgcacttgcaatttcagacatagttctaattaacatgtggtgccatgatattggccgtgaacaagctgccaataaaccacttctaaagactgtatttcaggtcatgatgcgtttgtttagtcctcggaagacaacactactatttgttatacgtgataaaaccaggactccacttgaacatctagaaccagttctaagggaggatattcaaaagatatggaattctgttgccaagccagaggcacacaaagacacccctatcagtgaatttttcaatgtacaagttactgcattgtccagttttgaagaaaaagaggagcagtttagagaacaggttcaacaacttaggcagagattttcaaattcaattgcaccaggaggtcttgcaggtgatagaagaggagtagttcctgcttcaggttttctgtttagttcacaacagatttggaaagttatccgagagaacaaggatcttgatcttcctgctcacaaggtaatggttgctacggttaggtgtgatgaaattgcaaacgagaagtttggatgcataacctcggacacagaatggttagatgtggagagtgctgtccaatctggtccagtacctggttttgggaaaaaacttagcaatatcgtggaagttcacttgcaagagtatgacaaagaagctttctattttgatgaagctgttaggaaaggaaaacgacaacatttggagtccagaatactgaataaaatgttgactcatctgcgcatgaaggctttagaaaaatttaaagctggtcttaattcatctttggagagtggaaaagaattcgcgatatctgcaagagacaatactgaatgctctctcaaagactttgaacaaggatgtgctgatgctataatcaagcaggcgaactgggactgctctaaaatactagagaaagtacggcgtgatattgaagatcatgcactttcaattcgtgaaagaaagctatcagaattgacaacccatgctaaggagaaactaagaaaagcactagctgaacctgtggagtctctatttgatgctgcagaccaaacaacctggacatcaataagaaacatttacaaacgcgagacagaggccatcctaccggagtttctgaaaaccatttgtggctttgaaatggaatatgctcaagcagaagaaatggtatccaaattaagggattatgcccggagtgttgtgcaaagtaaagctaaagaggaatctagcaaagtattgatccatatgaaagagaggttcacaacagtgtttagccatgacaaggattcaattccaagggtctggacaggaaaggaagatgttcatgcgatagcaaaggaagctcgagctgcggctctcaaacttctgtctgtaatggcggccattcgctgggatgatgagccagataggattgaaagcatcatcacttcaacacttctggaaggctctgttgtatcaaagattgcaagtgctgcttctgctgacccacttgcttctaccacttgggaacagattcctccagagcatacaatgattactccttctcagtgcaagttactgtggaagcaattcaaatcagaaactgagttcaccattacacaagcagtatccacacagcaagctcacaggcgtggtaatagtaagctgcctcctccttgggcaattgtggccattgctattcttggtttcaatgagatcatgacgcttcttaggaatcccatttatgtgtttttgctatttgtgggctacttgatggtcaaagctttggcagtacaactagatgtcagcagagaattccaaaatggagtggttcctgggataatctctgtgtcagcgaagctcctgccgacgatacagaacctggtgaacaaagtggcagccgagcagcaggatgagcaccggcaccctcaccagcagcaccctcaggtagcagaacccctacagccacagatgcagccgccgccgctgctcctgagcccgagaagccccatgagcgagctgcggaggctgcacatgccgtcaagcccgcgcaaggtagcgtcttcctcctcgtcgccgtcgtcgtcctcctcgtctgccgtatcgtcccctaggcacgttggcgaggatcagaagccaagaccaggggcagctgcgcctgagaaccagtcc

SEQ ID NO: 23185 - DNA, 424 bp, Zea Mays
ctttaccaaaccactagatgagaaaacttttaccaaacttaggcatgagctaaacattcttgattctaggaattttgattgatgttttgcacacatcgctcatttatgtgccttttgtcacacacggctttaaggaacaaagccaggtgcatctcatacatgcgccaaagtagacaacatatataataacagagtgtataaagataaatgtcacaaaacatcagagtatttaatacatagcggaagtcttacaaaataaaagataaatataacacgaactaaggatcgtcggcgccaatgtcaattgagaaacgccacctagatcagatcgaactcctcgccttgtggctccttctgaaccacctgctcttctcctgtggggggtgtgagacagcaagggtgagctcacacatgttcatcgctc

SEQ ID NO: 23186 - DNA, 845 bp, Zea Mays
gcttagctagttagcaatcataaatattggaaagccagtttagcaatgagagagtttatcggatggcctgcccatgattcacctgtgagctctgttctttttgggccagcagaaactagcatcttcagcttaggctcggacggaaagatacttgaatggagtttgcacaatcaaggtcagattctttggtcaagagattgcagcagattctgcaatccggagagctttaaaacacgaatgcatgaaatagcattggattcaaatggcaagaggctgctggtcacctccggtttggttcgggccccaatataccaggtacaaggccatgaaagcgaactgaggacactgccgcacagttcatctatcacaagtgtggattggcatccaacactgccaatgtacatcactggatccgcagaccactctgtccgggtcacgtctatcttatgatgatctataaaacaaggtgctggcaacaacctttcccagctagctagcatgcatcaacccttattgacagtcttatccatgcgtgaggctcggtgtcacgctatttcctcgcatggaagatgagctgtgttcttgttttgtggctttggtgtgcgtctaattctgtaccctttggtgggttgctccaacatttttttttcttgttgtaaacaggcatagagttctgtggtcatttgctttaaaatgagtgatagatcaaaataagtaaactttgtagcccgtctctcgaaatctcacgtctgcatacgcagatatgctatatactgtatgtacttgtaaatgaatttgtagcccgtctcagatagtacttcgcattacaatctatcatccttcac

SEQ ID NO: 23187 - DNA, 2010 bp, Zea Mays
cgagactgttggagcggggtttctgctattctgggctttctgtgggttttcgcagcatgggcgtatgctgaggttctcttccataggaagaatactgcttctattaaaacacattcagatgtcaatctagcagtgatggatgacagttcagtcaaagcagaagaccagacaatgttattggaggagggtggtcaagcaatggctgcaaagccagcttatacttccctcacatcacaaatactcagacttatattcatggaccagttgcttcttctggagaatcgtttaacactgagggcattatctgaatttggaggttatctactttatttttacatatgtgatcgtacaaacttgcttggagagtctgccaagaattacagccgagatctgttccttttcctctactttcttcttatcattgtagcagctatgacttcctttaaggtccatcaagacaagtcatcattcacaggaaaatctgtactgtacttgaataggcatcaaactgaagaatggaagggttggatgcaggtgctattcttgatgtaccattacttcaatgctaaagaaatctacaatgcaatccgtgtgttcatcgctgcatatgtctggatgactggatttggcaatttctcttattattatgtgaggaaggatttcagtcttggaagatttgctcagatgatgtggcgcctcaatttctttgttatattctgctgcattgtcctgaacaatgattatacactctattatatttgtcctatgcacacccttttcaccctcatggtttatggtgctcttggaattctaaacaaatacaacgagattagatcagtgatggcaatgaaatttgttgcttgcttcttggtagttgtcctggtttgggaagttccaggtgtctttgacatagtatggagcccattcacattccttctaggctataccgatccttctaaaccagatcttccccggttgcatgaatggcaatttcgatctggactggatcgctacatttggatcgtggggatgatatatgcatattaccatccaactgttgagaagtggttggagaagctggaagaaactgaaatgagaaccaaactctatattaagacctcaatagttacagtgtcaatgatggctggttatttgtggtatgaatacatttataagctggataagattacttacaacaagttgcatccatatacatcctggatccccataactgtctacatatgtctacgcaacttcactcaagaattcaggggcttctccctcacactatttgcctggcttggaaagattacactagaaacatacatatctcagttccatatctggctcagatcaagtgtgcccaatggccaaccaaaatggctattgtcaataatcccaaattatccactgctcaatttcatgctgactactgctatatatgttgcggtttcccataggctcttcgaattgactaataccttgaagatggtatttgtaccaaatcgtgacaacaagcgcctctcatacaattttgtggcaggaacagccatttctgctgccctgtactttgtatcgtttgttctaattggcattgcaggatactaggaagtctagttattgcctttttctttgttcgattagttacaacaaggcctgatctactgatcaaatttaaggcgacacagcacgcagccacgcactgctaaggaacctgcaatttcattcactggagtcaggttttatctgggtttcatggtgaagaaaaaaaattgctgtgcaaggcagaagatctcgaagagtgtaacatatgagtgaaccccaatcccaagaggggatatgataaaaatatctctgtataggcgttggaacacataccgacttaccgagtggtcacgtcgtctgtgaaaatcagattttgttccttgttttgtttaaaagcttgaaatagacagaattgttccttttttttgtttaaagcgtaaaatagacataatggtctcatgcgtt

SEQ ID NO: 23188 - DNA, 1354 bp, Zea Mays
ccatcttggacttttaagacagcgctgcggctgcgctcgatcgaaccaaaaaaaaaaagaaaggaaaatccacatgcaatgcaaaagatctcgacatatatcttacgatccgatgggcctacacgctgacacgccgacgcttttgggtcttgagtcttgaccccatgggccccgcccgcccgcccgccaagtgcgcgtctgcttcggatcttcgtcaccggataagccacctgcttccgatcgcacagccctatcaactctcctcgcctgccgtcgccgcctcgcgctctccgatcccgcgcatattctccaccagtagtcctctgctccgccacacccaccactgctagggcgccgcgccgcaggcccgcagccccctaatctccgagtgctgatcacgcggaaaccgatggcgctcctcgcgccgagcccgcgcgcgctccgcgtgcgggagaccgcggcggcggcgctcccgcactcatcggcgaccgctgcatgctcgaccgtcggcggcggggcggccaggcgggcgctgtggctgtgggacaacggcggcgggaccgggacggggaggaggaaggagcaccgggagagagtccggccggaggcgtactgctgggacgtgtccaggccggtggagatggaggagatcgacagcatcgagaagctcgatgatgcgctcaggtggtccgtcgagaacaaccagcccgtcgtcatcgactggatggcaggttggtgtcggaaatgcatctacctgatgcccagaatggagaagatggcaggagaatatcctgaagtgaggttttacttcatcgatgtcaataaagttccacagggggtggtgaaaagaggaaatgtaactagaatgcccactattcactatggaaggatggagagtggaaagcggaagtaataggaggccacaaagcttgtcttgtgatggatgaggttagagaaatgatcgagaataacaagtgactaaacacccaagttatgcaatagatgttgtactgtgtttgatgtaagtatagacatcagacgatctcttcatatactaagctgaaatcaaatcacgttttagttttgtactaagccaaacttgctgatttgaaccaagcttactgaaaaatgcattaacatctacgatatcaaacaaatctcaaaatacatttcatggtgtattttattaatcttgtttggtgttttagttgtttgtgcattttttcttttaacgtggtcaaagattaaaaaaaagtttgacttatgacaaaacaaaaatggattacaattgtaacaacaaagggagtaaaatccataggatatattgtatttcaggaatcaggatggagggggg

SEQ ID NO: 23189 - DNA, 7694 bp, Zea Mays
cagcattaagctccatttgtgtctttcaaaatgaggcagactttgctggttgttccattacagtctacaacaacaacaaccaagtcattctcgtgaccaaaaattgcttcacctgctcccgtatgcatgatactcgggagattttccgggcagaagaggaaatcctgacaagtagtgcgttccttgctcacaggccctcgttgtgtcatgtaactgcaaatggctcgccaaactagcgttacagaagctgacctggagttcatgctaattgatgaaaatgcaaagccgaagcccctgccttattcacttctcgaaaagatcacaaatggtttctccggggcacatattattgggtatggtggatctgcagatgtttatgagggattcatcgggaatcacaaaatcgctgtgaagaggttgcgcataccatatcagcacgagaaggaattcagtcaagagattgaatgcctgatgaaggtgaagcacataaatgtcgttaggtttataggatattgttccgacacgcaagggcaggcggaaaagtatgaagataatcatgtcatggcagacagccaagaacggttaatttgttttgaatttctaccagcatgtcttgataaatacatcaaagatccatcatgttcacttgaatggagacagcgctatcaaataatcaacggagtttgtcagggcttacatcaacttcatgagcatgaaattcttcacttggatctgaatccgagaaatatacttctagacgatgacatggtcccaaagatttctgattttggcatctccaagtgcttgaaaaaaaaccaaggccacttttatactgaaactataagtggaacaccgatatatatgtcaccggaacggggcaaacatggtccaatcacaacgaagtctgatttgtttagtcttggtgtcacagttatcgagataatgacagggaacaaggagaacattgatcaagccactgttgaagatgtatttgctagctgcatcaaaattttcaatgataaatcattgacagctgcacaagtgcggcagataatggtatgtgctgagatagggattaagtgccgcaacagtgaaccagacaagagaccatcaaatacaaaggaaataatcgataagcttgaagaggaagcaaggacagaggaatctcaagagtctggcaagctacttaaggtcctaccaaccctactcctgtttgatttgcatcccgggaaattgatcccatgctcactgcagctaacaaacgacacggatgaacacatggcatataagcttagtataacagagagtgtggactggtcaaagtacttcacgaccaagctgccgctatatggcattgtgcaggcgcgatccacttacactgtcattctgacagtgttgttggagtgtgatgctccggtcattaacagatcttgttatatgaccctgcagagctgtacactggcatatgagtacatctggaagttcaataacacacttgagtttgaggattttcttgaggttaagaaaacagagaatgcggtgaaggaagtgaaactgaaagcatttttgtgtgaggaaggacgatcaatttctaagcaaacgaggccgcgcgtcaagctcttgtccatagtgaaaccacaaacacctctgttgtcattggatgcacacccgaccaagccctgggtcataactggtcatgcctttggacatgttcgcatttggaaccatgagacacagaagctactgtattcgtttaaactatctctgggaccagtttattctgtcaaatttattgcacggaagcaatggttcgtctccagctctgcagaaggcctcatacatgtctacagtatggaaacaaaaatgcagaaggtcaagagttacagagctcatgacggcgtcagcatatcgctggccgtgcatccaaccctaccatatgtgctgtcatggccttgttcgggcccccacgagaagaagctatggaactgggaaaagggatgggactgcacacaaacatttgagagggagtacgttgcaaggaattttgtatgtcaagttgcttttgacccaaaggagaccaacagatttgctagcgcttcgaactatagggttaaggtttggagcgttgatcttcccaaatgtaactataatctgcctggtttttttaacgaagtgaacttcctggaattcttcacacgtgatgatcaacagtatttgattattactgtctctcatgataagactgcaaaaatatgggacatgcggaacaagaaatatgtttatgatagtatggaacaaaatttgatgtctcccgtgtcttctgtcttctcacatcccaatctgccgatactacttacacgttcaattgatggcacttctcatttctggagtcccaaagatttcaggtttgaggcagtccttgactgtcgttatggaggacatgtatggggcattgcatgtttgatgggatcaaaaagaaggtttgtaattggacaagaaactgcattaacaatcctggatgttggtgaccaagaatgccaggacatgagacaagaaggcacaagttctgaggtgataaccccagggtcaagcgagcttttgcttgacgtccacccgctgacactccactttcccttccatgcccacaagttgatcccgtgcacgctgcacctaacaaataaaacagatgaacatgtggcttttaatcttagtatagaagacggaatggagtcttggcagcagatctttgtaaggatgcccctaagtggaattgtgccaccaaaatccacttacactcttgttgtcacaatgagggagctgacgtatctaccaacacaaaactttaatttgaccctgcagtctaatatatgcgaagataggtacatctattcatttatgagcctatcagaatctgatcagttttttgaggatttaaaggagataaggaatgtggcgccgcctcaggtgaaactgaaagcagttttttctctgcaaggacagacaacgtttgagaacggatcgtcaactggagaaaacttagtccaacctttaattaacatatggactttgttcaaccctgccaaggatttttctagtatgctgatctctctagatgctgatccaacagagtcatgggttataacaggtcaccgccacggtgatgttgctttatggaagcacggcatgcagaaaatgatgtctttgattaacatatcgggagaagcaagccttcctcggaatagcttgaacacccaacatgatgtttattccgttaaattcattgcaaggaagcggtggtttgtagccgggacatgtgatggtttcatccatgtgtataagtatgaaacaagaataatggactgcataaagagattcagagcatactcatctgggatcatagactggggtatttgctcgtccagagcgcttatcgttcatccaacccagccatatttgctctctacctgtgaagaaatgaagctttgggactgggacgatgattggaagtgcatacaaaaatttggtagggaacacactgattccatacttcaagtggcatttagcccaaatgacagttttgccagtgtttcaagtgatcacacaataaagctttggtgcctgaaatctcccacatcagagtgtactctgcacggccattcggacaaagtgaattgcttggatttcgtcacacatgatggtcagcaatatttgattagtggatctcaagactgtactgccaaggcatgggccttgaaggaaaaggaatgcgtccagacaatggatgttttcatgtcgccagttgtttctgtcatttcccttccggacactccatatataactacaggttcagcagatggcactattcatttgtggagttctgctaatttcaggcttgagagaatacttagccttggtttatgtggccctgtttgggatctacgtttgattgggccaacgaggatcgtgattcaaccgaacaactatgaaatatcagtcatcatggatattgacacaggttctgaggctagctcgtcagctccctcaaatgagctgatccaggttgaccccaaagagttgcgcttcccggttgcccaagaggtgtcaagcacactagagatccgtaacgttacagatcaccatgtggcattctgtatgtggtcattgaaccatacagcaaattacattccagtgccgaacatagaagttctatcaccacagtcaatgcggcaagttgttataacaagaattgcacgacgagagcctgtgccagcagaccccgtcgacgacatagtctatgtgaagggcactaccgtggttcagggtacaacgagcgcagatgtcacttatgacatgttcgatggaacaaggacaggccaaattctgcaaccggccatggagctgaatgttgttctcgtagctgactccgagatcatacacaaagcaaggttaccatgggccttagatgtgcatccaacaatgccatggataatgatggctcaaggagattaccaaattcgtatatggaactataagacacggatagagaaacctattgctatcaaggggagagaagttacttcggctaaatttataatgcacaagcaatggattctggcgggctgttctagtggacttgtctatgtgtaccgttatgaaccagaaaagaaaaaatcagtagagaaaatccgagttctacaaggacactcaaatgctatcaattccttggctgttcattcaactaagccatgcgtgctgtcagcatccaaagatggcaaaattttgatctgggactatgaaaatgagtgggagttaatgaaaacatttgatgtcaaaagtcctgtgcagcatgttgcgtttagcccaaaggactccaatatgttcgccagtgcccaggacaaaacagtaaagatatgggattggcattctggtaactgcaagtctacattgtctgggcattcagatttggtgttatgtctggattacttcagtcagggtgatcagctatacttgatcactggttcacgagacaaaactgccaagatatgggattgcaagacgaggagttgtgttcggacattggaagggcatacagatgttgttaatgttgcatgttgccatccagatcttctaatactaattacaggttcattgaacgggtcagttcgtctgtgggatttgaatcgctcaactacgttccgatatgagctcatatttgaccttggagaagtatatgctatagcaagtttgaagggtacaaggattgtgattggacacgaaataggattagcactggtagacatagacctagagggcaagaaggatggatatgtgaagagcaatgtcgcaattatggattcaaaaaatgacacagatcaaaatatgaaagagttaagcccaacagcttcctcaagtgaggtgcaaaaggtgtcaagcattatagcattggagactctatacaaaatgaagtcatcagaatcgtctatagatgtccatccaacagagacatggatggtcattacatccgacaaatatgttcatatatgggactaccatacaagggaagtgaaacagatgatggatactaagggagcgaaagtcagattggctaaatttatagcccgcaagcaatgggttattgcgggtgctactagtggattcatcttcgtctatgattatgactcaaaaaaggaaataatacacgttttgtgtaaccacacagaacccatcaagtctttggctattcacggaactgagccccttgtgctgtcagcatccgtggatggcaaaattttgctgtgggactatgcaaatgactggcatttgattaaaacatttgatgcgagaagtcaacgtttggtgcaagtcgcgtttaatccaaaggacaccaatatgtttgctagtgctcagggcaaaacagtaaagatttgggatcgccagcatgatgaatgccaatacaaattagatgggcattcacatcagatcgagtgttttgattactttagtggtggtgattttgataagctatatatagtcaccggctctcaagataaaactgccaagatctgggactgcgagaatgcgggctgtgtccagacactggaaggacatgcaggtcccgttagagctgtctgttaccatcagaatctctcgttattaattacagggtgctctgacggatcaattcatctatggaactccactaccttcaggcttgagcataaactgaactttgctgacttcggattactgagttctgtagcttgtttgaaaggatcgaaaaggattgcaatcagaagcagggaaggattagcacttgtagacatagacatagaggacaagaaggatagcgatgtggagagcatcacgactactgcttccatgaacgacacaggtccaattacagaagagaacggagtggcagcagaccatatctctgatgaccacctggcgcagggcgtagtatatgtacatacagagattataggcaaagtcaattcagcatgcaccatagacgtccatccgacaaagccatggatggtcatcactcaagctaacaagtttgttcatgtttgggactaccatacaaaggtagtggaatggacgattcagattaagggagcgaaagttagttcagctaaatttatagccagccaggattggattgtggcgggtactacccgtggattcctccacgtgtacgattgcgaatcgaggaaggaaatacgccgtctttgtgaacacccgaaatctatcacgtcattggctgttgacgatgatgcccttgagctggtgctgtcagcgtccatcgatggcaagattttgatctggagctactggcactactatcacgcacgtagacgtagtacctggcatttggaaaaaacatttgacgcgggaagccagtgtctgaagcaagtcgcgtttattgctccaagtgtccatcgcagcagcagcactatcatcgctactgctcgagacggaacagtaaagatttgggatcccgatcgttctgacggatgccgtgagttcacattggctgcggattcaggtcagattgttgaatgtttcgattggtttagtcgtggtactgatatatacttggtcaccggttctcgagacaacactgccaagatctgggacatagaggatgggagttgtgtccgaacactggaaggacacgcagatcatgttaccgttgtctgttaccatccggatctttcaatgctcattacaggttcaagggacggctcgattcgtctgtggaactccactaccttcaggtttgagcatgagctgaactttgacctcgggtctctgagttctttagcttgtatcaagggatcaacaaggattgcaatcggatatgaaagaggtctagtactggcagacatttgcactcaggaacatagagcatgatctataaagcggcataataccttgagagcgacagaataaaatctaaacattgataaagcggcaaaaatccctggcaaacatttgctgatgcgatgggattgcatccaaacatttttcttggtaagctaatagactgcaataagtttttccatggacttgggaggtgtcgatctgcggatatgcttttgtatggtttaaacatatcatcggatagaaatttatactactatattaaaaatttaatatggacatctcgtgctactatgactttatccttc

SEQ ID NO: 23190 - DNA, 1324 bp, Zea Mays
atgtacaaaatattttgtaacaaagagcacgggtcacctcgccgggatcccacctcgccagtgccgcctcgccgctctcccacatcgtgtcctccgccccttcgcacggacgcacacgcacctcacctctcacaattccacacctcacctctccgcttcgcttcttgtcgctgcggcgcgcggccatggtctccctccgcttccctaccgctgccatcccccgcctcccgccatcccaggcccccaacggcgtcgccatcgctgccacggtcgccgctgcagccgcggccgcagctgcagtagcggccagcttgaccctcacgggcaagtccactggccggccagtcccgcaccctgcccctctctgggcctccctctccctggccgacgcggcggcccccagctccgtcgaaccccggaccggcgcgacattccccaccgaggccgccgttgggcgccgcctactcggcataggcctccggaagaccagcgtcctcgggctcaagtccatcgacgtctacgcattcggcgtgtatgcggatgacaacgatttgaaacagcagctgaaggagaagtactcgaagttctcggtctcggaactgaagggaaacggtgagctgatcaacgatgcgctagagcgtgacataccgatgacggtcaggctgcagattgtttatgggaggctgagtattcgctcggttcgcagcgcatttgagaagagtgtgggaagtaggcttcagaagttcggtggacaagacaccaaagagttgcttcagagctttgttgcggttttcaaggatgaatacaaattaccaaaggggtctgtgattgagctttcgagagaatctaaccatgtccttaaaatttgcattgaaggcgaggaagtggggagcattcagagcaagctcttgtgcaagtctctcttagatctctatatcggagatgacccctttgacgaaaatgcgaaagacgacatccatgaaaatatagctagcattcttaaaagttaaatgggatgcttaaggaaggttacatggaactgggagatttttcagggaagatatttttaattccagcaatacctcgactgtgcctagtaagtagcgcacaagtttttttcagtagcgcgtgaggaaaaggatagatccttccaagtacagccttttccaagtcgtgtgtgatgttgttccacgtcctccgtgaaagcggcaaactcctggccctcatatctcgttggttctgtcagccccggagttggcaggcatgcacacaatggatgagagcgtgcatcactgtctccctctctttcccacaaatctcacag

SEQ ID NO: 23191 - DNA, 158 bp, Zea Mays
cttggccgccgcccccctgcccatctcctcctctctcaattcttacagccacaccaccaaaccctagccccccctaatctcctcctcccaaggtgccaatccttgccgctcggatcatcgtcgtggtgcgagtcttcaatcgttttggtggagggaag

SEQ ID NO: 23192 - DNA, 1187 bp, Zea Mays
ccaatatgctgcaacccaacggtttcttccaacattaacccccagcgggcagcggccgcgcactccctcagtccctccccgctcaccaccagtcaccaacgcccaccgggcctcgtccctcgtggcggcaactgggcggccgtcgctgccgccctacgccaggtgccgaggcgaccttcaggcccttggctggcgacgagcaccagtgcaccaccaggattttgcatgcaagaactgccggagacctgggcacttcgctaaggagtgtccatctgcacctatgtgcaataactgtaaccttccaggccactttgcagcagaatgcaccttacaaactgtttgctggaactgcaaagagtctgggcacattgccagtgagtgcaagaacgaggccctatgccacgcctgcaacaagacaggtcacttggcacgtgactgccctacttcaggtgctaacgtcaagctatgcaacaaatgctttaaatcaggccacatcgccgttgactgcaccaacgaacgggcctgcaacaactgccgtcagccagggcacatagctcgggagtgcaagaacgacccggtctgcaacctgtgcaatgtctccggccacgtcgcgcgcgtctgcccaaagacgactctggcttcagtgatacagggcggcccgttccgagatatcctgtgccgcatctgcggtcagccggggcacatcagccgcaactgcatggcgaccatcatctgcgacacatgcggtgggagggggcacatgtcttatgagtgcccatcggcaagaatattcgggctccgcaggctctgaagatcttttcgccaagggctccgctttgttctgatggctgagtttcgccaggatgtttcatttgtttctgacagtattggaacagttttccttctgccgttgtagttgaggaatgattctgtaggatgtgttgcgggtgaaaactccttttttcccccttttaatcaggatagccctttgtgggctcaaacattgctgtaacggctcgtgtgaaaattgccaggtcatgatttaactcttgtgctcgtgctctgctgtgtcttttgaacgcttgttttgtgtacttatactgtattgtaacgtcacgtagaactgtgaaatttgtacggtgacgttggtgatttgatcttgacaaagagatgcctgagagttgggc

SEQ ID NO: 23193 - DNA, 3297 bp, Zea Mays
aagattttgaaaacctgcggaacaaattaataaacgaaccagtagaagccaaacgaaatctttgtatttcatacacttagcttttcccctcctttttcaaaaaaaaaaaccctctcccccaactccacctgcttcgttcgcttcccttcatccccactccaccaaaccctcgcgtcgctgggactgggagcagagtagagcacagcggagcagattagcagaaggtgtcgagtggaagcaaatggccaatgagtggccgcggtggtggtagcatcctcctcgccttttctccccgtctcccgcgttctggttgttgcagcgagcgggagcgggaggacacgtgctacccccgtcgcttctcgggcacgcctccctcactcggatctgggccgcgcgcgcgagatcctgagctccgggttggagagctcccgtgctccagctcaggtgacgtcgatggagcccgcggtggctacagcgggtgaagggcagcggttcaagcggattccgcggcaggcgtggtcggggaacctcgaactgggtcctctgcttaatgaaagcttagatcactggccacatctaaatgagctggtacagtgctacaaggctgattttgtgaaggatgactgcaaatatggacactatgagagtgttgcatcaccgtctttccaaaatcaaatttttgagggacctgatactgacatagaaacagaattgcagctttgcaatgcaaggcattccaagtctgaggatgctactgaagatgatacaccaagcacctcagggaggcaaatatatgaaactgaatcatctggttcgtcttcaaaagtgcactgtagtttgtcaccattgccagcatatgaggctgcatttgattgggagaatgagaggtctttgatatttggccaaagggtgccagaaagtatacctgcaataagcaacagtggcttgaagataactgtcaaggtactatctttgtcattccaagctggattagtcgaacctttcagtggaacgatttgcttgtataacagagatagaagagagaggctgtcagaggacttctatttccatatgcttccaacagatatgcaggttgaccagggttccttggatcgtcgaggtgttttttcattggacgcaccttctccatcggtctgccttttgattcaattggaaaaggctgctactgaagaagggggagtaacaccttctgtttattctcgtaaagagcctgtgcacttagctgagaaagagaagcaaaagctgcaagtatggtctcgaatcatgccttataaagagtcatttgcatgggccatgattcctctgtttgaaagtaaccgtgcgggtggtcttagtgatgctgcttctcctagcagtcctctagcaccgagtttatcaggatcaagttctcaagatagtattgtggaccctatttcgaagcttgctttagatggaaaagtcaaccattactcaagtggaagctcagttattgtagagatatcaaacctaaacaaagtgaaggaaagctatatagaggactccctccaagacccaaaacggaaagtacataaaccagtgaaaggtgttttgagattagaagtggaaaaacttcatgatgaccataatgatgtggataacgcttctgaaggtggaagcatggccaatgatttgaatgatgctggtgacatcaataatggcagaagcaacagaagtagctttgatgggattcacagttctgtgaattctattgccattgccaaaaaagatgctcatcacaatggacacacttctaatgctgagaatgttgacaattttcaagcttttgactttcgggtgctgacccgaagtgagccattttcgcaactttttcattgcctctatgtgtacccattgactgttagcttgagccgcaaaagaaacctctttgttagagtggaactgagaaaggacgattctgacatcaggaagcctccattagaggctgttcatcctagggagcggaatacgatgctacagaagtggggccatacacagattgctgttggaacaagaatggcttcctaccatgatgaagttaaaatcagcctacctgctcttttgacaccccaacatcatcttgtgttcacatttttccatgtagatcttcaaatgaaacttgaagcaccgaaaccagtgatcattggatattctgtacttccactgtcgacacatattcagttactttcagatgtgtccttgccgattttgagagagctcgttccacattacctgcaggaaagtggaaaggagagaatggactatctggaagatgggaaaactgttttcaggttacgtttaaggctctgctcttcattgttcccaattaatgaaaggataagggacttttttgttgagtatgatcgccatactctacatacaagtcccccatggggttctgagcttcttgaggccataaatagtttgaaaaacgtcgaatctactgcattattacaatttctgcaaccaatacttaacatgttgcttcatcttattggtgatggcggtgagacccttcaggttgctgcatttcgagccatggttaacattttaacccgtgtgcagcaggagtcatcagatggggctgaaagaaatagattccttattaactatgttgattttgctttcgatgacttcggtgatcggcaagcccctgtgtatcctggtctgactactgtttggggaagtcttgctcggagtaaggagagctgcacatcaataatattaaagagaaaaaaggtccaaagtggacctagtacaagaagaccttatggaggccagaatttagagtacagaaacacacacacagtaaaaaaaactcagcagacacctcagcactagctaggcataaaactctaccacacagctagaacaggagctaatcgacctgaaggaaagacagagctttggtctccgttagagaccagaggatagcttcctctcttgctgcccgaaaggccaccaccagacttgtactgcagccatcgaacacgcacctgttcctatgcttccagataatccaagctcctaaaataaccaaagagttgaagtctttccttgctgcctcaatcactctggagcttctactcatccaccgtgtctcaaaagaatggtcttcctattggggacagaggccttgccaacatccaatcttcaagagctcaaaccagaattgtttggcaaagacgcagtcaaccagtaaatggttgattgattcagcaacctgatcacacaacaagcacctctccggatggtcaagac

SEQ ID NO: 23194 - DNA, 1970 bp, Zea Mays
ctagaaatcctaatgattcagcagcacacctgtccgcctagccgcctacgcgtacacagaaaacaatttttttgtccacacacgcgcgcgctccgagccgcagatccgagctagcgcggcgcatccgacggccacgacagcgcagtgccgtcctccgccgccaccgcttggcgattgtccgcaccccaccagtccaccacctcccccacgagcgaaaaccacggtccacggaccacggctatgttccactccaggtggaggctgcagccccggtttcgcaagccgcgccgtggtttgcttgcccacaggcggccaaaccgcaccctccttcccgctcatctcgctttggatcgattggtttcgtaactggtgagggactgagggtctcggagtggattgatttgggattctgttcgaagatttgcggaggggggcaatggcgaccgcggggaaggtgatcaagtgcaaagctgcggtggcatgggaggccggcaagccactgtcgatcgaggaggtggaggtagcgcctccgcaggccatggaggtgcgcgtcaagatcctcttcacctcgctctgccacaccgacgtctacttctgggaggccaagactcccgtgttccctcggatctttggccacgaggctggaggtatcatagagagtgttggagagggtgtgactgacgtagctccgggcgaccatgtccttcctgtgttcactggggagtgcaaggagtgtgcccactgcaagtcggcagagagcaacatgtgtgatctgctcaggatcaacaccgaccgcggtgtgatgattgccgatggcaagtcgcggttttcaatcaatgggaagcctatctaccactttgttgggacttccaccttcagcgagtacaccgtcatgcatgtgggttgtgttgcaaagatcaaccctcaggctccccttgataaagtttgcgtccttagctgtggtatttctaccggtcttggtgcatcaattaatgttgcaaaacctccgaagggttcgacagtggctgttttcggtttaggagccgttggtcttgccgctgcagaaggtgcaaggattgctggagcgtcaaggatcattggtgtcgacctgaaccccagcagattcgaagaagctaggaagttcggttgcactgaatttgtgaacccaaaagaccacaacaagccagtgcaggaggtacttgctgagatgaccaacggaggggtcgaccgcagtgtggaatgcactggcaacattaatgctatgatccaagctttcgaatgtgttcatgatggctggggtgttgctgtgctggtgggtgtgccacataaggacgctgagttcaagacccacccgatgaacttcctgaacgaaaggaccctgaaggggaccttctttggcaactataagccacgcactgatctgccaaatgtggtggagctgtacatgaaaaaggagctggaggtggagaagttcatcacgcacagcgtcccgttcgccgagatcaacaaggcgttcgacctgatggccaagggggagggcatccgctgcatcatccgcatggagaactagatttcgctgtctagtttgtgatctggcctgggcttggggttaataaaagaggcaatgctagcctgccctttcgatgaggaggtacatacacgctggcgatggaccgcgcttgtgtgtcgcgttcagtttggcttttgccaagcagtagggtagcttcccgtgtcggtaattatatggtatgaaccatcaccttttggctctacatggtatgaacgtaagatacaaattccaactacctctagctcgcttgtgtggtatctgtatcagtattcatgtgtttgtttgcttatgtgtttgtttgcttgtatttgctggtgcttgtatcgcgggatgcaatgagttgttgtttggttgttgtcaaccaggctctatgtgtgtgtgcgaggtgtgtgtttggtta

SEQ ID NO: 23195 - DNA, 2211 bp, Zea Mays
ctcggtttgacccgtgctcggattattacgtgaacgcgtacctcaacgacccggacgtgcagagggcgctccacgccaacgtcacccgcctcgaccacccctggtccgcctgcagcgatgtcttgagacgctggactgacagcgccacgaccgtcctgcctattctcacggagctcctcaacaacgacatcagggtctgggtgtacagtggagacaccgatgggagagtgccggtcacttccagcaggtactccgtgaaccagctccagctcccagttgccgcaaaatggagggcatggttcagcagcactcaggtgctctactctcaagcaagcataaacgcagtgcaaacattcttagtctgaacaacatacggtgtttatttcttttctggcacttcgtggtgaccatttcagtacgtgtttacggtatgacgaactgaacttctcatctcagggcgccggagaggtgggcggctacaccgtgcagtacaagggcaaggagaagggcagcctcagcctggtcaccgtcagaggagccggccacgaggtgcccagctaccagccaaggcgagcgctcgtgcttgtccagggtttccttgcaggcaaaacgcttcctggctgcaaaacgtgcgagtcggcttagcggttggcagcactacagcaacatgtatctgagagcgagggagagaaagcgaaagggaatcaagccattggaaacacacgcaccttgcggatcatgtaactgcaggtctgcaaaaaaaaaaggcaattatacagtcatagtcacaggcagagaaatctgtacacgaaataagtaagtaggttatgttccatggtgtatttagtgtgctaatttgatgccataaatctcagtcgtgcaggtgcatcagtgctagcgaatcattagaaacaaagaattttcacttccccgccaattcctttctttcttcgaacaataacggggcgtttggatcccttcattttaaaggaattggaattcactcaataaaatgatacagaaaagaaagaaagaaaaaggacagctcttgcgcaaagcattgactcccggattcttgcaacttttacaagatcagttagatatgcaatggcacgcttctacatttggatggccacaacaatggtggaaacgtatctgatcttgtatataaatcataacaatccactaatcttgtgggaggtgaaatcagcctatttgtttattcttccccttgcctctctatgtggtttacagttggggaacctgtgcctgttaatccctgcatcttcttgcagacatagacataatgggagtcaggatcctctgggacaaatccatcagggagtctacccctctcggtcagtggaacaggatccagtacacgcctcgttatctttccagtgaacacaggtcttgctgcaatacattaaaacagcactgatgaagccagcataaaaaatattcacttttttttactcagcaggcttttacacagctatctgtttccatcttatcgtaccatcatttatcctcatttttgtatcgctctgtggggtactatggaccactaattctactaacagatgacattcttttgaagtaaatttcttgcagcaccccagagttaagtgaaatgaattacacatattagtcattttatgtaacagaacagacaatatattcatgagaaaacagaaagaacaactcagttctcacttcaactgcattgcacatgaaaaaaaggcaatattgtactgttatatcacaatacaaaaggaaaaggaaacataccacattgtacaaattttactgtcagttggacaacatatatgtctccaaagcaaggggtaaaaactcaaactaaagtttgatacgtacgtagaatataaagtacaactttccagtcacatgctgattgattcaaatgaggcattcgtaccgatggatcaccatatgttatctacaagttcacacacgaaaattgggtcaaaatgcataccagggtttcaacattgttgatgctgggctgtgtatgtgactaaggcccataggcccatgactaagaagaggaatggagaaataatctagaactcagacccaaaattgtcctcaacagcactactttcagagcaaatgtacaaaagtgcgtaccaaaataaaggttcctcctggtttaagaagcctgcaataaaaaagtataactgataaggc

SEQ ID NO: 23196 - DNA, 2259 bp, Zea Mays
taaccctaaaccagggttgggtgatgtattataatagaggatttgaagccccgctttcatgcctctcgattgcatggatcacaaactggagatgatgatgatgatgatgatgctgtaaatgtctggaacctgcggaagtgtagtgctgctgggttggatgttctctctaatgtgtttggtgacagcatccttccaactttaatgccattgattgagcaaaacttggctcgaacagatgacaattcttggaaggagagggaaactgctgttttgtgtctaggcgctatagcagaggggtgcattggtggtctatacccacaccttcctcagattgttgccttcctaatcccacttcttgatgataaatttcctcttatacggagtattacgtgttggacgctctctcgatatagcaaattcattgttcagagccttgatcatccaaatggacgtgaacaatttgataagattctcatgggattgctaagaaggatattggatactaacaaaagagtgcaagaggctgcttgttcagcgtttgcaactcttgaagaggaagcttctgaagaattagtaccccacttggaagtaattttgcagcacctcatgtgtgcctatggaaaataccagagacgaaatcttcggatactctatgatgcccttggtaccctggctgatgctgttggagcagaattaaatcaggcaaaatatctagatatatttatgccgcctttgatcacgaagtggcagcaactttccaattctgacaaagatctatttccactccttgaatgctttacatctattgcacaggcattgggaccaggatttgctcagtttgcggaaccagtgtttcaaaggtgcatcaatcttatccaatcgcaacagttggcaaagattgatcctactgcagctggtgcggtgtatgatagagaattcattgtttgttcgttggacctactgtctggacttgcagaaggtcttggcgctggtattgaaagtcttgttgcacagagcagtttgagagatctgcttttgcaatgctgcatggatgaagcagctgatgttcgacaaagtgcccttgcccttcttggagacctttctagggtttgcccaatacatttgcatccacgtcttcaagaatttcttactgttgcagcaaagcaactgaaccctcagtctgtgaaggatgcggtatcagtagctaacaatgcctgttgggctattggagaattagcaatcaagattggcaaagaaatagcacctgtggtgatcaccgttgtttcgtgcttgattaccatcctaaaatccccagagggtttgaacaagtcacttgttgaaaatagtgcgatcactcttgggaggcttagctgggtctgtccagacatcgtggcccctcatatggagcatttcatgcaagcatggtgcagtgccttgtgcacgatcagagatgattttgagaaagaggacgcgtttcatggactgtgtgcaatggtggcagcaaaccctacaggagccgctggttcattagcttacatctgccaggcctgtgcaagttggactgagataaaaagcgaaggtcttcacaatgaggtgtgccagattctgaatggctacaagcagctgcttggaaacaacggtgggtgggaacaatgcatggccgccctgaaaccagacgttgtgcagaaattagctagatacggagtatgatgagaagcaagctcgtgtggtttattcacctcatacaccgaccatcatctttatggcggagacaagagaggagcagaaaggggtgggggtcgtcgagagtgtctctgctgctgatgcatcatctttacatgtgtggcacttgagagtcgattcggttcgttggtacgccattgtccgttcgttcattgttatactggttggtgcacagcatttccagagcgagagtaggatgtcttggtaaaccccccatgtgtattggttggttgggccagtggacttggttttggtttttttgtcattcctactggcaaacacaacaaggccaccaccctcttgctcgccccaccccggcaacattgagaaaacagaaaggttttgtagcgtgtaattctctctcttttcttggtttcttattattattaggtgtaggattgttttcgagtcttgtttggcaggaagggtttgtacgagaaatcaattgattgctcactcaccacaaaataataaaaaagatcgatcgatggggcttgtatctcctgcgactcttcc

SEQ ID NO: 23197 - DNA, 1033 bp, Zea Mays
cttcgtccttgtaggcgctactccagaactcctttctcaagtgaagggacacttggatgcagagcttaatgatattggaaggcagcaagctgttgcggttgctcatcgtctttctaaagaagtgaaaccagttgccatatactcttctgatctgaagcgagcagcagagactgcgcaaacaattgcaagaatttgcaatgtgccaaatcactgagagaaagacacattggagatctgcaaggcatgacgcttcaagatgctgctacagagaggccagaggcatacaaagcttttatgtcccacaagagaaatcaacaagttcctggtggtggagagagtcttgatcaactgtcggagcgatgtgtgtcttttctgtacgacattgttggtaaacacaaaggggagcgagttatcctggtttcacatggcggcaccatcagagagctctacagacacgtgagtcccacgaagccgctccacggcaaaatacacaacacgtcggtgagcgtcatcctcgtgtccgacgccaccggccggtgcatcgtcaagatgtgcggggacgtcagccacctccaggagacgggcgtcctggagaacgccttcggtggcgacaagacctccgcctgagattccaacattcatcacgcgccgagagctctcggcaattatcacgcgccgagtgagcgctcgtttcggccgtctttttttccactgtaccaatcatcctgttgctaccagtagtggtctagcggagaatgatgcacacttccccccgctgggaacgcggcgatttttgctggaacagttgaaggccgagccggggcgaatccttttggcctggccgtgcactgcttgctgaactgcacgtacgcatgtggagctgaaacgatctgcgttcgctcatgttcgtccacatccgtggatcatgggtctattctgttcttgcggctgtttgcgcactgagatggcggtgccggaccggatgcatggcgtgcgatcgggcacgacggctgccccttccccgggtagggac

SEQ ID NO: 23198 - DNA, 3080 bp, Zea Mays
aaaagccccaatccctccatcccacctgcgtaccactcgtgtgctcgcaaacaagcgtccgagttcgaggcgtggcggcccgttttgcatgttgcgtttgcatgccgtagcagctctgctgccgatgttcctccccttccgaacccctcgccacctcctcgtctcgtgattcgaatcactgccccgctcccattgcgaacgagccagccgccacagctgttgccaggctcaagcggaagggctcgggttcccagacgtgccgggcgatcgatcggagagaggcggcgactcgggatcgggcgtgaaggacgtcgacgcgaaatggattggctgggcgggtgtcaacgtaccagatgagattggccagcgagccctcaccaaagctcttgcggagaagaggtgcataccggtgttcctggacgaggagattgtgcaccagtactacaatgggtactgcaacaacatcctgtggccgctgttccactatctaggactgccacaggaggacaggctggcaacaacgaggaactttgagtcgcagttcgacgcgtataagcgtgctaaccagatgttcgctgatgtcgtgtaccagcactaccaggagggggatgtaatctggtgtcatgactaccacctcatgttcctgcccaagtgcctcaaggaccatgacatcaatatgaaggtcgggtggttcctgcacacaccattcccgtcatcagagatttaccggacacttccgtcccgcttggagctgcttcggtcggtgctatgtgctgatttagttggattccatacttacgactatgcgaggcattttgtgagtgcttgcactagaatacttggacttgagggcacccctgagggcgtggaagatcaaggaagactaaccagggttgcagcgactctgatcgtttcaagcgagcattggagcttccggcagtaaaaaggcacatcaatgaactgacacaacgttttgccggtcgaaaggtaatgcttggtgttgatcgacttgacatgattaagggaattccacaaaagattctggcctttgaaaagtttcttgaggaaaatccagattggaacgacaaagttgttctactgcagattgctgtgccaacaagaactgacgtccctgagtatcaaaagctcacgagccaagtgcatgaaattgttgggcgcataaatggtcgattcggaacgctgactgctgtccctattcatcatttggaccggtctcttgatttccacgccttatgtgctctttatgcagtcactgatgttgctcttgtaacatcactgagagatgggatgaaccttgtgagctacgagtatgttgcatgccaagggtctaagaaaggagttctgatacttagtgagtttgctggggcagcacaatcccttggagctggcgccattctagtaaacccttggaatattacagaggttgcagactcaatacatcatgctttaacgatgccatccgacgagagagagaaacgacacagacacaactatgctcatgtcacaactcacacggctcaagattgggctgaaacttttgtatttgagctaaatgacacggttgctgaagctctactgaggacaagacaagttcctcctggtcttcctggtcaaacggcaatccagcaatatttgcgctctaaaaatcgtctgctcatattgggtttcaattcaacattgactgagccagtcgaatcctccgggagaaggggtggtgaccaaatcaaggaaatggaactcaagttgcatcctgacttaaagggtcctctgggagccctctgtgaggatgagcgcactacagttattgttcttagtggcagtgacaggagtgttcttgatgaaaattttggagaattcaaaatgtggttggcagcagagcatgggatgtttttacgcccgacttatggagaatggatgacaacaatgcctgagcatctgaacatggattgggtagacagcgtaaagcatgttttcgaatactttacagaaagaaccccaagatcccattttgaacatcgtgaaacatcatttgtgtggaactacaagtatgctgatgttgaatttggaaggctacaagcaagagatatgctgcagcacttgtggacaggcccgatctcaaatgcagctgttgatgttgttcaagggagtcggtcagttgaagtccggtctgttggagttacaaagggtgctgcaattgatcgtattttaggggagatagttcacagcgaaaacatgattactccaattgattatgtcctgtgtatagggcatttccttgggaaggatgaggacatctatgtcttttttgatcccgaatacccttctgaatccaaagtaaaaccagagggtgggtcagcatcacttgaccggaggccaaatggaaggccggcatcgaatggcagaagcaattcaaggaacccgcagtccaggccacagaaggcgcagcaggctgcatccgagaggtcgtcctcatcaagtcacagcagcactagcagcaaccacgactggcgcgaagggtcctcggtcctcgatctcaaggccgagaactacttctcctgcgccgtcggaaggaagcggtccaacgcccgttacctgctgagttcgtcagaggaggtcgtctccttcctcaaagagttggcaacggaaacagctggcttccagtccagctgtgctgattacatgttcttggataggcagtaaatagattggagcctccgtgctttgccagacaagcacactggagaggggaaaaacccattcattcctcaaatgcgcgacggagttacacccagcgtgttgtacaatcctgtacaaaatttatgctcgtgataaaactgcgagagggtggagcaaatggaaaaggataaaattagtttagatttagatagtttcgttgcttctggtacacaatcgacggctttttttatttctcattacaaattttttgagatgcgcttttgaactggttggtattgttcacatctgaaatacgcctgcgccatgagacatctcatattcttttttatctcagtaactaacagcacataacacgacaaaag

SEQ ID NO: 23199 - DNA, 563 bp, Zea Mays
ggatcatcaccctaggtaatgaatagagtatatatatatatattatcctaacaattcagatatctactttcatccctgattccctgttaacatccactatgctcttcattacaccatagtataattttgttgttatcagtagaaacctagtgcaggaatgtaaacgggagtataaactagtcagattcttacaatcagtaaacctgtttcctgctatcttttgctttcaaacggtgcaaattgcaaaaacagagcaaaaaaaaacttttaagctgagtgttgctttgtatatgtacgccgaaatggtccggtatgcacaagaatgttgttgatcactctttgtttgtgccgaggaccagggatttcagttctggcatcagcctttcttccagatcctccttcctttctcgcattcggtctgatgtgcaatcttcttcctacaggacaaatacacggtacatgttcatggtttcactgtgttcccatctagaagattgtacattgttccaacatcatgttcatgcatgaatattgaataaaagtgcagagtaacgtacgttggc

SEQ ID NO: 23200 - DNA, 2702 bp, Zea Mays
cccaatccggccgcctcgacggatttcgactgcttccagatagctcggtcttccgataatagcatcgctcgcgcgcctccgtttgcttcgcattcttaaaacctagcatatgatttgattccgccagctgcttggtccggaaccgaggaggtggcgagggagtgggggtcacccggccatggcgacgatggacgcacgactgcaccttccacgccctcgccgcgctctacggcgtcgtttcattcctagccctagtaagccgaatccccccgcacgttttttgtttttttacccacctcctgcttagcttagcttgcaattggggctccgctttggtttggagccatgagttaaggcggggacgacggttcgttcaggcggagacgagccaatgtgtgtattcggtattccaaatacggttgatacaaactgaggcagacaggcagtggttaccagtctcattagctcatttgatgtcaatttcgccagttccaactgataagaatcgagtgccgggttcctgagtatgggtggacaacggcacaacgcagaagctgttccatttcctaaacgtcattgtcaatggtggtgagtacgccattctcctggtcagaatctgtgcttgcgggaacttgcaacttgtgcacattgagggttagtttgggagccataaaaccgaagggaattagagggggcgagaagccagattctccttcttattcaattttgaataataaagagaatttagtccatctaatcctctccgattttctcgctcccaaactagtcccgagggtttgagtaaggtggcaaattttatttcgcttctattagctggttggaacaattgcggtaatgtgtatcaatactttcttgtagatatttcaacctgtgcttattgatttgcctggcctagcattcttcacgtcctacactttgctagtgcttttttgggctgagatttactaccaagttaggtttcagttcaacagttcattttctcactgatgggcttataagagcatgtactcgccaaagaacaggtctctttttttcagcatgtcaatggctcttggttcttaaaaggttgataagatgttttaagtttgcacctattcttaatgtgtgctaacaaaggcaaggtacacggtagttaatcctatttaaacaccagtttgcattgtaggaatcgtcttctattttggtgcttaaagatacgtcaacattctctccctttaaacaatcatgtataagcaccttgcatcatacatgtcctaacaagttttgattttttttcttgtatcaacttttatgtcaaaggattaattttgcagtaatcaatctgttgatgatgtaaagtgatcacatgaaaaaatcagggacgttgttatagtttagagaacattatcacgaatatggttcaagtgttttcgtttttctggaacaacagaggagagatgggtgctatttcatttaagagggaagaaataatataaaggagatgatgtttgaatgctagtttggatcctagagactaattttttagtcccgtcacatcggatgtttgaatactagttagaagtattaaatataatttaattacaaaactaactacacatataagcactaaacagtaagacgagtttattttaaacctaattagtccatgctttgctcatatgatgctacaataaaaatttgctaatcatgaattaattttgcttaataaatccatctcgttgtttagtcttcatctatctgttttttataattagattatattcaatatttataattatcattcaaacatctgctatattttgtaattaactaccgccaacagtggaaacaggcaaggcgcaaggcacggaccgtcagccgttgctaatcatgcggtccataccttgcgtccttgccagtttccactgctgctggcggctgggcgtctggggtgatcggtgtggcctagttgttgcgtcgatcttggactcttggtcgattctcacagtaagagggagccgtgcgacatggacgtcacggcgtaaacacagagtatttgcaacgccagacgtagaacaggaatcacattgctgatttcttgccggacgagaatcagaacagaaggcggcactgggaattgcttgtgatcgagagaacgtgtgataggatcatatggttggctatttcagaagagtcggtggcgaacctgcagctgctcgtgagctggaaacttgcgaggcattcggggtgtgccactgtgcgcgtaaaagcgcgcacctgtctgtgtgatgatcggtcaccccccaacccagtcccagatgacaggacgaagcaacttgagacaagcgtaagaagaacaggttggccttgtccggcaggaatcgcggccggggcctcccggaatgattggcacgtcgaccggccggccgggaacacgggccagtcggcgtccgcacgcccgtgcgcggacgccaggccgacagacagatcgaggctgcgcagcgcagggcaggacagcgccggccggccaccacccgtccgggtgggccatggactgcaacgtacgggtgtgggccattctccttggaggaagccggagtggaggccagagaaacaggcaggcagagatgggagtctggcgcggctccgtcgacagctcgtcaaatgtcgagttggaccgagtagggaaaaaaaaaacgttg

SEQ ID NO: 23201 - DNA, 1103 bp, Zea Mays
cagtccaaaatggtcaaatacgagtgaaagttggagttatctaaaacaatttgaaagacataaaacaaaaaaacaaagatgagaaatatccatggccgtatttgaaaaccaaaaaaatggcccttccaactgaaaaatcgctgaattccctgatgctggtgtgggcgcgtcggcaccttttgccttcgcaaacctgatgatttttctttcatgtagactgaacgcgcaagtacaaattaggaaatatcagctgcatctagatcctggagaaagaactacgatggcaggcaatcatacaaggattcactaaatggcacaacggcaaatgtgcaaatcaagcagctaggtgaaagagggcaagtggtagcatacagcatgctacccacgaaagtactactacatcatacccatcatagcatgttcgaatacaacaaccaaacctaagctccagcttgaaagaaagccaggtccagagacggtacaatatgcagcagggtccaagatcaccttactcgtcatggacctcctcctcgtcctcgtactcctcctcatcggcagtggcatcctggtactgctggtactcagacaccagatcgttcatgttgctctcagcttcggtgaactccatctcatccatgccctcgccagtgtaccaatgcaagaaagctttcctcctgaacatagcagtgaactgctcgctcacacggcggaacatctcctggatggaggtggaattgccaatgaaggtggaggcctgtccaccctggatgtggagaatctccctcatggctggatcttggctggatctcaaggttgctacctataggtgagaagggagcggaagggtggtcactggtcagtagcgagaaaatgttggagatattagtccaagagagagtggagaaccagatttacggagaataacaagctccggcacgaatttaaacagatccgggcacagcatggaaaaagtgcaaataaaaaagaggctcgtagaaaaaaaaatcatttgatgtagctccacaaggcaagggaggagcagcttgagatctatctgaaattctattagaatatctcagtgaagcggtttcacctacgaacaa

SEQ ID NO: 23202 - DNA, 740 bp, Zea Mays
attttatattttaaactctactttatacataatacaatataaaacagtgtattttacacgaccatatatacagtctgctaaacatgaccttaatgcgcgcaaaaatatattcagccaaatgttctcttcgacggaaacgtgaaaaccatcgtgtatcgtggcatcatcactgcactcgaatgttagctgccaggttattgctacaaacaggctcatagtggtgcatgacacatccgactaagaaatgctggcaacggattgttaatactcgaatctgtagcatcaggaataggttcagagctggttgcattattgtagggcaaacccatgcttcacaatattcagcaaatcacataacggtggtttacaacaaggcagtcacaaaaaaaccatggtaaataagtttccccctgcttctctctgatggaaaggagatatagatctcagatcatattcatcaaagtgccttgtcaaacagacaaaaaaccttctatggtctatcaccaagctcagctctcaagttgtcgtacgggtagactttgggagtctgcaacagttggacacgtttaggttagctcaatcaataaaacatgtcaagaaaagataccgattctcaagaaataacatgaattcagaaatcataggacatacacattctttttacacgttgtgaaacaggcatgcctttgtacacaaggcccttttgcagaacagagtaaataatacattttgggtatggg

SEQ ID NO: 23203 - DNA, 807 bp, Zea Mays
cctcgacttggcatttttttttgttttcaacattgagcaaggtctccctgttctcccggagtggctaagcttcaaccgactgacagcacgcttgaggcagggctatgaaattggtcctgctaggcttcttctaagtgcctctggaggtcacatggagggaaattttccacctcatgaagcatttgcaattggtgggacaaatagtgtaagaggatatgaagaaggtgctgttggctctgggcgttcttatgctgtaggtagtggtgaagtgtcatgccgcatgtttgggccactggaaggcgtggtctttggagactatggtagtgatcttggttctggtcctaaagttcctggtgacccagccggagctcgtggaaagccagggagtggctttggctatggtgttggcgtccgcgtggactcccctctgggacctctacggcttgagtacgcctttaatgataggcaagcaagcagatttcactttggtgttggctacagaaattaacatgtatattggtcacattctgattcaatcttgttcttctgagcattttgggctggtagaaactagtgccatgccttccattttttggcgatatcaaagcaagttttgtccagatcagatttcattttttttgtaacatatagttcctttacttctgttgagtgttcttcatctagagaaattaaatggacccttactggtaggttttacctatctgaagcaatgttttcaggtcgggcgaccaactggtcgttccagaggaccgaccaggcgcctaatcacgattagggcgacgatta

SEQ ID NO: 23204 - DNA, 4108 bp, Zea Mays
tcgccttccgttccctctccagcaccgcaccacagctagcccgcgtgtcccccaatcatacgtaccaccgcgggggcgtgtccgcttgcatcctcctccctcccccgtcccgtctccaccctccacctcctctcgcgtccgccccgccgctcgcggatgcgccggcgcgctcccacccccaaaccctagcctcgatcccgatgggcacgccccgcgcggggtccccggcgtccccggtcaccggcgaccactacctcgacctgctcgtccgcttcgtggcgcgcaacgcgggcgcgctgctcgacggcaccgtcaccctccgcctccaccccgtcggactccactacgtcgcctcccgcctcgaggcgctccgggagctcgaggccgtgggcgccggcgccccagtcgactacctccgcgcctacgtcgcggaccttggcgaccaccgagcgctcgagcagctacggcggatcctgcgcctcctcacctcgctcaaggtcgtcgccccggggccccgccgcgaccccgcgccgctctcgatcctgcctttcgcgcgcctgcgcgtgctcgagctgcggggctgcgacctctctacctcggccgccaggggccttctcgagctccgacacaccctcgagaagctcgtctgtttcaattctacgaattggaaatcctcggcactctacctctgttgcaaaacctctggttggaaggcaacccaatctgctgtgcccggtggtatcgagcacatgtgttcagtttttttcgtaatccagagaatttgaagctagatgataaaggtatgaacacacaagaatactgggaaaagcaagtattgtttgcatgcaggcaaaatcaacctgctggttatggattttattttcctgcaattgatgatcatgaagatgaagacatattgaatttgaagatgagaaaattttcccgacttgtgagcatagtggaggaagagagaaatctctgtgatggtgtagagcagcagtccacccactgtgatagtgacagttccaagaaggatgaaactgcagctgttgatcatgacctaataattgcttcgttgataaacaccgccgaaatgctgaagaaagaaaagtcaagtaattggctttgtgaatttaaggagtggatggatgacaatacagagaaaacagaaggcgacaacctatctgttggcttaactaatggcaatgggaagtatatcaaacaaaagaaaaggcagaaagcacacaaggagacttcaaataacatgtcggatttggtacaagtttcagaaggtggtagtagctcaaaccttttggaatcagattcatctttcacagataatgcattttctggttcaaatggagtcatcaaacaatcctcaaatgaacttaattttgaccaagatcatctaaaaatgcacttgaattcttttcaacgacctcctcctctagagttagtagccacttcacaaactgaccccttttctgagttggaaaatggctctagaaatatgctggcaaatgggacaccatccaatacaatgagcaagttaatagaatcaagtccaccccatacatattcaagtccacagtcacctccacaatacaaggaggacattctacatcgaagactttttatggaggaagaatttttgcagatttcaggacatcttcattctattggttcacttggtagtggtagcagctgcagcgatggttcttcgagtgattttggttcatgcaattctgaagatgattatgaagaaattcagacaaagatggagttgtctcttaatggccagatggttttatttccttctgtaaatggtgatgatcatgaggcgaataataacttagagcatttttcaggggagaatactttgtctgaccatccagaagaaggtgagccgagttgttcagatcacagagagtttgatattgaggagttccataacagtaaccagagaaatggccatctagggcattatttaggccatttaattgggcaaaaaggcaaggagaagtttaagtggagggtatttcctttcaagaatcataatggtaccaaactagaaaatccaaaaatgaatgacgatcaggtggctgagcatgttttagttgaaggaaatggccagttgacatgcaacccaagcaaaagtactcacaaggaaggctctaaaagtcattcttctaatatccttcataagaacaattcatctgtttgcacaattaacacaggcgaacacaacactcttgaggatttcttcaacttggaaatagcggacaaggatgggtttgaaacatgtgaacaagtagcttgttgcgcacacatgtttcaggattcaagtggtttagttcaaagagaggtagccttgctgcgaagttctcaaaacaaattgtatctgctactacttgatatggtttttgatggacaagaaatcatgccaagaattttgggcagctatagtctgcaaagtctagaaaaagtttcaattgggctgggactacaggcgctgagagtacacatgtcagatgatacaactcatctattcatcacaaggacttccaaggaagcgcaagatgtactttggctcttgagcgtaactaacttccccaaattaaaccacaagatacattttcaaagttgggagaacatccaagtcaaattgttcgagaaatgtattatacgcagaactgcaaatacgggaatatttctctactctatgttgatgttctggaggaatgacgttgaagaagactccctttttattagatccatctttgtcattgaaggctccatattggtgtgcattgaggacctagatcagtttggtggtatcccttatgattcaaatcccccatacttttcccttgatgcatcttgttctattagcaatatccgagaagtggtcatggatcagcgcaacaacaaatgtttgacattgattttggataatggtaggccaggagagtttcacaatagcatccaaaatcctcaaaacaagcagtctgaggaaatcggcacagtacatacatggaaacttaagtggttctctgaagaagcgtctctgaagttcatttctgtaattaaggctctctcctcgacagcagcaatttcgtctttacatgtaaagtgtatatcctgatgatgtcggttattgtagttctacggtgatttcattcattcttttgtggtttgtccatgtagctgttaatctgtacagtttgatagttgggttctaggtttgtgtttgctgtattctttgtagttattagatgattttcccaccctgaagttgtacagaacagagctagaagtgagtgtaagtgaatggggttgcagttttggcaacgggcggtttcgtaaagttggttcaaaacctcaggaggcgcgatggtttgatcaggaaaggaactcacgcgacagattgcgaagaatcacagtttagcagctacggcaaacaggcatatgaacaatgggactcgcatgctgaaactacaattacctatcggacctgcgtagtaccttcaaacttctgtgtctattttgctaccgctatttgaacagggttcaacctctgcttccccaccgacggcacatttattcatcatcgccagcatgtgaagccgtgacgggatcggcggcaggccgacatcagcgacaccttccagctgctgcacgacgagccccatggtcggccggtcgccttcttcatcctggatgcaccagcacgcgaccttgcagaccctctcgagctccacgttggcatccccggcgatcttgtcgtctagcagcccgaccacgtcccccgcgtgcagcctgacggcggcgtgcaccgggaagtacacagcggagttggaccctgtctccgaggagccgttgttccggcgtcccgagatgagctcgaacaggagcaggccgaagctgtacacgtcggccttggcggtgatcggcgcgcccgcgagccactctggcgccagatagcccatcgttccccgcatggtggtcagaacgcggctgaagtcgtggccgacaagcttggccatgccgaagtccgcaaccttggcgcccatctcctcatcaaggaggatgttctctggcttgatgt

SEQ ID NO: 23205 - DNA, 2050 bp, Zea Mays
cgaatatccgggcatccggcccaggcatgaacggtcggttaaaccggccaatcctcctctcaagcctcgacgcagcacggcgcgccggcgcgggacgacggcatgacgccgccgtccatcttccaccaccatcgctgcctcgtctccctcccctccgcttccccgacctggacctcgtcccgtcgtctcatccatcaactcgcaaaacccacagtcctgtccctacatctgcgtccagtcttatcctcttccttcgcggttgccgccgtcggcgacgacgaggatgtcgtagtcggggattgcctcgtgttcgacgacgacgctttcgaggaaccggacctggacctcccctcgtccccgtggccgtcggctagcgcctcacgccacggccggaggtcggaggcaggcgagagcgacagcctggtgccggagaggtggaggcatgccgaggaggagatcaacctgacgaagaaggataagcgccgcatcgcgcacgggctgcggttcgggagccgcctcgagcggcgggcgcccccagctgttgctgctcctgatgaattccgcgcgtaccgcaaggggatgctgagcgctgagcgtgagcatgtttctcatgtataccgggggccgctggagaggactcctccgccggaagtgaaggaacatccaccgccggagccggagcctgggacgcgtgtggccccgaggaatccgaggatggggatgggcgttggcacccttgacgacattgatgagtttttcagaagtagggaatatgttcaggatgagatggaggacagcaagagtcctaagggccgtcagaagttgttctcaaatgaggagaagattcttctgaacaagcgagtgcctgatctggaaacagctacttctagtaaatggcttccacttcacacccttgctgcatctggtgatttctatctattgaatagccttttaaaacataacgtggacataaatgcgcttgataaggatggcttaccagcgatccacaaagcaattctttcaaagaaggctgctattatcaattatcttttaaggaactcagcaaatccattcatccaagataaagatggtgcgactctaatgcattatgcggtccaaacagcatgtagtcagaccataaagacacttttactgtacaatgttgacatcaaccgtccagatgattatggatggacacctttgcatcttgcggtacaaacacagaggactgacattgtgaagctgcttttaataaagggcgctgatagaactattagaacccaagatggattgaccccgttggagttgtgcctccggttgggtcatgatgtgcggacgtatgagcttatcaaactacttaaaagtttccgaggacaaaagcagcatgatttagtttagcaactggagggtgtgtgaccctctttgaaccagtgaggttaaccagtgtggtggccttctgggaggccagttttcaatgtaccattcatgattcatggaatcgctcctggtttgagataggaaatagtttacccctagaactggaagcaaacgagcaaaccaggttacagtcgagccatgagaacgggatgaataaacctttctgtaggttggcgctcttcaattattagaggtgaggcgaggcatatgctattcgattattagaatggctctctcttgtccttttggcccattgaattcgtgtttgtgagagccattgatcctggcccacttcacgtggctgggctacgaatctgaactaaatttctggcccgccaacatgtaatgggtcaggattgcaccatcccaaacaggctgttcgggctcgtcaaaaaccgacctttatatgctatgaattcttgttccactaacctatcagctgctgacaattcagctcagatatgttgggaaacgttgatcatgaactaacaagaacgaggattctatgcactcttgtatgcccgatgcaacttcttttgaaatcagggtgaaatggggcaggaaatcaagtcacagcaaggtgagcaggccggaccagaagactggcaagcag

SEQ ID NO: 23206 - DNA, 3572 bp, Zea Mays
gtcggagccctagccagctcgccgagagcccgaaacagtccaatcccaacacggcgacgacgccagcggaaatcgcatcgccctcttcctctttccctcgctgtgcaatctcccccaaactcccctctcgaaccctcgctctcgtcgccagagcaagcaaagcgcagttgctgaaacccgtgcgctgttgatggatgatgaccgttcccatggatagtgctagcgcagccccgtcctctgcgcgggactttgctgagcgtctccttactaggaataatgaacttgaagatcagcttcgcaagtccgcacaatccaaagtcccatcagatcccagcatatggcttcagatgcgtgacaactttgagaagattattctcatagatcatgacctatctgaacagaaagaggtagagtatctcctatggaagttgcattacaaaagaattgaggacttcaggaggagcattagtgctgcaagctcagctgcatctcagagtgggaagagcaacgctaatccagatcgagtcaagagaattaaattaaccttcaaaagcttcctttcagaagcaactggcttctatcacgacttgatgttaaagatcaaatcaaatttgggccttccactcagttactttccagagggcatcgacaatgcaaacaactctgcgcgagatgacaagacaacagtgcagttgaagaaaggtttgatttcatgccatcgctgcctgatatatttgggagatcttgctcgttacaagagctcgcaaggtgatggtgattctgctagccgtgaatacgcagcggcatctagttactacatggaggctgcttctatctatccttccagtggcaaccctcatcatcagcttgctatactagcatcttactcaggcaacgaggtggtagctgtttataggtacttccgaagcttagctgcagatactccttttaccactgcacgtgacaacttgattattctttttgaaaagaatcgccaaagctatagacagctgccagacaacaacaaagttcccagcgctaaggcattacccccacggctatctgggaggggacaaggacggggagaagtaaagtttcagccaaaagatgttaacgcagaagcagctgaaagggaacaggagtgcaatgttcgtgatacattgaaggccttctatatacgatttgtcaggctcactggaattcttttcacgaggaccagtttggaaacatttggggagctgttttcttcagttagcaatgatttgcagattcttctttcttccggtcttgaggaggaccttaatttcggttctgatgctgcagaaaatgcattagctgctgttaggcttactatcatccttatattcacagtgcacaatgtaaataaagaacctgatagccagtcatattctgaacttgtgcaacgcagagtactgctccaaagtgcgtttacggctgcttttgattttgttggacgaattctcagaaggtgttcagaacttggtgatatcacatcaagcttctatctgccagccattctggtctacatcgaatggctggcgtcccatccagagttggctattgactcagagatggaggaacagcatgcaaatgccagatctttcttctggaaccaatgtatctcatttatgaataagttgatccttaccaaccttgcttctatggaggacaatgacgatgaggcttgcttttctaatatgagcatttatgaggagggtgaaactgggaacaggcttgccatttgggaagatcttgaattgagaggttttttgcccttggttcctgcacataccattttggatttctcaagcaaacacacatttggaaatgttggaagcaccaaggagaagaaagcacgggttcaacgaatttttgctgcaggaaagtcactgctgaactttgttcagattgatcagttgaggatatattttgatccatctttgaaaaagtttgtcttggccaagaactctcctgtttctagaactaacacccctcttcatgaatctcctgatgcacttaaaacaaatgggactgaaatggatcacaaggctgctagaagatttgattcagtttcttctaatgtgggctcactgcagtctaaagtgcagttttgtcctgatggtgatgatgaagaagaaattgttttcaagccaacagcttatgagaagttttcaaaagtttcttcagatctgtcagttaatggatacgtccatcctgtaccagtgtctgctgctggtgggccaaccaatgctagtttagtgcctgttcagaacactgcatcaatgtctgcaactcgtttaccatccaatccacatgcaactggtttgccatccaatggtgggtcacttccaagtactgcatctctatcagctgctggtaattacaacactgatcagtcgcttcccaggtcgtctgttggttggactgattgggctgtcaatagtgagcaaaatgttactcctagcattgctccaagatttgaactcatgcagtctgttgaggagcctgtttccagctggacaagcagtggggcacagcatgttggtcctcagcacaagcacacaggtttaactttcccagatgttgtctctgaaccatgtgtatctgcatcaatggttcaatgttttagtagctccgattattcgaaatttctcagagaacaagaaatattcttaatgaatggactgaagactgtcaacataactggaaatggctatctagagcagagattgcagcctggattgagtggtttacagtctatgggttattcatctcagatacctattcaacctggtggtaccactgcaaacctgatgcataatcatgtcaaaattactggagagactgtcccctctacacttgattcagttgtaccttcaatagcaccatcaggtggcatgccaatcaaacttacagaagcaccactaactgcttcgaagaagaaccctgttagtcgtccatcaaagcctgttggaccacctccaggatttaatcatgtaaccccaaagcgtcaagatgattctattccggttgaaaaactgcagaacccacaggtcgatgattacagctggctagatagctatcagcaatcgattgatcatgttcacagcttaagaactatttatcctggtgtcagtgatactagcactgcatttgccactccattctctttccctgggaggatacacacacaagggaccaatgaaaagacttggcaagatttccacctttttgagccttcaaaacagaacatgttccaaacttaccaccaaagaaatctgcaaagtggtcaaatggatgaacaagagccagcaaattctatctggtctagcagttaccatgtgtgatttggtaacttttaccaggatgattgctggagtttctggggacagactattggattaagtggcacgacctgatctattgagcttagcccatacctgcagcacttagtgttaaatttcttttgagaatggtagtctttcaagcatgacaatggctgctgttaagtttgcagcagaagtgcagaactgaaagcagaagttcagaag

SEQ ID NO: 23207 - DNA, 2540 bp, Zea Mays
cttatcttcgtctgttcctagattctactaggacgagcccaaatccaaatcgtcctgaggaaagggtaaagaaagtgaagcaaggggctgcctggcttagggtttcttgacggctccttgccctctccgccatggacgcgcagcgagccctccttgacgagctcatgggcacagctcgtaacctaacggaggaggagaagaaggggcacaaggagctgaagtgggacgatccggacgtgtgcggcccctacatggtccggttctgtccccacgaccttttcgtcaacaccaagagcaatctcgggccgtgcttgaggatccatgatccgaagctcaaggaaagctttgagaaatctcccaggcatgatacttatatgcaaaggtttgaggcagagcttgcacaacaatgtgagaaattggtaatggatttggatagaaagataagacgtggtcgagaaaggttggctcacgattctgctgtgccaatgccaatccctggaaaaatagctgagcagctttcagcgcgagaagaacaggtcaagaagctactggagcaaatcgaggagcttggtgaggctggtaaagtggatgaagctgaggcacttatgaaacgggttgacattctaaacgctgagaagacagctttatctaaccaagcagacagcaaagtggctatgcttgagaagaagatggagctttgcgaaacgtgtggatcattcttagttgctgatgatgctcttgagagaacccagtcccacgtgactgggaaacaacacattggatatggtatggttagagatttcctggtggaatacaaggcggcaatagagaagtcaaaagaggaagataggcttgcaagggagcagaaagcagaggagcgtcggaagcagagaggaaaagagtatgataatgggggcagggatagagataccagaagggagaagtctggggagcgtgactatgaccgtgatcgtcagtatgagcgaagccgtggaagagacaggtcttatgattacagagagagaggatcagagcaccgaagcaatctctacagaaatgggagggattccgaaagaggtggacacagatacaggagtggtgatatgacaaacgaccgggggagaatgaggagcagatcacgttctccaacaaggcatggctatggaagatctggaagtccaaatcattagctgaatatttagatagttttattcacagttgggactcatgagctctgttggaaccctacagtcttcctttttacatgagaaaaaaaaaattctcagttaaactcgtaaggccggtactggacttcatgtatggatgatgatgtttacagaattacagtctatagcaggtaaaccttgaacatcaatgtttcgtgttacacatttttttatttcccttgacaactctgctagaaaccttagtcctgctctttggcttagattttttacactactcaggccaggtatcttttttttaccaaaatttatgtgcataaattatgagttatgtacctttaatagttgactagttatcaatttgtcatgaagtagtattgtgttcaggaagaacaatcagacaaaatgatccagtcattgacaaccatcaacaaattctttttctggaaccgttgtagtgtacaagagatcaagctttggttttgtacataatggtgccctggttagacctatttcctgactgtagttattggcttgaagtctagtttggggaaggttctgtttgccagctaccttgcagttgcggtatttgagcagatagtgtattctaactatgcaaactaatagatgacaggcttcggtgtttttgacatatttttatgttttggatcaattggcgtcatgatctcggtgggggcaatgtccactgatgttatgttgtttgcatgacattcctgcgcctttttacacttgacataacaacatgtttttccataattgagttgtgcgtgggtgacttcgacgagactgaggtctctaattggttggtcaagtcctgaggtaacccactctgccccttttttggtgaatactagttgcttatgcaaatgatggagaaggttaggccagaagattctttggtggtaattgggaactaagaccgtgttcagcacgcattagaaccagctaaacctgtcttcagtcgtgcttgtgctcctcagagcatcgccgccgtggccatatcgtgcctgcaccacacacgtgtttaggtgctgacggaggtgtgcgggtgcagtcggtggcctcttcagcctctaggtaacctcatacgaactgagatgactagaaggtgtaaatgttagtggaatttgattgcactgtgactgtaaggaatgaatcagatcagtctggggttggatttggactgtaatggaaccagttgagtgcagatcattggttaaaacgagcttagcgcacgacgcacacaaaatcatccatgtaagtccgttgcatggggaggtttattccttgatccgtatcaattctgaggggaccaaaatacctaaaagggtagga

SEQ ID NO: 23208 - DNA, 1708 bp, Zea Mays
ctcggatatctgagatgattcttgttattcatcaaggaatgaaagatgataaagttgtcatgcagaggaagcaacatgcacggcacattgatgtcattagcccctctaagtcaagaatggcagtgtcttcattttcttctgtgagccctgttaagaagcaacctaacttgtctcatcagccaaaatttttgctagaaagcaccaatagttcaaatcaccgtgcaagcgaagtttcaggcgccgtgactgccactacaacagcaggtgcctcttcaaccctggcagctcagttagtttcaaataaaggacctgtatccagtgctgcaacccggaatgagaagccagttctagttacaaataaacccctgcaggttcttgtaccatcaaaatctgaagcgcagaaacaggcttccctaactggcagcgcaagcactcaggtcgtttcggtatcaaggcccttgagtgccccgcaagtccctgcagcaaaacaaagtgtgccagccacaacagctcagaacgcacctcttctttctcgctcagtgagtgctgttgggcggttaggaaatgagccctccgccaatgctcctagcttcattccccggtcacgaacctatcgcaatgccatgatggagaaaagttctggtggcgtaagcagtctcacacatcagcaaggttcatctgagcaggccgtcgcaccatcccaatcgatgtttacatcgcagccttccattctgtcatcggagaccttgtctatgaaagaggaaacgtcgttgagacctgggtttacatttggaaccgtaaagcccgagtcactgaacccttaccagggcagagaagagaactcactgcaagcgagcagcagcagcagcagtgactgtacgccatcgagttcgaacatcagaagtgagatcgcgaagctcagtttgaacggaagatcacggagcaagcaactcctgtctgaaatctctaccagatttactccctaccagccacaaggcttggtagctgacgagttcccacacctggacatcatcaacgacctgctggatgaggagcagagtgacaggagaagggttcttcagcctggtttcgtccagcaattctctgtgcataacggcgtcagcgcgcctgattatggcttgttcagtgagccgtacctgttcgaccggtccgagcagtactttgacgaggagcctccaaggttctacagtccattgagcagcgctcctcggaggatgagggaccggagctactcgcacttcgatctcccttcatactccaggagcagccagcttgatggtctattgatgagccagtggccgccatacagccgcgccgacctcgccatgcctggttttgggtcagacacaggtggctactcctatcagccgcagggtttcccgagtccagcgagtgcagcaagcagatacccgtcgtatcgccctgccaatgggcattgagagttttagcgattgcaattggtaataatgtgtggtggagtccatgctgctcgcttctgagctgagtgtaattgtaatagtccccccatagcagtgatataaagaatggttcctctgttttattcaatccatagttatatcatttgcctctctttttctatagttcagttttgctcagtggcaataaatctcggctaaaatgatctggacaatctaggctcagttttccctagttttgctgagtggcc

SEQ ID NO: 23209 - DNA, 3273 bp, Zea Mays
aaaacccttatctttccctctacgcactcgcgatgctccctccagtcaccgcaccgacccatccgcctccgccctgggaatcgacgaccaccactagaccgccgccgccacctcctcctccttccggcgccgagtccgaggtgccgccaaagaagcggaagctggagggggtggggtttcagcgctcgccctattacacgatcagagaaaccgttgcaaatctccgcgtccgcttccttcaggtttgccaaggaactgattcagaaaagaaagatactgctgtaggaatcttgaatgagatgaaatctgtgatggaattatccaagaaaacacggcttgatctgtccgcttctgctgaacctgtgaaaccgttgaacaaacatgcagctagagctcctgaggataagcgtgttgggaaagttctgtctgcagagaagagtttagttcctccgacaagcctgggcctggctggacattttgtgcacaatacaggtgggggtgtaccactcaagcctgataactcagacaccgcagcacatgggttaccggtgaagattaggaagtggcccggactaagtaagataacaggttttacaaagcgacagggtggacttcctcaaggttcttatgtcatcggtggatctcccattggctggaattttcttgtgtggcctggaagcaaagcagtctactatggtttgaccaaagcagagtgtcagaacaagggcgtaggggaccaagccaccaaggccccgcttctgtgtcttccattcttgtcggagcgtgctccgttgttgacggaagcaacgcttttggggcatggaaacgggcctgcagcgtcccaactcgcgattgggccctcgcagcacctgccaaaacaagaaaagcctagcccatgcgccgtgcggaggttccacagacatctcacgcctctgaggcaggttgctgtggacagaccgcagaagggaagggagcctgcgctagttgctaatgacggagagcgagggttaccaccaggaagtggaagatgagtacggagatgagtactatgatcaagatgagtatgaggaggaaggttcgggtgctggggatgggtatgctgaggaggaagagcctacagagggacaaaaggagatccttgaattgagagaaagattaaaagagcagattaggcgaaaggcaaaggctgctgctgcctgcacagctggtcgatcatcttcttcacaaatacctcaagccagggacaaatttggctctttttttgggccatccaagccggtgatttctcgtcgagtgatagaagaaagaaaatcattgaaagaactgcatagcacggttgcaagggagccaaggccttctggagtacataaggatattccatcgtcctctaaagtgcaaagtagagtaaatggacatcagcataaacaaaagattgttaatcaggtaaagaagaaggctgaggcacttaaggataaccgggattattcatttctactctcggatgatgctgacctgtcatcctctccaaaggagaaacctgctgctagatcttccttgactcaaagggctgatcgtgaggtgacacaatcaacagtaaagaggaaggcaccaacaagtcaacctgcacgcttgtcaaatggatatggacctaagaacacaatgtcaactcaaaggcatgctgaaggtaaggtaaattccatgagaagggaggatttctcgaatacagaaagggttgtttcacgtgacaatgagaggatgtatgaaagggttgtttcacgtgacaatgagaggatgcatagtattgcaagaaatggatccaaccaggcaagtactagcaaaaccacaatccaaaagcatccaagcaggggtcccattgctaataagcaaccgtccaaggattcgaatgatgcaactctgaggaagagcagtgtagcctcaaagcaccatcccttagagattgacagaccaaaatcctcgcaaagtcagaggatgcagtcagctggtcagagaccacagcattcttcccatggtcagacgccacatcaatccatgcagcataggacgcagcagtcattgcagagtcggaggccacaacaaatgacacagggtcagaagccacaacagtctttgcagagtcaaaggactcaacagtccttgcagaatcgaaggccacagcagtcctcacatattcagaaatcgcaatcctcacaagcacacagaccacagtcattaagtaacaggtctcaggctttacaaggacaaaggcctctttcttcacagggtcaatatccggagcaaagaagagtacatgcaagtgacagagtcaaacaagctgaaaggcagattcggcctccttccaagtccatgccatcacggccagtctcttccaatggaattcgtgatgatcatgcaaaaaggaagcaagtggcaaaaagaagatttgatgaagatgatgaagaccccttagcaatgatcagaaatatgtttgggtatgatcctagtagatatgcaggcagagatgaagatgtcagtgacatggaagccgattttgctactatagaaatggaagagaaaaggagcgcgaggattgctaggcaggaggatgaagaacaacttcgcttgattgaggaagaagagagacgcgagcaggagagaaagaggcgaaagatggcacgaggccgatagtcgaatacactcctatttggatgttataatatactaccttcgttctcgaatatttgtcgtccgctggttcatttttgaactaaaccgtgacaaataaaaaagaacgcaggagtatctggcaggcctgattgcctgaatacgaagccccatggcggatcagacaggcacttctcttgcagtcctgtttacccttaccacgatgattatctggaggcaaatcaagggaaaacgacaggtgaccaacactgggcacgtgtaacagcagactgtagttgtagtggtttagttctcgaagctgacatggactatatttaagttctcgtcagattgtttggatagcagaaggtttccattgttgcagcgcctcaccagattgtttcttcatatgatatactgattctttcagtcaagcctatataaggatgcgtaatacaagtgcccctcttgtatatctttttcgggtgtaatagtgttgtaataaacgatgttcgaattttcggatatgattttgagctttgtcaggcgatcactgcaccacggtccacagagatgcgcttctggccgggagccaatcgaaggaagcgggaa

SEQ ID NO: 23210 - DNA, 5068 bp, Zea Mays
gtactggtagcctctcacatttttatatgcttgctcgcccgccatggataccgaaaccaccgtactgctgtctcctactagattttaatcactaccaggcgccgttctcctctctctctctttccccgtctcaagcttgcattttctctctctctctctttccccggtggtgcggtgcggtgcgggtgctggactgctggcctctgcgtccgcatccggcgggcaagtgcgaaagctgccaactctttccctgctcggttttcccttctccaggccagccacaccacttcttcgccaagctcgcatccatttccaaactcttacctccatcccccacctgccctcctttatctcccaaatcggtcttcttgcgctggtggaattcctcgtcggcggtggcgagtgaggcgctgctggtggtatgcaggagctaggaggtaggcaacaaccatacgaaggcaagggcgagcggagccgaggcacaccgcgcgttctgcgccgaccagcactgcccgatctcgcgcgggggaggggggattcgtgagcgccggcggcagccatgccggagtcctggagacccgccgaggcggatgccctgcagccggcggcaggcacggcgtccgcgtccggcccctcggctcggagcccgggcaatggcgccaaggggcgcggggcgggggagccccccggcgctgcggcgacgcgggtgccgttccacaggctgttcgcgttcgcggactccgccgacgtggcgctcatgctgctgggcgcgctcggggccgtggccaacggcgccgccttgcccttcatgaccgtgctcttcggcaacctcatcgacgcctttggtggcgcgctcagcgtccacgacgtcgtcagccgggtgtccatggtctcgctcgacttcgtctacctcgccatggcctccgccgtcgcttccttcgtccgtaagttccacctcttgcgtaacgcggccagacactgagcactgagcactcaactgttcgccgtccgaccagaggtcacctgctggatgatcaccggcgagcgtcaggcggcgcggatacggaacctgtacctcaagacgatcctcaggcaggagatcgccttcttcgacaagtacaccagcaccggcgaggtcgtgggcaggatgtccggcgacacggtgctcatccaggacgccatgggcgagaaggtcggcaagttcgtccagctgctggtgaccttcttcggcggcttcatcgtcgccttcgcgcagggctggctgctcaccctggtcatgatggcgaccatcccgccgctcgtcctggcgggcgcggtcatgtccaacgtcgtcaccaagatggcgtccctgggccaggcggcctacgcggaatcgtcggtggtggtggagcagaccatcggttccatcagaacggtcgcgtctttcaccggcgagaaacgggcggtggacaagtacaacatgtccttgaagaacgcgtacaagtccggcgtccgagagggcctcgccactgggcttggaatgggcacggtcatggtgctcctcttctgcggctactcgctagggatttggtatggcgctaagctcatcctggagaaggggtacacgggagccaaggtcatgaacgtcatctttgcagtcctcactggttctctggctctaggtcaggcgtctccaagcatgaaggcgtttgcaggtgggcaggctgccgcacacaaaatgttcgagacgatcaacagaacgccagaaatcgacgcgtacagcaccacggggaggaagctggaggacgttcgaggggacatcgagttcagggatgtctatttctcctacccgacaaggcccaacgaacagatattcaagggtttctccctcgccatacctagtggcacgacgatcgcgttggtaggccagagcgggagcggtaaatccacggtcatcagcctgatcgaacggttttatgaccctcagcttggcgatgttctgatagatggtgtgaatctcaaggagttccagttgaggtggatcagaagtaaaatcggccttgtcagccaggagccggtcctttttgctgccagcataaaggagaacatagcttatggcaaagacaacgcgacggatcaggaaatcagagctgctgctgagcttgccaatgctgccaaattcatagataaaatgcctcagggttttgatacttccgttggtgagcatgggacacagctttctggtgggcagaagcaaagaattgcgattgcaagggctattctgaaagatccaagaatcctactattggatgaagctacaagtgctctggatgccgagtctgaaaggattgtgcaggaagctctcgacagggtcatgacaaacaggacgacagtcatagtcgcacaccgtctgagcactgttcgaaatgctgataccattgctgttattcatcagggaacactggttgaaaaaggtccacacagtgagcttctaagagatccagaaggagcttatagccaactgataaggctacaggaagcaaaccagcagaacaatgggaaggttgatgccaatgctcgtccaggcaaacaaatatcaataaacaagtcagctagcaggaggtcgtcccgtgataacagtagccaccattcattctcagtcccattcggtatgcctcatgggattgacattcaggatggttcatctaacaaactgtgtgatgagatgccacaggaagtgcctctcagccggcttgcatctctcaacaaggcagagatcccggtccttatactaggctccattgcctcagtcatcagtggagttatcttcccgatctttgcgatactcctgtcaaatgtgataaaagcgttctatgagcctccacatctcctaaggagggattcacagttctgggcttccatgttcttggtgtttggtgcagtgtacttcttgtcactccctgtcagttcgtaccttttctccatagcagggtgcaggttgattagaaggatccgactgatgacatttgagaaggtggtaaatatggaggtcgagtggtttgatcacccagaaaactcaagtggagcaataggtgcaaggttgtcagctgatgcagcaaaagttagaggccttgtgggggatgcgcttcaattggttgtacaaaactcttcgacactagttgctggtttggttattgcatttgtgtcaaactgggagctatccctcatcatcttagctttaataccactcattggcctaaatggatggatccagatgaagtttattcacggtttcagtgcagacgcaaagatgatgtatgaagaggcaagccaggtggctaatgatgcagtaggcagcataagaacagtggcctcattctcagctgaagagaaggtcatggatttgtacaagaagaaatgtgaaggtcctctaagaacaggaatcaggacagggattataagtggaatcggttttggagtttcctttttcttgctatttggggtatatgcagctagcttttatgctggtgctcggcttgttgaggacaggaagacaacctttcctaaagttttcagggttttcctagctcttgcaatggcggcaattggagtgtcgcaatcaagtacccttacatcagattcttccaaagcaaaatcagctgcatcttctatatttgcaattgtagatcgaaaatcaaggatagacccaagtgaggatgcaggggtaactgttgaggcactacaaggaaacatcgtattccagcatgttagcttcaagtatcctaccaggccagatgttcagatattccgggacctttgcttgacaattcatgctggaaagactgttgcactcgttggagagagtggtagtggcaaatcaacggcaatttcattgctccagaggttctatgacccagatgtaggccatatactactagatggcgtggacatacagaagttccagcttaggtggttaaggcaacaaatgggcctggttagtcaagaaccagctttgtttaatgacacaataagggcaaacattgcctatggaaaagatggacaagcaacagaatctgagatcatatctgctgcagaattggcaaatgctcacaagtttatcagttcggcgctgcagggatatgacacagtggttggagagcgtggagcccagttgtcaggagggcagaagcagcgagtggcgatcgcccgtgcaattgtgaaggaccctaggatcctgcttctggacgaagcgactagtgcgctggatgctgagtccgagcggatcgtccaggacgcactggacagggtgatggtgaaccggacaacagtgatcgtcgctcaccgtctgtcaacaatacaaaatgcagatttgattgcggtcgtgaggaatggggttatcatcgagaagggaaagcacgatgccttgatcaacatcaaggatggcgcctatgcgtccctcgtcgcccttcactcggcagcctcttcatagcaggtgatggtatgggatcctgcatacgtctgctaagacatatatgaacagagcgagctggcacaacctgtgtagcaatccaggtgctagtctctgttcctctatttgatggcatacataattgcttatacctaagcggagaaatgttacaaatagcaaggaccagatgtaaatgcaaggagctggtccttaagataactttttataatctataaatcttaatatgtatatgtagcttcgaacatagaaaccaaatagatgatggttatgctataactcatgatgttcttgctgtcgtttcccccctttatagcttatatgcaagtaatgataaccctgctcaggaaagaaagggcagctcccaaacgtttaatgataaccatatggctggaaaaactgagatgaaatgctgaagaatggcttctgcggaagcataaatttcatggcaaaggctatcaggttgcaacttctaaggtctggccaaaacagtatgtttttaatgtgaaaagggcatactaaacggaaacacaagttctattttgtaaaaaaaaacctcaactgaaggggcgggcatcctgatcaactgactctgaaacgaag

SEQ ID NO: 23211 - DNA, 2077 bp, Zea Mays
gcggaaaacaaatccgtctcttcccaccaccaaggcaccaaccgccgccatcgtgtgatggccgccacgcccgacgagcggaagcaggagaggccgatgaggcccgcgacgtcgccggcgagcgtggtggcggacttcgccatgggaggcgcggccgccgtggtggcaaagacgggggccgcgccggtcgagcgcgtcaagctgctgctccagaaccaggccgagatgctgcgccgcggcaccctcacgcgcccctacaggggcatcgccgacgccttcacccgcatcctccgcgaggagggccccgccgcgctttggcgtggcaaccaggccaacgtcatccgctacttccccacccaggcttttaactttgcattcaggggctatttcaaaagcttttttggctatgacagggagaaagacggaaagtggaagtggttagctggaaatgtagcatctggcagtgctgccggagctacaacatcattgctgctataccatctagattatgcaagaacaaggctagctactgatgcaattgaatcacggggaaccaagcgccagttcagggggttgctggatgtttacaagaagacacttacaaccgatggcatgtctggactataccgaggtttcagtgtgtctattacgggaatctccttataccggggtttatattttggtatctatgatagcatgaagcctctagttctagtaggcccattggaggggaatttcttcgccagttttgtgttgggctggacaataactacgttctctggggcttgtgcctatccattcgacacggtccgtcgtagaatgatgttaacttcaggagaaccatttaaatacaagaacggtttccatgcagtaaaactgatagtttcaaccgaagggttcttcacattattcagaggtgttggtgcaaatattctctcagggctggcaggggctggagttctttctgggtatgatcaactccaacggttggcaagccggcatgatcaaaattttgagcacaatatgaaaggggcattgaaatgatgtgcatatgatatgaatagattcagatccttggttgaagtccagatcattcaaatgggatgctcaagcaagaactcctgagcctgaagaacttcgcaaaaaatattgggggaagaaaaaggaaaagttttcctggagatgaatttcacaaggagatggaatcattgcaacaaaagataactcttgtaaacagagagtgctgaatatatattttaatgtgtagatctaatccttcaagtatgagcacatgtacatgttggtgtttcttcgattgttagaggcaatagtatcctatcaatgtgaaatgtaaatccaaatccttcagtaggtcatgaccaagctatttttctaaaaagggatggacatcttgactcttgaggaaggttcttcagttacagatttggatttttgctaacatcatatgagcatgtcatgtgcagatgcaaatgacatttttgcaggagtgtcagaccttttttgaagtgacaggattcaagtggatatcgtatccattaatctgtgcatcactcaaaagaagagcaaaggagcctctaatccccatctgtctctgattctgatcatctccagggagccgagtaattgccactgcgctgggactgaacaactgaaaggagggaggctgatgagccgtgtgagctcactgggaggtgcagtcgccatggtgaccaagatggggaccatgccagtggaatgtgccaagctgctgctcctgaagaccagaactatgatgagatgaggctaggggccctcacatactcatacaatggcatcaacgacacattcactcacatcttccacgagtagggtgccgcttcaaccaggtcaatgacatccactacttcccacccaatgaggagctaaatacatctaagcttccttcctacttctggcttggatcacagactaatggacctgaatgttgtttctaagtggtgcacaggcaccagggtcctctacgtgtgtttggttgtgcgtacctgcatagcctggcttgtcgcatgcattgactagc

SEQ ID NO: 23212 - DNA, 2822 bp, Zea Mays
caggcgcctgcaaggaaaacacaagacactgacaagtgggcccattactaaccctattaggccagaccagagctgaagcagagcggagaggtctgctcgccggccatcgaatccaggctcctccaaggtgatctctctcgatcgcttccggcctcaccgtagcccgatccacgcaggctcggccacgacccgcggcctccgcacgacctggatctgacgcgcctccccctgcccccgccctccgcctcgtacttcctcgctgcggccgccgtgctcgcgctactcggcggactcctactctatatgcttccccggaagcggggggtcgacgccggcgaggaccaggacttgcacaacaaggcccttcgcgccgccgcagttgctcaggacaaggagaaggtggttgcggagatgggcggcagggcgccagagatcgatgaggacctccacagccgccagctcgccgtctacgggcgcgagaccatgaagcgcctcttcggctccaacgtcctcatctccggactgcagggactaggcgctgagatcgcaaaaaaccttgtccttgcgggtgtcaagtccgtaaccttgcatgatgatggcaaagttgagctatgggacttgtcaagcaactttttcctctcagagaaggatgttgggcaaaaccgtgctctagcttgcgttccaaagctacaagagcttaacaatgctgttatcatctctaccataactggtgatttgatcaaagagcagctttctaattttcaggccgtggtttttactgatatgagcatagaaaaggcagttgagtttgatgattactgccatagtcaccagccgccaattgctttcattaagtcggaagtttgtggcctttttggcagtgttttctgtgattttggtcctgagtttactgttttggatgtcgatggtgaggagccacatacaggaattgtggcatcaatcagcaatgacaacccagcacttgtttcttgtgtggatgatgagcgtctggagttccaggatggtgatctagttgttttctctgaagtgcatggaatgaccgaactcaatgatggaaaaccaagaaagattaagaatgcaaggccttattcttttactctagaagaagacaccacctcatatggcacttacattagaggcggtattgtcacacaggtgaagccaccaaaggttcttaatttcaaaaccttgaaggaggcaatcaaggagccaggagaatttctcatgagtgatttctccaagttcgaccgcccacctcttgtgcatttggccttccaagctttggacaagtttaggactgagttgacacgattccctattgctgggtcagctgatgatgtacagaagctgatagaccttgctattagtattaatgaaactcttggtgatagtaagcttgaagaaattgacaagaaagtcttgcagcattttgcaagtggttcgagggctgttttgaatcctatggctgcaatgtttggtggtattgtaggtcaggaggttgttaaagcatgttcagggaaattccatccactgtaccagttgaaccgttggagcctagtgatttgaagccagagaacagtagatatgatgcgcaaattagtgtctttggggctaagcttcaaaagaaactggagcagtcaaaaatcttcatggttggttctggggctcttggatgtgaattcttgaagaaccttgcgttaatgggtatttcttgcagtcaaaatgggaagctgactgtgacagatgatgatgttatagagaaaagcaatctcagtcgccagtttctcttccgtgactggaacatcggacagcccaagtccacagttgctgcaaccgctgctatggcaattaatcctaagcttcatgtggaggcccttcagaatagagcaagtcctgagactgaaaatgtgtttaatgatgccttttgggagagtttggatgctgttgttaatgcattggacaatgtcactgcaagaatgtacattgattccagatgtgtatattttcagaaaccacttcttgaatcgggtactctgggtgccaagtgcaacacacagatggtcattcctcacctaacagaaaactatggggcatccagggatccaccagaaaagcaggcacctatgtgcactgtacattcatttcctcacaatattgatcactgccttacgtgggccaggtctgagtttgagggtctacttgagaagactcccactgaagtaaatgctttcctgtcgaaccctggtggatatgcaaccgcagcaagaactgctggtgatgcacaggctagggatcaacttgagcgagttattgaatgccttgagacagacaagtgtgagacattccaagattgtattacctgggcccggcttaagtttgaggattatttctccaaccgtgtaaagcagctgacattcactttccccgaagatgcaatgactagctcgggtgctcctttctggtctgctcctaagcggttcccgcgacctctggagttctcgtcttccgactcaagtcaccttaacttcttgttggctgcatctgtattaagggcagagacatttggaatacacatacctgattgggctaagaacccaaagaaactggctgaagctgtggacaaggtcattgttccggatttccaaccaaaacagggtgttaagatagagacagacgagaaggctactagcctatcctctgcgtctgttgatgatgctgctgtcattgaagagcttattgcaaagctggaagaaatttttaaaacattgccaccaagattccatatgaaccctatacagttt

SEQ ID NO: 23213 - DNA, 1298 bp, Zea Mays
ataaaaatgtaataaaatagtccaatcgccttgactaccgcttccggttccggatccgaatctcgccctcccctctctttcttgcctccaggtccggccgtccgggcggcgccgggaggagagaatggcctccacggcgtcgccgccggtgttcgagagggtggccgggatccgagccattgccgagtccggccgcttcaaggcatggttgctggaccagtttggcgttcttcatgacgggaagaagccgtaccccggcgccattctggcattggagaagctagcggagaatggggcaaagatggtgataatcagcaattcctctaggcggtcatctgtgacaatgaagaagctcaagagcctggggttcgacacgtcctgtttcctcgcgaccatcaccagtggggagctcacacatcagcaccttcagaagagagacgacccatggtttgctgctcttggaaggaagtgtatccatatcacttgggacgatcgaggggcaatttctctcgagggccttggtttgcaagttgtgaacaatgttgatgatgcagagttcatattagcccacgaaaagcgacttccaatggtggtagctaatccagattatgtcactgtcgaagctcgagatctccgtgtcatgcctggcactctggcagctaaatatgagagtcttggtggtgaagtgaaatggatggggaagcctgataaggtgatctatacatcagcgatgtccctagcgggcgttgatgcccgtgaatgtatcatggtgggtgattcgctgcaccacgacatcaaaggagccaatgcgtcagggatggcatccgcgttcgtcactggaggggtccatgcggacgaacttggactcggtgaatttggagaaactgctggggaggatgctgtcagttcgctgtgcagcaagcacggatcgtacccttcttatgttctgccttcattcgcgtggtagagatgcggcctagaatttttttttgttttaggtgcacgggaaagtgattttaggcagatattgttgttatggaaataagtgccacgcaatgatcaagccgctggaggtgtcattcttcttaataaataataagtgacacgcaatgctcaagccgctggaggcagatttgtatttgcatttgtagtgtgtgtgtgtctatatatgctgcctgtggtgtatataccgcctgtgctgcaatgttcggttgagactttagacagcgatactgtatgaaggattcacattgttctgctcaattatgtaaacccgctctattacttttcaaaaaaat

SEQ ID NO: 23214 - DNA, 1935 bp, Zea Mays
caatatttcccattatgcacggagacaatagtcagtatggctgttgctggagctatagttggagctgcatttggtggctggatgaacgacaagtttggaaggaggccttccatcatacttgccgatgcactgttctttggaggtgccgttatcatggcgttttccccaacacctagagttatcattgttgggagggtatttgttggtcttggtgttggaatggcttccatgacagctcctctgtacatctctgaagcctcccctgctaggatcagaggtgctctagtgagcacaaatgggcttctcatcactggtggccagttcttggcctacctcatcaatctagccttcactaaggtgccagggacctggcggtggatgcttggcattgcaggggttcctgccctggtccagttcgtactgatgctgatgctgccagaatcaccaagatggctctacaggaagggcaggaaagaggaagcagcagcaatcttgcacaagatttaccctgcgaatgaggtcgaggaagagattgactcaatgcgccggtctgtcgaagaagaggtgctccttgagggctccatcggtgagagtggcttcatgggcaagctgaggaaggcgatgggcagcaaggtcgttcgccgcgggctaacggccggcgtcatcgtccaggtcgcgcagcagttcgtgggcatcaataccgtcatgtactacagcccgacgatcgtgcagctggccggctatgcgtccaacaacacagccatggcactgtccctcatcacctcgggcctgaacgccatcggctcgatcgtcagcatgttcttcgtggacagggcaggccggaggcgcctgatgctgatcagcctggtcggaatcgtcgtgtggctcgccgtgctcggcggcacgttcctgggcgccgcacaccacgccccacccgtcagcgacctggagacccgactgttggcgaaccagaaccagacccagacccagacgtgtcccgagttcaacccgaacgtccgctggagctgcatggactgcctcaaggccgcgtccacgtgcggcttctgtgctcaccagggagacaagcttcttccgggggcgtgcttggcgctgaacaacgcgtctcggcatgcgtgccgcgcagaccaccgggagttctacacggaggggtgccccaacaacttcgggtggctggcactgatcggcctgggcgcgtacatcgtctcctactcgcccggcatgggcacggtgccgtggattgtcaactcggagatctacccgctgcggttcaggggcatctgcggcggcatcgctgccgtcgccaactgggtctccaatctcatcgtgacgcagacgttcctgtccctgaccaaggcgctcggaacatcggccaccttcttcctcttctgtgctgtctccttgctggcgctcgtcatcgtcttcctcaccgtgccggagactaaaggcctgcagttcgaggaagtggagcggatgctggaaagggaggactacaagccctggaagaggtaccatggtggcagcagcagcatcgagccggcgaagaacagtgatattggcctcaccccgccatgaaatccacttgttctgttatctagattcaagtagaagtagcaataattcgtagtggcagtttataataggccatctgctgctaatctctctctagatttccaagaagtgaaaaaatgaggtattagtcattcagtatgaaaatacgacatttggtagctgctatactttgttctagagcatttaatcttgattttagctctggggtggcttgtggcattagttgcgcactgtgtttaagacaacattcagaattgtttccttttttactttttaccatttggtgatgaagatacattctgcacttcactgcattagttaagatgaaataaaacttccaagtac

SEQ ID NO: 23215 - DNA, 2974 bp, Zea Mays
aatggaaccagtacctctattccattccaggctgcttcttcctgcgcgattcgacacggactcagaccctcacacgcctcctcaccggctcacgacgtcgccacctcagatccggcgaccgatcccctcctcctcggcgaggcgtagagccgagccggacaacacagccacgaccacgaggcgtcgtcgcggagtagtcggagccgtttctgctgcccccctccttcccgccaagtttgtcaagttacgtccgatgctccagacatagtagaaaaccatgggagaagttagtgatgacaattccaacctgtcctttctaaaaagaatcgcaacaagtgacgtaccgctgttgaaagagtatggtgtaaatggagttgtcgtcgctctgcttcttgctgtagttactcccgtcttgctttccatgatgtttggcaagaaaacaaagcagagggcggtgcgagctaatgtgggtggagaggaaggatttgccatgcgaaacagtaggttttcctccttagttgaagtcccatgggaaggcgccaccacgatgtcagctctgttcgagatggccagcaaaaaatactctcgacggaggtgtcttggcacgaggaagctaatcaagagggaatttgtggaatcttctgatggtaggaagtttgagaaactgcaccttggtgaatacgaatgggatacgtacgccgaggcatttaaccgcgcatgtaattttgcttctggacttgtcaagatgggccacgacctagatagtcatgctgctatcttctctgatacaagagctgagtggatcattgctgctcagggatgcttccgacaaaatttgacggttgtaacaatatatgcatctcttggtgaggatgcattggtgcattcactaaacgagacacaggtttcaactctgatatgtgattcgaagcaacttaagaaaatacctgcaatcagctctaaattgcagagtcttaggcatattatctatattgaggatgaacctgtcgaggctgagacactgaaccaagtgaagcatctgacaacattgtctttcactgaagtagaggagttaggcaagacatctagtgttgatgcaaggttaccttcaagctctgatactgcagttatcatgtatacaagcggaagtactggtcttcccaagggtgtaatgatcacacatggcaacatggtggccacaactgcagcagtcatgacaatagtcccaaaacttggcatgaatgatgtttatctggcttaccttccattggctcatgtctttgaactagcaggagagactgtcatgctagcttctggtactgccattggatatggttcaacattgactatgactgatacatcgaacaagattaagaaggggacaaaaggagatgtttctgtactgaatcctactcttataatttcagttcctgcaattttggatcgtatcagagatgcagtgtttaagaaagttggtgagaagggtggcctgacaaaaaagctgtttgattttgcatataagcggaatcttgcatcaattgaggggagttggtttggatcctgggcaccggagaggatgatatgggataccattatttataaaccaatacgggcaatgcttggaggacgtgtaagatttgttctttgtggtggtgcacctttatcaggtgacacacaaagattcatgaatatatgtctaggtgtcccagtgggtcaaggctatggtttgactgaaacctgtgctggagcagctttcactgaatgggatgacacaagtgtgggtcgtgttggtccaccacttccttgctgctatgtgaagcttgtttcatgggaagaaggtggttacaagatttctgattatccgatgccgagaggagaggtcgtggttggcggacacagtataacaaaaggctatttcagcaatgaagcaaagacgaatgaagtatacaaggttgacgagaggggtatacgctggttctacactggtgatattggccagttccatcctgacgggtgccttgagattattgacaggaaaaaagatatagtaaagcttcagcacggagaatatgtgtctcttggcaaggttgaatcggctctagcaacaagtagttatgtggagagcatcatggtctacgccgatccgttccataactactgtgttgccctggttgttccagtacgccaggccctggagaagtgggctcaaaattctgggataaactgtgaaggctttgaagagctttgccaaaatggccaggcggttaaggaggttcagcaatcactatcgaaggccgcgaaagcagcgaggctggagagattcgaggtgccggcgaagatcgagctgctgcctgagccgtggacgccggagtccgggctggtgacggcggcgcttaagctgaagagggagcagataaaggccaaattcaaagacgatctggacaagctctaccactgaagaaaagcggggcttgcacccacgcgttcaggagcttgcgctgccaaaacgctgcctggatgcggaatggaacctactgacctgcacgagaccacgagtggtgtgtgtgtgtgtgtggatgtgtgtcggcgtcggtacagcaggagctgcttcttgtgtgatgaaaaataagccaaagtgttggttggaacgatcttgatttgtatagcttcacttaacttgcatgaaccctagctcgaaatcagttgaatctggatggaccggtcgataagagttgccgctatcggttttgatgcctcacgatggttgaagccgggcagccggcaattgtcggggcgttctctgagatggccatagtcgtcgcaatttgacctgtggatttagatatttgttggatatctaatccaatagataccagagccgggtatggatacatgtttttaccacagttttgatgtttttaccacagttttgatctgtggtcagactttaataaaatggctccctgtgctctga

SEQ ID NO: 23216 - DNA, 2574 bp, Zea Mays
atggagcagttccccgacggggcgcacgtgcggctgcggagccgcgtgcacgcagggtacctccacgccgacgaggacggggtgggggtgtccctgcgccgctggcgccgcaggtcgatgaacgtggcgtggaaggtgcaccgcatcctgcacgacggctccaccagcgtcctcctccacagcgccgcctatggccggtacctcgcggcgtcccacgacccggcgccgccgggccacctcggcctccgcgtcgacctgggcgactacgaccaggacgtggaccccatcctgtggaaggccgtcggctccggggacgccggctacgtcctcctgcgccacgtctccaaccgcctcctccgcgccaacggaaggtaccgcctctggcaccgtggcgtctccgtcgacgacgtcgacaaccagagcacgatgatgcattggaaggtcgagaccatccccaccagccccaggccgccagcacttccagcgccgactcggaggaaccgaggcagcttccgcggcctgttcctcctgcacgaggagcccgtggtgctgcagcggacggtacggttcgtgcgggcggacaactacggcaacttcccggacaactggggcacgctccagttccagggccgctccgtctttgagctgagagcggagatggcgcgtcgcttaaactatgcgctcttcttcttccgcctcctgatgtgcgtccggggcggccgctacgggcgcctgaccccgctactcatcgacctgcctcgcaacgaggagaccctggacatcatcgtcctcttcatcgggacacaaggacctgaaaattgcatcacttgtgtgctgattgctgaagctctccacatgattttgttaactgacagccccatgaggccgcatgtggacatgtctactcggaccactgcgtttaccattacctacacggctacaccgtcgcctaatttgccaacgcccgccgccgttccgatggaaaccgccgcgccggcgcgcgtccaagccctcgctgaggccggcgtgtcccgcctcccggcgcagtacatccagccgcctgagcaccgaccaaccccctcgccttctcctattgccgcggcgctctccgtgccggtcgtcgacctctcaacctccaccgccgacgacgccgtccgcgccgcgtgcgcggactggggcgcctttcacgtggtcggccacggcgtgccggtggatctcctcgacgcggtgcgcgcggcagggctcgccttcttccgcgcgcccatggaggacaaactccggttcgcctgcgacccggccaggggcgccgcctcggaagggtacggcagccgcatgctcgccaacgacgactccgtgctcgactggcgcgactactttgaccaccacacgctcccggagtcccgctgtgatcccgcccgctggcccgacttcgtccccggttacagagatactattgcaaaatacagcaacagcatgaaggatcttgctcaaaaattgttgtgcatcatctcagaaaatctgagcctaccaccatcttatatacaagaggcggttggagaagttttccagaacattactattagctactattctccgtgtccacaacctgatcttgctcttggattacaatctcattctgatatgggcgcaataacacttctgatacaagatgatgttggtgggcttgaagtattaaaggatggaatgtggatacctgtgcctgctttgcgtgatggcatccttgtgattctcgctgatcagacagagatcatcaccaatggaagatacaagagttcagttcatcgagctgttgtcaatgctgagcatgcccgcttatcagtagcaacattttatgatccatcaaaatcaaggaaaatatgcactgccccgcagcttgtgagtgagaatgaaccacaaaagtatcgggatgtaatttatggtgactatgtctcatcttggtatagcaaaggtccagagggcaagcgaaacatcgacgccctcctgattcagcactagagccataggtatgccttaaaacagggttggaccactcatctgttttgtaaacttctaatgcatgtacaacatatcagtttccaactttaaacaatcaggataaggaaaccaacttgtatactgaatgcagtgcaataaagtaccttttcattgtcagtcttttagttaagatactttcatctgactgaaagagtaaatgagacagaatcttgacattttttttctctaacattgttttttgtttttttcttgttttagtttctctaaaaaaacttcgtattgatgtaatacctgattatggtcttaaagacaaccttttctaggttggaacctggcatgtgtagtcgattttattcccagttataaagataaattgttaatcttgggtccccagcatctattgcagttttttttcctgctcatgtgttgaggccgagtgggcatagtagtgtgcaaggcggatggaagcagccaaccaacttgacaatgaaactcttggctctgtcacctggttgcatcaccaatggagaaaggagcagaggtaggaatgagaagcgg

SEQ ID NO: 23217 - DNA, 3451 bp, Zea Mays
gcggctccggccatggcccgcctcctccgggccctcgctgccctcctcgtcctcctcctcgcggccgcctccgtcgccgtcgccgacgacggagaaacactgctggagatcaagaaatccttccgcgacggcggcaacgcgctgtacgattggtccggcgacggcgcgtcgccgggctactgctcgtggcgcggcgtgctatgcgacaacgtcaccttcgctgtcgcggcgctcaacctctctgggctcaatctcgagggtgaaatctcagcggccatcgggagtctgcaacgtcttgtctcaatcgatttgaagtcgaatggactctctggacagatccccgatgagattggtgattgttctttgctcgaaactttggatttgtcatctaacaatctagaaggagacataccattctccatgtccaagctgaagcaccttgagaacttgattttgaagaacaacaaactggtgggagtgatcccatcgacactctctcaacttccaaatttgaagatattggacttggctcaaaacaagttaagtggtgaaattccgaatctaatatattggaatgaggttcttcaatacttgggattgcgaagcaatagtttagaaggaagcctctctcccgatatgtgccagttaactggtctgtggtactttgatgtgaagaacaatagcttgacgggtgcaataccagaaaccatagggaactgtacgagctttcagagatttgtcaaacaatcatcttactggagaaatcccgttcaatattggtttcctgcaagtggctacgttatctttgcaagggaacaagttctctggtcctataccatcagtgattggccttatgcaggcgcttgcagtgctagatctgagtttcaatgagctatctggcccaataccctctatactgggcaacttgacatacactgagaaattatacctgcaaggcaataggttaactggattgataccgccagagcttggtaatatgtcgacactgcattacctggaactgaacgacaatctgttgactgggttcattcctcctgatcttggaaaacttacagaattgtttgaattgaaccttgcaaacaacaaccttataggacctatccctgagaatttaagttcatgtgcaaatctcattagtttcaatgcttatggcaataaattgaatggaaccattccacgttcatttcacaagcttgagagtctgacttatctgaatctgtcatcaaatcatctcagtggagcacttccaattgaggttgcaagaatgagaaatttggacactctggacttatcctgtaacatgatcactggttcaattccctcggctattgggaaactagagcatcttttgaggctcaacttaagcaaaaataatgtggctggacacattcctgctgaatttgggaacttaaggagcatcatggagattgatttgtcttacaaccacctcagtggcctgattcctcaagaggttgggatgctacaaaatttgatactgttaaaattagaaagcaataatattactggagatgtctcttcacttatttactgcttgagtctcaatatcttaaatgtatcatacaaccatctttatggtactgtacctacagacaacaacttctcacgattttcacccgacagcttcttgggtaaccctggactttgtggctattggcttcactctgcttcatgcacacaattatccaatgcagagcaaatgaagagatcctctagcgcaaaggcctcaatgtttgcagctattggtgttggtgccgtattgcttgttattatgctcgttatcctagtagttatttgctggccacataactctccagtgctcaaagatgtctctgtaaacaaaccagataaccttgcttcagcatcaaacaacattcatcccaagcttgtgatcctccacatgaacatggccctctatgtatatgatgatataatgaggatgactgaaaacttgagcgaaaaatacattattggttatggagcctcaagtacagtctacagatgcgacctgaagaactgcaagccaattgcgattaaaaagctgtatgctcactaccctcagagcttgaaggaattcgagactgaacttgagactgttggaagcatcaaacaccggaatcttgtaagccttcaggggtactccctgtcaccatctgggaatctcctcttctatgattacatggaaaatggcagcctctgggacattttacatgcagcttcatcgaagaaaaagaaactcgattgggaggctcgcctcaagattgctctcggagctgctcaaggcctggcttatcttcaccatgaatgcagtccacgaataatccacagggatgtgaagtcaaagaatatcctcctagacaaagactacgaggctcatcttgctgacttcggtattgccaagagcttgtgtgtgtcgaagacgcacacatcaacgtacgtgatgggcaccattggctacattgaccctgagtatgcacggacatcccggatcaacgagaaatcggatgtgtacagctacggcattgtcttgctggagctgcttaccggcaaaaagcctgtcgacgacgagtgcaaccttcaccacttgatcctatccaaagccgcagagaacacggtcatggagacggtagaccaggacatcaccgacacgtgcaaggacctcggcgaggtcaagaaggtgttccagctggcgctcctttgcagcaagaggcagccgtcggatcgaccgaccatgcacgaggtcgcgcgcgtcctggacagcctcgtctgcccagcaggcccgcccccgaagcaggcgcaggcgcaggcacaggcacaggcgtcggagaagccgtccaccacggcgccgagctatgtcagcgagtacgtcggcctacgaggcggcggcggcggcagcgccctctcctgcaccaactcgtcgagcgcgtccgacgccgagctcttcatgaagtttggcgaggtgatctcgcggagcacggaatagtccaatagatcgacgatcattttgtgttacagtttacaataggtgtctggccggcgccctgtgatgtgactcgctgtaaatatgctgctgccttctcgttgggactccactaggcactagtagctatttttctccgttatgcacgtctctctctttttttttgctgggaaactcgaactgtaactaaaggaatggatttatgtgcaggctgcgtttactgacatgttttgtgattcagctgggacggttatgctattgctctgctcgatcggagcacactgttcaaggctggctggagatcatctgggcactgttactgttacgttatccttcctgggcttcctactcctggatcatgccactgctgcgctgcactgtcgcatgtattaccgtaccgacaaccgctgctgtaaaaaaacaaaaaaaaaa

SEQ ID NO: 23218 - DNA, 2635 bp, Zea Mays
atggagacggcgcatgaggtggccatttacatcgaccgcttccacaacctggacctgttccagcaaggatggtaccgcgtgaagattagtgccctgtgggaggatgacgagaatcgagcacccatctcgccggccagggtcacgcaatacgaagctattgatattggtgtgaagagctcatttggcttttggaaaatagacgatgttgacaatagcttctacacacagccgtttcttgttaaatattctaggcaagatatttatctatcagttatggtgtccttctacatacccaacagcgaagacgagggtccagcaacttcttctgttatattgaagttcgagctcatatatatcccaacactggggaatgcatggactgacgttcaagattcaagtgatgatacagatttgatccctgtccatgaatttaggatcccacatagagcactcctaggcttacactcgtattgccctgtccattttgacgcattacactcggcgctagtggatctgacaatacacattgtctacctgaaagctgctgtgactaaatcatcactgaagccgctggaacaaagttttggctcaaagtcatatggtattgtgaaagcatcactaatatctagggaaatacttcttgaagaagtgaagaagatcagtaatgctgttggtagcactcttgaggatttggatcgcactgacttaacccttggtaaatatgagacagttcaaccatcaaagtcagcttcgcccagttacagttatgggcagggtacgcccacaaagtgtagtccccagatgactggcatcttacgtgattttcttgagagttctggggttgtggttggaagcactgatgatatcttgctgtatactctatctgaggaagaattgtttgaactatttcaaattgtcagcagccaactctcatttatatggaatgagttcttgaaattccataggacacataaagacaaggtaatgggttatttgcatgatatgtgggatattaatcggaaagcagaatggtcaatatggattattcattcaaagattgagattccacatcgctatttgagaagcatgaatgacgactctcctcgccatttgattcggatttccagttcaagaaagcctatacaaaattcgatgtcacaggctgaactgcacaggaaaagtatagcacaaatgaagattaacacgccgtctgttcaagatatgcatatttatgctgatccttcatgtatacctgttgtccgcatagagcagcatgtcatggttattccgcaacattgttctagcaaggattttctaacagatgcttcagaaccagctcgtactattgtgccaccacctctactacaaggacaatcattgggggaagaaacttgtggtttcaagagtggacgcattttacgagctgtcatttttgtgcatggatttcaggggcatcatctggatttacgtcttgttaagaaccaatggcttttgcttgatcctggggctgagtgcctattgtctcagataaatgaggatagaacgtctggggattttaaagaaatgggtagaaggctcgctaatgaagtagtggcattcctcaaaaggaaggtggacaagtactccagaaatggaggttgcaaagagattaagctcagttttgtcggtcattctattgggaacattatcctcagaagtgccctcacagaacccaaattgcagccatttttgaagaacctgtatacatacatgtccatatcgggacctcacttgggttactggtacagcccaaattctctgttcaactctggcctctggctcatgaaacggctcaagggcatgcagtgcatgcatcagctcactttcagtgatgaccacgacccacagaacacgttcttttacaagctctgcaagctgaagacactggagaacttcaagaacatcatcctggtatcgtcaccgcaggtactgcagatgtatgcccaacgttctttcttctgccaggcttaaagttggacatcatatcacttcacttgaaagtgtcatcattctacttgctaggatggttacgtcccataccattcagcaagaatcgacctctgccacgcctcgtcgtcagataactcgaaacgcgggcaggtgttcactgagatgctgaacaattgcttggaccagatccgggcaccaacgtcggaaactcgggtattcatgcgttgtgacgtgatattcgaccagtccgcccaaggacggaacctgaacaccatgatcggcagagctgcgcacatagagttcctggagaacgacatctatgcaaggttcatcatgtggtccttcccagagttgtttcggtgatgatggtgatgatgtgctcctggacctggagatgatctgaatacgtatcacacaagtcattatccattacagtatataaccgcagcattcgtgttgtttttaatgaattttagatgcgagacacaattttttgctctgttgccccgtcacctagcaatcgcagagcataaaattcatctggacagacaaattatggtttggtatcaacaactagtccgattgggatatgtacaaatacgagtgatgtttgtgaaacaaatggtggcgtgtcatgtgttgtgag

SEQ ID NO: 23219 - DNA, 1822 bp, Zea Mays
ctggtgcaggaagggaggggcagcgacggacgcaccttctggcctgcgtgcccccctgcccactcgagcgaagaggctgaggccgtccagggcccaatgctgggcctctcttggcccgatgtggggggccatatttggcggggacttgtccagtaatacattgagtggatctgttccacattctcttgataagttgtccaaacttacattattcaatgtttccatgaacttcctgacaggagccataccatcttctggttcacttgtcaatttcaatgagacatcctttgttggcaaccttggtttatgtgggaagcagataaacttggtgtgcaaagatgcacttcaatcatcatcaaatggtctgcagtcaccttcaccagatgacatgattaataaaaggaatgggaagaattcgaccagacttgttataagtgcagtggcaacagtgggagctctcctattggtggctttaatgtgtttctggggttgctttctttacaaaaattttggaaaaaaagatatgcgtggtttcagagtggagctctgtggaggctcttctgtcgtgatgttccatggggacctcccttactcctcaaaagacatcctcaagaagctagagactatagatgaagaaaatatcattggagcaggaggcttcggaactgtttataaacttgcaatggatgatggcaatgtctttgctttgaaaaggatagtgaaaacaaatgaagggctagatcggttctttgatagagaacttgagatattgggaagtgttaaacatcgctatttggtcaatctccgtggttattgcaactccccttcatcaaaacttttgatatatgattatcttcaaggtggaagcctggatgaagtgcttcatgaaaaatctgaacagttggattgggatgcacgtattaacattatacttggagctgcaaaaggcttgtcttacttgcatcatgactgttcgcctcgaataatacatcgtgatattaagtctagcaacatcttgcttgatggcagtttcgaggcccgtgtatcagactttggacttgcaaagcttttagaggatgaagaatcacatattactacaatagttgcaggaacatttggctaccttgcaccagagtatatgcaatttggcagagccaccgagaagactgatgtctacagttttggggttttggtactcgaaatactcagtggaaagcggcctactgatgcatccttcattgagaagggactaaacattgttggatggttaaattttcttgctagtgagaaccgggagagggaaattgtcgacctgaactgtgaaggagtgcagactgagaccttagatgccctgctctctcttgccaagcaatgtgttagctcctcgccagaggagaggccgacaatgcacagggtggtacatatgctggagtcggatgtaattacaccgtgccctagcgacttctatgattcagagtagtctcctggacaagccacgctgctgctagtttcccgtgggggcgcattcctttattctttgcgtatattgtgtaaatgcattgccgcggtgtttggtctccaatcggctggctcaacgggtgacttttttttgcgtctgtatacctatgtatgtatctgtcatggtacaagttggctatatgctgatttaataataagagagaacttactagtagactattgtatgtttaactatagtctttagatactcgtagatgttgtgggatctacaaaagaaatggggaaataatgaatatcgcttggaacaaacaagaatagataaaactcttttggcttggaggat

SEQ ID NO: 23220 - DNA, 4235 bp, Zea Mays
gtccacccattctcctggccgctcttccccttcgtcgtcgcactccgctagctcacctcctcgtccccatataaaccatatccctctccgggccccgcgcagccgccggcgacaagcgcgcaggagcagcagttgtcgcgcctcactgatggcgaccgccgtggcgtcgcagccgtgccaccttcccctcagcgccggcggagatcccaggtgcgcggccagcacttcgaatgttcatactctggagaaagtatatggtttcagattcatatgcagaagcattgttgatgtaaagactcacaaattccactcccgcatttcaaagaggaagtgctacttgaggaactcactgtcggagtgtgacaggaccatccacagtggtagatggttggagtttcggagacacaagggagtcttccagagaactagaaggatggttcacattattccattggcttctgatggtgatggcaaccatatatctgttaatggagctctgcaagttggttctacaagcaacattgatgaaataaagttgaaattgaataaagcattgcagagtgaagatatcagcaatggactcgtccagtcgatacatgatgctgcaagatctattgagttggctctcatagagcacagcaaattgccaaagagctcttggtttccaaagacatggctaggcgttgagaacaatgcttggataaaatcactgtcttaccaggctgctgtagactcattgttgaaagcagttatcgatgtttcatctcgtgggaatgacagagatagagatattaatgtgtttgttcaaaggagtttgtcccgcctgctcaccccccttgagagtgttatcaagaatgaattatctaagagggaacctgcattgtatgaatggtattcatccgatcaaaatcctttggtggtgagacaatttgtaaacatttttgaaaatgatccaatgttttactctgctacagcaatatgccttgaaggcgagccgatgaatactagtgaaagtgatctttctctgcttatgctaggtttgatctgtcttgctgcaatcacaaagtttggatcagcaaaagtttcttgtcagcaattctcttcaatggtgcctgatattattggtcgattcatggatatgcttcttgagtttgcccctctaagtaaagcatataacttggcgaaagatattggtcttcggagagaatttttgtataattttggtcctcgtgctgctgttcctaaacttggcaatgaccatggacttgaaatatcattttggattgaactggtgcagaagcaattactctgggctcttgatcgtgaaaagatatggtcaagactgacaacaagtgaaagcattgaggttctggaaaaggatcttgcaatatttggtttttttgttgctttgggtagaagcacacaaggatatttgtctttcaagggtttgactgatttggatgattcactgaatggtattgtaaggtatcttatcggtgggagtgtactatattatccacagctgtcctcgattagttcatatcaactgtagtctgtgaagagctcgagtggcttcctttttacaatgatgatgttttaagtgcaaaaactgatactgaaggtagagaagaagtgcctaaaggagaagtcatatcaagagtcctaaatgtgtgctcttactggatgactagttttacaaagtacagctcatggcttgagaacccttcaaatgtgaaggctgcaaagttcctttctaagggacatgtcatgttgagtgactgcatgaaggagcttgacatatcaagaaatatgtcaaacgacagtggcttcctagaacctgaagaagaattggatactggaacagaattagcttcctttgacaagtcgcttgaaaatgttgaagaagctctggttaagttagaaaatttgcttcaagaattacatgtttccagttcgcactctggtaaggaggatctgaaggctgcatgctctgatcttgaaatgataagaagactgaagaaagaagctgagcttcttgaggcatcctttctagcaaaagcagaatatctggaggccgatgcaagtagcggatcactatctcctgcagaggaaggacctgtaaagacaagtagcaggacgaacgatacatcagcaccacaaaaaacaggaagcagggtggataataaacgtcgcccattttgggacttctttggtcggtctttgaaagttgatccagctcttgcagatcaggatctgatcactgtcgccaatgtggagaaggaaggcatggagtcaaatgacatcctccgcttcgaacagttaagacgtgagctgattgagttagaaaagagagtgcagaagagtgcggatgaagctcaaaaggaggaggagatggttgtcgcagaaaaaacaactgcaccatcgcctggatcatcagtttcttctcgtcagactaccaagaaagaaaatgtcataactaaatcagtggagaaggtcaaagagactacaacgactgtgttgcaggggacacaactattagcaattgatacaggagctgctatgggtttgctaaaaagagctcttattggggatgaactaactcagaaggaaaagcaggctcttcaaagaacattgacagatttggcgtctgtcgttcctataggaatactcatgcttttgccacttaccgccgttggtcatgctgctattttggctttcatccagagatatgtgccatcgatgatcccgtccacatatgcccccggtaggttggatctccttaggcagattgagaaggttaaggaaatggaagttgctgaaggcagcagtgaagatatattggaggaactgaacaaatgaaataagctgggcatgtacagatggacatgattatactgcttagcttacggtctttcctgtaaagttgttttggaacaagacatttgagggggtttgttttatctaaagattctttgaatggcatacccgctggaaacagaagtgcaaggccctaggaataagtaaccaatcattgtgtcgacaaatgttccacgtctgcaggctggtgtatacataaaacatactccacattatacattacatgggcggctcacggtgcccttcaacatagtagaggatgaatgtccaagttcctcctggacagtgttctgtgtagggtagtggttttgatagaggattgtatatctagttggtatgttggtgatcacctttgttttgttttttaggaaccaagcctactacatgcattattgtctgtacccaaatgccaagttcagtgatctcctacgggattgagtggtgcgggcattttctaataataagccaagcccgtgagcaagatgtaggcgtgaacagtgttcgtcagtcgccgccaccgtctcccctcctgatccaatccaatggcgcgcctccacctcgtagccgtggcaatgggcttgctcttggccttgacgacggcgcaggcaccgggcgcgtccacgatgcccgcgcccatggcgcagcctccggcgacctcggcgcctcctcgtcccgcgccatccccgacccagaagaccgctccagctccggcgcccaatgccacggtacccgcccccgcctcgccgccggcgccgagctctatcgggcagacgccgaccgaggcgccgtcctcccctccgccgcccagcgccgcgtccagcgttgcctccgccttgtacgtggccgccgctatggcggctgtcgtgtttttcttctgaggtcggtactcggcgccgatggatccgccgcctatggtatggtacggtgcggtgtggatttgacacgatggctcccgctaccgctggtcgagtttgcttattaggatactagtagttaattaatagttgggttgatcagatcagatctagcgtttttgttgagtggggatattatttcttctacggatctgcacactagggttatgtcactatggttgccattgttattagggaaggtgcaaacttctaatttgaatcacatgatgttgatccaagggacgcataagggacgccaagcttattaaaacgataaaacgatggaacgctcatgggtgaaattttgacttttaaacgtttaaactttgtttaaacatagttttaaacaacataggaaaaataccaatatatcataatttcagacaataatatgaagttaaatactccctccgtcccaggatataaggcgtaactactttttat

SEQ ID NO: 23221 - DNA, 71 bp, Zea Mays
tgatccaggaagcacttcccctttctatatttctattgtataaattggctatggatccgttgtgtgtggcg

SEQ ID NO: 23222 - DNA, 3257 bp, Zea Mays
gtgcagtccagtgctggtgagccgcgtgcggcccgcgggttgccttcttctcttgctagttcacccgtcaccaactcgctcctcgcagcagcagcggacgagcccctctgccctcccctctcgtccctccaggcggcaggcgctagctcgacgttcggccccgcgggccggatccgtcgccacagatccgctgcctcctccccgagtcctgcctgatcgggttttttcagttttccccgttccccgtgggccactcgaccggccgacagggcggaaaggctgccccggccgacagggctggtggcagtgagtccgcgcaggcaaattgaattccggcggcgaatcccatcctgtggtcctctctcgagtcctccgcgtctgcgcctcctccatctcgtcgccgttctcgacgcccgcggatccaacggtccaacactgggtttgcccaacagcccaagtgatggcagacgtccaggaatgccattatgattcaacgtcacaggccactgacagcttgcatgttgagcctatatatgagtcgttcctatgcccgcttaccaaacaggttatgcgggatcctgtctctattgacagtggtgttacgtttgaacgcgatgccattttgaagtacttcaatgaatgtcttagcagcagaaggaggcttgtctgccctgtaactaagatggagctcagcaacactgagttaaatccaagcatagctctgaggaacactattgatgaatggatgaaccgcaatgaggtggctaaacttgacgtcgctcggaagtcattgacttctgatagcacggaaagtgatatggtacaagcactccagtatgttgatgagatatgtcagagaagtcgatccagtaggcaggttgtgagaagagatgggttgataatcatgattgctgacttgttgaagaaaagcagtacgaaagtacggcaaatggcactagagactcttcgctccatcgcaaaagatgacaatgacaataaggttgagattgctgctggagacaatattcgcacaattgtaaagttcttaaatcatggtcagactcaggaaaaggaacgagctgtgtctctgttgtttgaactttcagagaacaaggctctttcagaaagaattggcagtgtttctggagctattcttatacttgttggcttgtcaagcagtaaagtagaaaactcgctgattgttgacagagctgagaagacattggaaaacttagagagctgcgaaaagaatgttagacagatggctgaaaatggtagattgcaaccccttctgaggctgcttcttgaaggttcacctgacatacaattatctatggctgcatacctcggagagcttgttttaagcaatgatgttaaggtacttgtggcacaaaaggctggttccacactagtcaatatcatgaaaaaagggaatagagaggccagagaagcagctttgaaggcattgaaccaaatttcatcttatgatgctagtgcaaagatattaattgaagcaggtattcttccgcctctcatcacagacctctttactgttggcagtaatcagcttcctatgagattgaaggaggtctcagcgaccattcttgcaaatgttgtggcatcgggtgcacgttttgagtccattccacttgatcataataggcagaccttagtgtctgaagacattgttcacaatctacttcatcttataagcaacacaggacctgcaattgagtgtaagttgctccaggtgctcgttggtctaactgattcttcgacatctgtacaaaatatagttgatgctatcaaaggttcaggtgctattgtcagtttaattcagtttgttgaagcacctcaaagggaagtacgcatgaattccatcaagctcctgaataacatatcaccatatatgggtcaagaacttgctgatgcttttcgtggaaactttagtcaactccgcagcttggtcaaggtcattgttgataacaatggtatttctgaagagcaagcagctgctgctggccttgtagctgatcttcccatgcgggactctgtcctcaccagacgtcttcttcaagatggggcatttgcaacaatcattccaaaagttttaagaatccgacaaggcgagattcgtggggggcgttttgtgaacccattcctcgaaggtctagttagaatagtctcccggatcacatttgtcttggatgatgatccagatatcattgttgttgcttgtgattacaatcttacttcactcttcactgatctgcttcagatgaatgggcttgacattgtccagatcgtctctgctaatgcgctagagaaactctcacagcagtcaaaacatcttacgaagatactgcctgctcccagcccagggttgtgcttttcaatatttccatgcctcagccagaagactgtagcaactggggtttgtagagttcactgtgggatttgttctgcaagggagagcttctgtctcttggaggggaagtcagtggagaagttggttgcttgcttggataataataatgagaaagtagttgaagctgccctatcagcgttatccactttactggaggatggagtggacattgaccaaggtgtcatggtgctgtgtgatgccgaaggaatcaacccaatacttgacgtattgtgtgagaacagaaatgaggcactgcgccagagagcggtgtgggcagtggagagaatcctgaggatggatgaaatagcatatgaaatatcaggaaaccaaaatgttggtacagccttggttgaggccttcaggcatggtgactataggacaagacaagttgcagagcgagcattgaagcatgtagataagctgcccaatttctctgggatattttctaagatgggagcacaatgacgacgttacatggaagtagtctaattctattttgacacatggattgcagatccacatgaggcacagatgaacacatgtagattggttttgctgacccgcagatggtggtagcgatccgattgatcgaagaagaatcgaaacattgcacgtgttgtatagtgtatatttctacctgtaaacttgtatgtattttttagattggtcagattcatagaataggttgctatccctgttgtgtttagataaatataaataatgcataatccccagctctgggtggggaaaaagaaagaaatgtgaagtatttgcacgtatttaatcatggttttctggttgagtttattgcgatatgcgttgttgcatg

SEQ ID NO: 23223 - DNA, 1421 bp, Zea Mays
cgccaagaaactgagccatccggtcccaaaagtagaaaagggcaagcgacgagcacagcacagcacagcacaagcacgccttccgttttgggaaggcgaggagaggggaaccccggcccagggagagttgtggggaggggatcggcggcggaggagatggaggagcgggagaagctcgtgtgcctggccaagcttgccgagcaggcggagcggtacgacgatatggtggaattcatgaagaatcttgctaggatggacgtggatatgagtgctgaagaaaggcatttgttctcagttggtttcaagaacactattggagcaaagagagcatcatggagaatcatttgttcacatgagcaaaaggtcgcagctgatcgtcagactggtgtgatgatagatgcctataagaagaaagtagaagaggaactaaggaaggtttgcaatgaagtattgtcagtcattgctattcactgccttcccttggccagtacgggtgaaaatatcgtattcttttataagatgaaaggtgactactaccgttacttggctgaatttagcactggaactgaaaagaaagctgcctctgatcagtcacttatggcctatcagagcttgccaagtggcaaaacaagcatttgatgaggctcttactgagataaattctggtgagggagtttacaaggatagcacacttatgatgcagcttctgaaggacaacttagcattgtggacatcagaactaactgggggtgaagcatccaagggtaacggcgatgtcgacatggagggttgatacattctccatgttttaaggaaacacagaacgcacgcaaaaatatccaggctgtgatgctagcgaacctgggtcctcaagttttttctgcatcggaactaagaagagccttgtgtatttttctgaagtttctgtccgtctcggggttttttttttgaggtctgtttgttcctctcttttggccatcgtttggtcctggagtcagtcactcactaccaagtgtttcagaggtctgaactggtgagcatccagatctgttgttgcttttttttccttctgtgcttcagaggcatctttgtacaccgatggaaaactgtttctcttatcaacgcatagactgtcagtgctgttactgatcatgttcggtgactgaagcgtctctgtagtgttgagatcgagcataaacttctccacgaaattatgtacctgcaaagtgtcggtatgatcttacacgccgatgcagcagttgcttccacgccgccggaaaaaatattggccgtccagcaccgtcgtaaaaataacttggccgtacgtgtattggctgctgcttctttcactttaccgtgagtccgtgagtccgtgacccgcagcttcagcttctgagtaaaagataaaaaaaaaggtgacg

SEQ ID NO: 23224 - DNA, 518 bp, Zea Mays
cggctggatgcagttcgaccgctacgaggagtacaggtacctgcttgcaatcgtgtcgctggggttactctactcgctggcgcaggcggtgcggcgcgcgtaccggatgcgcggcggcgccgaccccgtctcctcagcatctgggaggcttctcgatttcgtcggtgaccaggtagttgcatacttgctgatgtccgcgctgtcggctgccgtccccatcactaaccgcatgagatctgcagttgtcaataactttacagacgcaaccgctgcagcaatcagcatggccttctttgcatttgtagctcttgccttgtcagcagtggtttctggttacaagctctccaaacaaacatacatgtgaatcatcgttctagaagtaaaacccattaggtggaatattcattatggattgcaatccaaagaagagaagcctctgatgcctctcttcaacttggatgtcatctgttatgtgctaaggtggatcaagcatgttcggtgcgcactagatacgtgac

SEQ ID NO: 23225 - DNA, 1230 bp, Zea Mays
atgacttgggttgagataccgagagctgaaaagaaaccactgcccactgatgactgtatacagatcggctggttcccgaaggactgtatgcagatcggacagcggctggggtaccggcgtgcacgaaggactgtatgcagatcggacagcggctggggtaccggcgtgcagatcggctggttcaagaaggtgctcgagaaacagagtcgagaaagcagggctcccagctgccgcgccggaactgatggccgcccggggaggaagaagcgagggcgaagagcagggagaggagtggatgacggatgggtagactccgtgacgctatccaaacgattttgtaggctcggatacaggttcggatcactctggatccatgccgtgctgcaaaccaaacacgctattgctgagaagcacaactttttgatcttcgaagaccgcaagtttgctgacattgggaatacagtaaccatgcaatatgaaggtggaatattccgcatattggactgggctgatattgttaatgcgcatatagttcctggacctggaatcgtagatggcttgaagttgaagggttcgcctaaaggaagagggctacttctgctcgctgagatgagctctgccggcaatcttgctcatggagattacactgctgctgctgtaaagatcgctgagcaacattctgactttgtgatgggatttatatcagttaatcccgcatcttggtcagtaacaccatcaagcccggcgtttatccatgccacacctggagttcagatggccgctggaggagatgatcttgggcaacaatacaacaatcctgagtctgtgataaattacaggggcagtgacataatcatagttgggcgcgggattataaaggcgagcgatcctttgaagacggcatgtgagtaccgggtgcaagggtggcaggcatacaagaacagcttgctatgaggagggcgccgtgagcattccaagcataataagggcaaatccaggcaattggcataacaagggcatgttcgttttgatctcaatccatatggattgagtgagattaaatatgaattgagtgggttttaatctcgaacaagtcaaaatctttcataaattttttcaatcacatccaatatatatgggatagtaataaccgaacaatgtctaacatggaaaggtccctacttatggctaatttgttcatcttaattgaacgtgattgagtgagttcaa

SEQ ID NO: 23226 - DNA, 1545 bp, Zea Mays
ccttcgcctagattcctatctccaccgcgttcgggttcctcccaacacctgcaccgcagaaccaaaccctagctgcgcttcctcctccagatcccggcgccccggccccatggccgccctcgtttctagctccagcttctccgcccgccgtccctccgctctctagctccggatcgcacgcgcacgtaaagacatggagcccgcagccgaggacgccgcagccgctgcgccggactcgtgggagacggccgacatagacgggcccatgagtcggctcatcctctccgcgcgacgcgtgtcctcttcgccggacttcgctgacgaccaggacccgccccagccgccgcccacactgcagccgcagggcgcgccttcggctccctcagatgcgcgcgaggatgtggtagcccaggtcgatcagttcctacgagaggccctcgagaagccaagggagaggctttctgtgctaagaatggagcaagaaattttgaagttcattcatgaccctagtcgtacagagtatgaattcaatggccttccaacttcgtatctgcgtcttgctgcacatcgcctggcgcagcattacttcctgcagtccattgccataccagacaacagtttgcctgatggaactggttcacgtatcatcctccgtaagacaacattcgactgccgactgcctgctgtccgccttgcagatattccagttaacctgccacaagaagacatctctgtggcgaaagtagctattaaacagaggcctcaaaagaatttacatggcatgaacagctcaagtgctcactcttctagagacaacctccaaaaaagcgtcgaagaaagaaaagaggaatacaacaaggcacgagcgcggatatttaacaacagcaatagcagtactgctactgatgagagatcagctgaggaagtgactttacccagtactcttcacaggtccacttccttggagttgaactcaagcaatagaataggtcaaggggctgaaattactcttgagaggagcttgactaccacttcagctagcagcaggtcaaatagaagcaagattgataaggagcctgcagtcaatagaaacaagcagaacaatagggttgcaattttcagagatcgtgagtcagagcgcaaggatcctgattatgacagaagctatgacaggtatatgcaaagatttgatcctggatttggatttagtggaggcccatacacaattcaacccctctatgcccctgctgttaactacaacaccgaattcccccagcttgggtcagcacaccgatcacctgttgctgtcgaacagcaacctcgtccaatagctcagcacatgcctgcatcatggtcagtggctcaagcatctaatgcaattggctatgggccagatggtgtcatgggaccttacagccctggtgcacctgtgagatcgtctgttttcatgcatgcttcacagcaatatgctataccttctcgccctggagtcccatttgcacatccacaggaatcaatgggaccatttgcacagatttttttgtt

SEQ ID NO: 23227 - DNA, 708 bp, Zea Mays
aaatcatacaatggctatgccaaattgtctaatataaccatgcccattcgcaattagaagggaatctaggcaacaatctttgcttctggatggctgaactctgttacatccaccacatttagaacttgctgaagctcatgtaccattctcccttcactgccgcttatcatagagctatctggctaaaaattgggcggacaattaacccttatatccaccgttacaccccttttcttcatgacccgataaatgctggcatgagatggtggtttaggtaggttgaatgcagcactgtcagtcatgtaaagagatgcaagtatgtttatggtattattttactccaaagagaatctttgagaaaactgctgcttgggagtggtgtgattagtcccttgtgtggctttgagctgatgacaatttagtagttagcatgatcagtaactcttaactcttgtaggcttgtagctagagctagtcgagatcttagcctgtttggcatgaactgaagttaggtggggaggttattattgtgaccgaattgttttgatttttctgactattggctattgctgaccacatatcagtgttatcaaagggacgttactattctacgtgttatatggttcacccattgcacagtcttagtcgaagtgtacaaaaagcaacattatcctgttttactaaaatgaatctgttgacacctttttg

SEQ ID NO: 23228 - DNA, 1959 bp, Zea Mays
cggcacgcccgcacgggaaccgggcagcacggcttgctaaacacgcagaaaagaaaagccgttctccctccgtttccccaaaccccaaggtccccaaccatggcagccgccgccgattctgcctccgaccaaaaccctaaggacgccgagcggcacgtgctcaccgccgaatccgacgccgatttctccgaggaggactacgacgaggatggggaggaggaatacgaggaggaggaggagctggacgggccggcggcggcggcggcggagcgggagcggatgcagtccgtgttacggaggctgtcatccgaccccgtgggcatccgcgtccacgacgtgatcatcaagggcaacaccaagacgcaggacgagctcatcgaggcggaggtcgccgagctgctccgcgccgcccccaccgtgcaggacctgctccgcgccgccagtgtcgccactgcgcggctgcacgatctcgacatcttcgacgccgtcaagatcacgctcgacgccgggccgcccgagctgcctggcaccaccaacgtcgtcatcgaggtcgtcgaggtggccaaccccctcactggcaccgccggcgtctattcgaagcccgaagcaagatcttggtcgctggaagggtcacttaagttgaagaacttgtttggctatggtgacatctgggatgcatcaggatcctttggttgggaccaaacaacagaggttggtgttggagtctgcctaccgaggtttaaatcaataccaacaccattgatggctcgggcatctttgtcatcacaagattggctgaagttttcatcatacaaggagcgcctacttggcctttcatttggtttgctgtcaacaaggaaccatgacttgtcatacaaccttgcgtggcgtaccttaactgatccatcacgtgtctcatcaaaggccataaggaggcagttagggcataaccttctttctgcattgaagtacacatacaagattgataagagggattcacatcttaggccaacgaaaggatatgcgtttcagtcaacttctcaagttggtggtctatggaatagcaaaggattgagatatttccggcaggagcgggtgtcattttaccgcttgcagggggattcatgaattcgacttcatcagtgccagagaggttttatcttggaggtaattcttctccagtgtgcagcttgggcggaccgtcatctctgctgggtttcagattaaggggagttggcccaacagaggcgcggaggcatgtccttaataactcggagagtggctcggctgaccctggaagggattacttgggaggtgatctggccgtgtctgccttcgctgacctttcttttgatctgcccctcaagatattcagagacgctggaatccatggccacgcattccttactgctggaaaccttgcgaaactgtcggagggtgagtacaagaacttttcggcttctgaatttcggcaaacgttccggagctctgctggcgttgggattattttgcctaccaaacttttccgggtagaggtgaactattgccgcatcctaaagcaagctgagcatgacagcgcgaagactggaatccagttcagcttttcctcgcccatgtaggaacttgccatggcagccgaaacagctgcactttcctctgtagacttgcatttcttcccgttcttttcatgctgaagcaattgaagaggttatttacgtgctcccttttcttgtgacgcttgttcattgacacgaggagctgctccttttttttggtgtcttcaggagatgggtttattatttgctgtttttgacctcacgagggatttgtcctcgcacaactcaaataccgatgctgtggctacacaatggtggatagaataatattttggcccataatgttgtataattcataccacatcagctttccgtgtcattcgctcgtttattcgcgtgtgtt

SEQ ID NO: 23229 - DNA, 751 bp, Zea Mays
gtttgtctcccttcccttcccttggatccatacacaggagccgaggaggacggcggcggcggcggcgagaagagatggccgacggcagcagcaactcatcggcgtcggtggccatgggacaggaggtgcaggctttcgttgagaacaagtatggtggaatggtgcctaagaagcctctgatttcaaaggatcaggagcgcgcctattttgattctgcagactgggtccttggcaagcaagctgcaaacagcggcaccgcacgggctgcgactgctatcgaattcttgaagccaaagctaaagaggacgccccatcaccagcttccccctcgcaagccgacctgtgcgtccagctgagctcaagacagtgcgaaaatccaaagggccaggcttacaaaagctccctggctgggagagacgatgaagagcgttatcaagttttttttagttggttgcattggttaggaaggcaaattcaggattgatgagccctgcatttggctttgttcgcagcactcgctgaattattaatttaagcatgtgggggacatagataaaactagactcctgctattatatgcttaattgtggaagtggtagatgacacccatctgtttcaatgtatctttggtcggcagatgaaatgtatcctctctatctacttggcttctccctttctttactagacctcatatataatattcaccgaaaagagaatgaacgaatggatattccaatttgggatgaaaatg

SEQ ID NO: 23230 - DNA, 2723 bp, Zea Mays
ccggccgcgacgcggcccgcagccacggccttccgtaatgtcataactccccttctcgagtccatctccaacctcatccctcccaccccaataatacatccagccggcgccatcaggcccggcaacgcgcaagcggggctgaccatcgaaccctagtccccggccgagccgccctccgccgagccttgcggccgctctgcgtcatccctcttagtctccctccgttcgacacggcttggatccgagatggaatcaccgcccctcacagctgaagcaattgcttatacagagaaaaagatggacatggctttggaggatataattaaaatgtcaaagaaaaagaatcctggaggcaagaaacccccgaggcagccgataaaaaagcatccattccagaatggcaactctaataaagggaatggcaaggttcaaagttttatggagtctagatcaaccattagacaaggtgttcttgcacagagaaggtcaaatcttggtggaaatcagttccctgctacaaagcaggctgcgaagaaggctgctgttatgccaatgcacaagggggctatccgttggaacaagccaaggtaaacaatgatgttcttttattgcttatgagaaagtttactgcattcaaggggttgttcaatttattgagtcatgcaccttggattatattggctgagaatgattgtgatgctggtgtttacatggaactgccttaacttctctggttatacacacacaagcttataaagaacaatcgatttcatattcttgtggcacaaggcctgttttcttggttgaactgctacaaatatatgtttcatggtgtaatttatagctgctggatgagtgttattttggacaccagcattaactgtctgtgagggtttcattagtgttatttgtcaactattgttggaaggactgaaggagatgtgataatggttagcgtctcatgccactggtgacggatcatccatatacagggacgttacatgcctgagtttgaattggttttgactactggctccttggcagtgttcagtgtttatttgttgaatgatgaatgcagtgtaaatctagggtagtgctgctaattggacaattgttgtatgcctccaagggagtatattttgctactgcctcatattcaagttggctgtatccgtaacatcatgccagttttgagcatcctatcataatctgctatatgctccccttgttcactgcgtcccacagagataatgcttgcctgcatttctactggataagagtaaatcatggtatcttacgatttatctcagtatgctgggctgtatggatgctatcttttcaaggtcaactgttgggatttattttcatgattccttatgtgaccttgtttgttctggatcagtggtcactatttacatggcttgagttttatcagtttaatcaatcaataagttgtgtcaacttgggacattgttgaaccatgtgcattgaaatttgggtggaactaaacagtctagactccaaaatgtgagggccttggaaaccaagaggatgcactagatattttcaatgaacactttattgtttctgtttcattttatttcaaaacatggtatgtactccctgacttcacttgagaagcgagaattgtatccttgttttgatgggggtatggtgagtttgctcagaaaacaatatggctcttggttctccgttgcttatgattcttggtactcgagcactcctgctcatgtgagatactaatgttttgattttgatacagtgcaagtaccttagtgcagaggaggcctgtaggtggtgcttttcagaatgccaaggtatggagtatggactttgtcaaatcttgaccttaatgctgagtaaataggacaaactggccgaaaaggtcaaggagtccaaccaggcagcaccaaggacgatggatgcactctttgcacagatgaaggcgcaacgcttgaggacggtacctcaacagcaggcaaattcttccccctggagtcatttcaaccagcatcgacgtgttcagcagcagcagaggcgaggcagagggtatggtggccgtaatgttggcaaccaatgaatccaactagacatatctactgcatcggagccctttctcttcactggtcttttggaccttggaagaaaggacgccccttggaaaatcaaacttggctttgtttattggaggggtgacaatgggctctaacttggctttgtttattggaggggtgacatcgggctctaaattttacactaagatttaaggatctgattaagatcaggccctatttctattcatttttaaactaaaatttatttagtgtcctactattttgtgaagcgtttggatcgtgatccattaccacctcacctttggacgtggacaggatatgaagcgaagtttgtttgagttttctagttgtgtgcagtctgcttccgtttcagcatgtataatgacatggaaattatttggtcagagattatgatgtcttgtttcttggcttgattagcttcatccccaactaagagtaattcaccttacctagggatgacaacaggtcaggtttagatagggtagaataaatatccgtccgctataatatttgcgaagattatttatatctgtctatgactatactcgcggataacttgtaccggtatccgtagctattcgtttgattggttatctgtactatttc

SEQ ID NO: 23231 - DNA, 2167 bp, Zea Mays
atggggctgggggctgcgatggcactgggcgacccaccggcggactacgcatccatcgcggcggtggggctgtttgtggcactcatgtgtgtcggcatcatcgtcgggcacctgctcgaggagaaccgctggatgaacgagtccatcaccacgctcttcatcgtgttaagccaagatgagacaccattcttgtacagcctcgtgtttggtgaaggtgttgtcaatgacacaacttctgttgtgttgttcaatgcaatccagaactttgatcctggaaatatcagcggtgccaaattactgaacttcattagcagtttcctttatttgttcggctccagcaccattcttggagtagcttctggacttcttagtgcttataccattaagaagttgtactttggcagcccggtaaagtctatcgctttgagcaacaccattttagccttggtgctggtttcaagagctgcttttgttttcccactatcctttctatcaaatttgaccaaaaaaactccaaatggaaagatatcttttaggcagcagtgcgaggcattttgggagggacatcatcatgcccaacttgaagtcgtccgtgaccacaacagcgagcgcggtggagtacatggatgaagtattgaaggcgttgccgctagggatttttgaagcactaactgcattccccttctccccttctcccttcctgctgtgcgaagccgtgccccaaaccctctaccatcttatttcagttcccactctctaccatcttccaggaaaaaacactagcaatcttacatgagttccaagttttgcaggtcgttgctgtttgtgaatgtggtttggattatgacagacttcagttctgtccgacagatatgcaaaaaaagtactttgagaaacaatttgagttggctgaagcagtaaagctgcccattttcttcacatgtgtgctgctggtgaagacttctatgaaatcatgacacaaaatttgcacagattccctggtggggttacacattccttcactgactcaacagaagatcaggataggctactttcttttgagaagatgtttatcggtgttaatggttcctctctgaaaactaacggaaatcttgaggttgtacgaggcattcctgtcgagaggttgatgatggaaacagattctccatattgtgacataataaatactcatgctggaagccagtatgtaaaatctgtctggccatccaagaagaaagaaaagtatgagccagattcaacagtaaaaggtcgcaatgaaccttgtttagtcagggatttttgaagcactgactgcattcccctttctcccttcctgctgtgcgaagccgtgccccaaaccctctaccatcttatttcagtccccactctctaccatcctccagggaaaaaacactagcaatcttacatgaattccaagttttgcatgtcgttgctgttggtgaatgtggtttggattatgacagacttcagttctgtccggcagatatgcaaaagaagtactttgagaaacaatttgagttggctgaagcagtaaaactgcccatgtttcttcacatgtgtgctgttggtgaagacttatgtgaaatcatgacacggaatttgcacagattccctggtgggttacccatttctttcactgactccgcagacgatcgggttaggctactttcttttgagaagaggcaagttcttgaggtagtggcgggaagcaaagaaatttctgacatagaaggcctgagtagaactctgtaccacaacacatgcaggctcttctttcctcaggatcttgacgcgtctactaatgcgcagcttgagagtggtactgccgtccaggattgctgatgtcagagtgattttttttaaaaaatgtttccttttggttggcgtttggtttcgtacaacttccaatatgcctatgaaatgtttttggtcttataattttccctcgctgccaattttgccatgtttcatgagcctgatgacatgtcaggcaagtcctgactatgtacaagtaccctactgagactatgccctaaaatcatttagggctgagcatgtacaagtacagtttgatggctatgttgttcactacaatcaaacaacaactaagctctatatctatattttatacaaatttttaaattcc

SEQ ID NO: 23232 - DNA, 145 bp, Zea Mays
cagctctatatacgtcaccctcccatatcatcgtcgagcccgtcgaaccccgttcttccctgctcgacctcgtcgaaccccgaatcccggacgttaggcaaaaataagcgaggtccgtgtgcatcgcttatcaaatgctcggtcg

SEQ ID NO: 23233 - DNA, 6518 bp, Zea Mays
gtgcgcctcgtcctcggctgaccggtcgtcgtccagttccacctccctgtcctgtctcctcccctcccctccctcctttctcacacgcgtacagtgaacttctcctcgtgttctccgaggcggagcaaaaccctcccttccccgcgctagggttttagcgcggccgcgacgggaggatcacggcggcccaaggagacggctagacggtcggtggacgccgccgagacgtggggcggcgccgtcgcgtattgaaatggaggaggatcactcggtgatactaatatctgaaggtgctattaaaagcatcaaacttagcctctctaccggagaagagatatgcacatactccataaacgagtgcccagtgacccatcctagccagcttggaaatccgttccttgggttgccacttgaagctgggaagtgtgaatcctgtggtgcctctgaaaatgacaaatgcgaaggccattttgggtacattgaactacctgtacccatataccatccatgtcatgtcactgaactgaggcaactattgagcttgatatgtctgaagtgccttcgaatcaagaaagggaaggtgaaacaaagtaatggaaaaggaaacgcggcaccaactttgtgctcttattgcagggatattccagccctgtctttgaaggaaatcaagacaacagatggtgcaattcgtttagagttgagagcacctcataataaacacatgacagaacgttcatggaactttcttgataaatatggatttcatcatggtggatgttctcaccataggacactgcttccagaagaggctctaaatatattgaagaaggttcctgatgatactaggagaaagctagctgcacggggatacattgttcagactgggtatgtgatgaagtaccttccagtacctccgaactgtctatatattccagagttcaccgatgggcagagcattatgtcatatgacatttcaatagctctgttgaagaaggttcttcagaaaatagaacagattaaaagatcaagatctggttccccaaactttgaatcacatgatgctgaatcatgtgatttgcagcttgcgattggccagtacatacgtctaaggggcactacaaggggccctcaagacaacaccaagcggtttactgttggcagtgctgattcagctgcattgtcaacaaaacagtggttagaaaagatgcggacactgtttatcagcaaagggtcaggtttttcatctcgcagcgttctgacaggagatccatatattgggctaggtgttgtagggcttccttctgaagttgcaaagagaatgacattcgaagagcaggtaactgacataaacattaacagattgcaagacgtggtagacaagggactctgtttgacctacagagatggtcaagctacatatgccatcactgttggatcaaaagggtacacaacacttaaagttggtcagactatcagtcggaggatagttgatggggatgttgtgtttcttaacaggccacccagcacacataagcattctctccaagctttctacgcatatgtgcatgatgaccatacagtcaaaatcaatcctctcatgtgtggccccttttctgctgactttgacggggattgcgtacacatatattatccacaatcgcttgctgcaaaagctgaagccttggagctttttagtgttgagaggcaactcattagttcgcacagtgggaaggttaatctccagctaggtaacgactccttggtagctatgaaggctatgtctcatacaaccatgttacacaaggaattagcaaaccagttggcaatgtttgtgccattttcacttcttgctcctgctgtaatcaagccagttccatcttggacaatatcacagatagtgcaaggtgcatttccagctaacctgacttgccaaggggacacacacttggttagggacagcacaatcataaggctggaccttggcaaagaatctgttcaggactcattccctgatttggtgtcctccatccttcgtgagaagggtccaaaagaagctctgcaatttctgaatgtgttggagccattgttgatggagtttttacttcttgacggtttgagtataagtctgcgggattttaatgttcccaaggctttattggaggaagcacaaaaggacattcgaaatcagtcccttattcttgagcagtctaggtgctctacaagtcaattcgtagaattccgagtcgaaaacaatttgaaaaatgtcaaacagcagatttcagattctgttgggaaattctctgaccttggtctgctgattgatccgaaaaaggaagcctcaatgtcaaaagtagttcaacaagttggttttgttggcttgcaactgtatcgtgaaggcaagttgtattcaagacgcttggtagaggactgcttcacaaactttgttaataaacacttggccattggagatgagtatcctccagaagcgtatggtcttgtccaaagttcatattttcatggtctcaatccttatgaagagttgatacatgctatatccactagagaagctatgatccgctcctctagaggtctgtcagaacctggaactttgttcaagaatttaatggccatcttgagggatgtagttatatgttatgatggaactgtgagaaacatttgtagcaattctatcattcaacttaagtatggggaagatgatgaaactgattcttcaagtgttgtacctcctggtgaacctgtgggtgtcttagccgccacagctatctcgaaccctgcatacaaggctgtcttggattcctcccaaagtaacaatgcttcatgggagtcaatgaaggaaattcttcagacaagaacttcctataaaaatgatgtgaaagatcggaaagtggtcctattcctgaatgattgctcttgcgcaaaaaaattctgcaaggaaagggctgcacttgcagtacaaagttgtcttaagagagtcacacttggggattgtgctactgatatctgcattgagcatcagaagcaaataaatttagatggaacatctgaagctgccccaactcttgtaggacatattcaccttgacaaggggcatttagaaaggataaacattagtactcaagacattctccaaaaatgtcaagaagtttctgggagatttggaaagaagaaaggacacctttgccacatctttaaaaaaattacttttgctacttgtgattgttcattcactcagatgccaatcgatggaaagctacataaggttccatgtgtgcagtttgctttttctgatgacattgtactatccgagtctattgagagagcagtgaatgtgatagctgactctgtctgctcagtgcttttagatacaattattaaaggtgatcctcgaattcaagcggcaaaagttatctgggttgaatcagatgcagcatcttgggtaaaacacacacggaaggtatcaaagggcgagtcagcattagaaatcattgttgaaaaagatgatgctgtaagcaatggtgatgcctggagaacagcaattgatgcctgcttacctgtacttaacctcattgacacacggaggtctattccatatggcattcaacaagtgagggaacttattggcatctcatgtgccttcgatcaagtggtgcagcggctttcaacgactgtaaaaatggttaataaaggagttcttaaagaccatttgatacttgtggcaaacagcatgacatgcactggaaatttgattgggttcaacattgctggctacaaggcaactttccgttcattaaaagttcaagtgcctttcaccgagtccactttgtttacccctatgaaatgctttgagaaggctgcagaaaaatgtgattctgattcattgggatgtgtggtctcatcgtccgcatggggcaagcatgcagcagttggtactgggtcatcttttcaaattctctggaatgaaaatcagctgaaaagcaacaaggagtatggggatgggttgtacgatttcttagcattggtcaggactgaccaagaaaagacagactacatgttcttggacgatgttgactatcttgtagaggagaatgcagcagatgacatgtgcttatctcctgagccagatgggacccttggtaagcctacctttgaggataattttgaagagcaaaatattcagaaaggcagctcatgggaaattggcataacaacgaactcaagttgggaacagaatgctagtgttgcgaatgattctggtgactggggaggctggagtagtggaggtggagctgctgcaaagccagcagatcaagataattcatgggaagtgcatgctaaggtgcaggacaattccaccactgattggggaggctggagcgttgagaagccaacaggtgatggtaattgggaaaagtccagcactcctgaggcatcaaagaaaaatgactcatcagaaaatacatgggacaaaagaaaaggagatggaggtgatggtgcgtgggggaacaggtctgatgatggccatggcaattgggagcatcccagcaattggaatgggcagagtttggatgtagatcaggacacatggggaaacgccaggggaaaaaagaaggcagatggtaactactgtcaatgggaggagcagccaagcaattacaaacagaagaagacaaatgctgatcatgattcctcctataacaatgtgatgccgtcatcagaaattgcttggaatgctggagatggaactggaagaccaaatgccaagtctaatgcagaatccagttggggtgaggaagataagatggagtctgacgatcatccgaaagtcccaaaagaatcagacacatggaatacagggagatcaaatgaaagtccatgggataacactgatgcactgcaggattcctgggttaagagcgcagctcgcaataacaacactcaggatggttcatgggataaagtagtatctatgaaggatcttgattcactccaagattcatggagtaaggcgacaatccagacgaatgatgcacagaatgattcttgggacaatgtggcaaaaaatgccccggattctgccgcagaagactcctggggggctgcaacaccagcggagacaactgattctggtaacaaggagtggaaatcagatggatggggggcaaagtctggtaactggagcagccaaagaaataatcctgggagacccccaaggagaccagatgagaggggtccacctccaccaagacaacggttcgaactaacagttgcggagaagaacattcttctagaagttgaacctattaaattacgtgtgagaagcatcttccgtgaagcatgtgacggtgttagacttaatccagaagacgagaagtttatcctggagaaagttcttgagcaccacccggaaaagcaatccaaggtgtctggtgaaatcgactacctaacggtcaacaagcaccagactttccaggacactcggtgctttttcgtggtctccacagatggatcccaggcagatttctcctacctgaagtgcctggagaactttgtgaggaagagctacacggaggacgccgacacattctgcatgaagtacttaaggccccgtcgcaggcaggcaccaccagctgatgttgggacagcatcaggcgccccggatgaggttccaccgtcaaccgcagctgagacagagcaaggcactcctccagcccctcaggcagaggttccacaagagacttggggttctcccgcagtgcctctggaaggaggaactcacatcgccggaccagactcaacaggcgacgctgtgatcctaggggagcagcacgatctgactccggcttctccagctgtggcaccacaagtggcttctgagccagacacaaccgacggcacggggcttctaggaaaggctccgcaagctgactggggacccagattcgacgctgactgatatttaggctgtgtgaagctgccgcatgtaaaagccagacctgtgctctgagcaagggagcattcccttgctaagtcgtcagttaactccccttgacttcatctggagaggtggacaggtagtagcggcaaacattctagcccttagcggccgcttgctcgtcctcgtccgtttcgtctcgccctgatgggaaccatgtaaatccttgggaacaaagctaccccctgctgcctttaccgtatctagttggaccttccccactgttggaatctgtgagtccgtctgctgttaaatttttgatggtttctgggctgtggcttgccagcggtgatgccaaactctggaaacctagggatttgtttggtgcggtcgtttggttgtcaggtcgatcagcaaatgtatgcctttgtcctccagatatgtgcttgttgagctagtagatagtgttacattgcgtgcctttgttcaatggaagcccagtttgagatggagcacgtgttcgaaaatactcggtatcacttatgagcgtaaatgcgaaataaac

SEQ ID NO: 23234 - DNA, 1244 bp, Zea Mays
ctccacttcccgctcaggcggagacccgctgcttgtggcccatgacataagctatcgggtcgaacctgacgtgaagtcgtgcagcccctgcatttattgaggagaggacacgccgcctgccactgcgctgacgggcgacgtgccctctcagcatttaatgcgtcccgtcccatccgctggcaggcggcgtcaaggtcatccagcaggcagcgcgcctgctgggtctgctggcaaacagtgcgctcgtaccaagtggcgcgctatactcatcctctcttctacaagaagcttcccctgcacgccgaagatacgcagatctcgggcgttagggcacaagaagatggtctcggcaacagacattagtaggttccaagcactatattctttatgtccctggacccacatgtcggggtccagtccctttgtgcatgccccccttcagctataaaaggggaggcatgcgacgttacacacacacgcaatcttagatcacacctcagactctcaagctcatacaagctcacaagcaatacatcccacagtggagtagggtattacgctccggcggcccgaactactctaaatccttgtgtgttcttgcgttctttcccgttcattccaacgatcaagcaaaacgcctaagcccctcctcatctcaggatttagggcgggtgcactccgccacccggccggagatttactctccgacagtatacaacacaaacggtggccgacatcgaagataaaagtcatgcaagtttatgtcgatggactaggattggtgaaggatgaatgtcgagcttaaacgaggtgattggagaaactgaaagacaaaccattggtgactgatacctggggtcattgccaagtgtaatagtaaatgtaggagtacagcgtgctgacaaaatcaaagcgagaggttgatcaagtcaagcgaaggcattagaagacttggcgattcagaattaagaggcgacatatgttatggagagagcatagagagtatactactccagagtagtttggtggtttagaaacttgaggtgtcatatgtgaagatccaacgagcctcttctctctagcacatcgttttattttgtcattgtaggttttcccttcctcttgtttctattgagattcacagatgatttagacactgcactaattatttatctttgtaattcgactctgtaactgataaacgttatgggaatggaagaccttacctcttgtgacaaaaaaaa

SEQ ID NO: 23235 - DNA, 1990 bp, Zea Mays
ggacatgaagagttaagttgatgttcgccttcccctgtcagcttcccgttaccacaatcctagtcttgtggtggtgtgctgtgctgtcgtctctctccgatcttcccgattcttcttaccccttcttcgtcaagccgcagccgtcgcctcccttgctcaccaccatggtgtcggacgccgccgccgccaagaggggagccaaggtcccgaccccttcatcttcgtcctctgccgacgctaaatccatcggtgccgtggccgcgctcaagctctccgatcgcacctgcaccggcgtcctcgcctcccacccgctctccagagatatccacatagagtctctttcattaacgtttcatggccatgacctcattgtagattctgagttggagctcaactatgggaggcgttatggtttgcttggccttaatggctgtggaaaatctactcttctcactgcgataggctgcagagaactccctatacctgaacacatggacatataccatctcacccatgagatcgaggcttcagacatgtctgcactacaagctgttgtctgttgtgatgaagaaagaatgaagttggaaaaggaagcagagattttggctgcacaggatgacggtggtggtgatgctttggatcgtgtatatgagcgtctagaagctattgatgcatcaactgctgaaaagcgtgctgctgagatattatatggtttaggttttaacaagcaaatgcaagctaagaaaactcgagatttttctggtggttggcgtatgaggattgctttggctagagcactcttcatgaatccaacaatccttttgcttgatgagcctacgaatcatcttgatcttgaggcatgtgtctggttggaagagacgctaaagaaatttgaccgcatactggttgtcatatcgcactcccaggactttctgaatggtgtgtgcactaacatcatccatatgcagaacaagaagctaaagttatatactgggaattatgaccaatacattcagacacgctccgagcttgaagaaaatcagatgaagcagttcaggtgggagcaggagcagattgcatcaatgaaggagtacattgcacggtttggccatgggtctgcaaagcttgcacgtcaggctcagagcaaggagaaaactctggcaaagatggagcgtggtgggctcaccgagaaggttgttagggacaaaatactggtcttccgcttcacaaatgttggcaaacttccaccaccagtgcttcagtttgttgaggtcacgtttgggtacacaccagataatctcttgtacaagaagcttgactttggtgttgacctggactctaggattgcattggttggtcccaatggcgcagggaagagcactcttctgaagctgatgacaggtgagctggttccattggacggtatggtgagacggcacaatcacctgcgcatcgcacagttccaccagcatctggcagagaagctggacctggacatgtcggccctgcaatacatgatgaaggaataccctgggaacgaagaagagcggatgagagccgcagttggtaagtttgggctgtcagggaaggctcaggtgatgccgatgaggaatctgtctgacgggcagaggagccgtgtcatctttgcgtggctggcatacaggcagccgcagctattgctgctggacgagccgacgaaccatcttgatatcgagaccatcgactccctagcggaggcgctgaacgagtgggacggcggtctggtcctggtgagccatgacttcaggctgatcaaccaggttgctcatgagatctgggtttgtgagaatcaggcagtgacaaggtgggaaggcgatatcatggatttcaaggagcacttgagaagcaaggcttgtctatcggattaagggaaggccttggctttccttaccttctctttggagatgaagtgccatggagagcaaggatgcgggagaagagaggctgggag

SEQ ID NO: 23236 - DNA, 765 bp, Zea Mays
attgactccagcataatttcccaggttcttgagttaaccacattcaatgatatgctgggcattttcaatctatttggaggcagtggctattctcccacaattagtgttgctccagagaagcagaaatgtggataacttaactggacaatatgttttcttccttggggcctaccgtgcgttttacattctaaactggatttatcgttatttcacggagggtcatcgcagcagatggatcccttggcttgctggtttggtgcaaacagctctgtatgcagatttcttttactattatttcttaagttggaagaacaatgtgaagctcgagttgcctgcttgagcatgcttcgttttgccagaaagcgtgcaagctacgtgactcaagttttatagaatttagttgattatatgggcatggagagacttggtaatgacgtgagcagttgcagttgatgccaaacccttgatcttgtctgcgaaaattggcatttgtgtttcccatggccaagacgatacgattccaaagctaacagatgctgctgcacagaagtaggctagttcctttttgtacctcaatacttttgatatggaaaatcatatacagttcagttggtctgtttaacattcgatttcacttgctccaaacgaaaaatgcgatccaatgttcgtgcgatttctgtgtaaaactgttacacttttgactgtcctcaacaatccattttttatatataatgtcttggtgttactttggcctagtcttcagct

SEQ ID NO: 23237 - DNA, 918 bp, Zea Mays
acatacaaggggatatttcttggtgtatgttttgttcgaacgatgttgtgctagttgatgaaagtcagacaagagtaaatatgaaaccagagttgtggtgggagactctgaagttcaaaggttttagactcaatagaactaaaaccgaatatatgacatgtgatttcggcactactacacataaggaaggagatgttagtatggaaggtcaagtagtaaccagaaaggatacatttcggtatttaggatccatgctatagagagacagggatattgatgaagatgttagccatagaatcaaatcagtcaagatacaagagaggcgacccttgtcatgataaggatttcgaagtatgtatcagaacaaaaaacaatgcgtgggttattgctaaaatcagtcaaggaagggagctttacatggctctagagaagggtggtgaaacgcttctatatgcatccacagctgtagagaaattcagcaacaggtactgtgagggagcattctctacagattagaagcaccagagggagatcttagcttttccatacattacctattatgtacatcctgtttttttcccagctgtatcgttgccccctattgttgagagactcggaccactctttgcgaagggaataaggagttcgtatcagttgtacagctgctctgctgtcgtgtgctatctgcaaaagaatagcctagtctgggaataacgcagagcgggatagagtttgtttgttcacttatgcccttccttaacgcagagcattgtgcgtgttttcattttgctgtaacagccggcgatttacctgcagactgggaaagtaacttagcgtttaatttggtattctgcattttgatggtctcatatcatatggttcgagttgacgggttcgttctgcctccggagaggagag

SEQ ID NO: 23238 - DNA, 233 bp, Zea Mays
tccgccgcccgcactaccacgcccccgctcctctcgtctctatcttcgcctcttccatcgcaggattcagcggccatgggcggcggcaacgcccagaagtccaagatggcgcgcgagaggaacgccgagaagaacaagggcggcaaaggcagccagctggaggccaacaagaaggccatgaacatccagatccagccacggcgcgattctcgaaccctaattgtcaaccatgg

SEQ ID NO: 23239 - DNA, 2907 bp, Zea Mays
acacgaatccttcggaccaaatccgtcctgcttcatcgaggcccaaggcccaatctccgtttctgataaagaaaccaaagagcaacctagcagtcttccttcacttctctgcttccgacctcgtagcgaatcggaccggggggctagggttccggtgcgcctctgcaatcggacgcgaggctaggctgggcatggagggaaccgctgcggcccggaagaggtcccggccggagacggcgaacggggctgccgccgccgggaagcgctccaaagacacggagtcatttcaaactggtctatcaagcaaatcgaagccttgcaccaagtttttcagtacgattgggtgcccgtttggcgagggatgtcattttctgcactttgtccctggtggttacccggcagttgcaaaaatgctgaatctaagtagctctgctgtatctgcgccatcaagaactcatgtggatcatgccgctcttaccggtgcctctcatccagcttctacggtcaagacacgcatgtgcaccaagtacaacactacagaaggctgcaagttcggtgataagtgccatttcgctcatagcgaaagagagcttgcgaagccagcctacatgtctcaagaaggacctcctatgggtggtcgatatggacgagctgaacctatgcaaccagctgccatgggccctccagcaggaaactttggtgcctcggcgactgccaagatcagtgtggacgcctctctggccggtggcataatcggcaagggtggggtcaacactaagcagataagtagaattacaggcgtcaagctctccatccgcgaccacgagtctaaccccaacctaaagaacatcgagctggaaggcaattttgaccagatcaagcaagccagcgacttggtgcgtgatctcatcgcaaccatcagcgcaagcatgccagcgaaaaatccatctgctgccgcggcaccagcaggaggaggccgaggcggtggtccagggggcaagagcagcaactacaagacgaagctgtgcgagaacttcttgaagggtgcctgtacttttggtgaccggtgccacttcgcccatggcgagacggagcagcggagaggtgctgcatgagagtcgagtttaaagatgctgggggtttcgaggccttagtcagcgggaagaccactgagatgcagaggatcgatgtcaatgagcgaatcgttggacttgaacgcctgaatcccacaccgcgccccacaacatcgccgtttctggagggtcgatggaactttgaatggtttggtgatagtagtcctggagcatttgcagcccgtcttttgtttgagaggtcacctacggctgttgcacactttatgggacttgatgtgctgatcaaggatggatactccaagctctcatcaaacctcaagtttgtaaacacgatacaaagcaagtttttactgactactcaattgtctgttgagggccccatcaggatgaaagaggaatatgttgagggccttatagagattcccagaatcaatgaagaatcattgcctgaacagttaaagggcttgcttggccaaactgcaggagctctacaacaacttcctagccctataagggatgctgtttcagaggggcttaaattgccacttagtggatcatttcaacgcttattcatgatctcttacttggatgaagaaatattgattatcagagatgctgctggagcacctgacgtcttaaccagacttgaggggccgcaaccgaatccaggtgacggcacagcagatgcagtgatatcggaatatgaaagctaatgcctcagtgctgactgtagctccgcacctagctcctgtttatggctcctttctcctctttggtcattttctcagtctcgcgcgtatataaagctttctagttctagtgttgtcaacgatgatgaccactcgagtgtttttacttaatacataccatttgtctattctgaatatgagcaacaatatctaaatattcaaatgtccatcaccagtttatatgaaacacggtaaaacaaaaaaaaaaggtactggttgtttaaagttaaaaactgaccagtaagttccaagatacgtacgggctggtaaccgctcgatgcgtgcagagaaccagtgacagacagcaacctctatcaaaaacaaaagagactagaagagttctattcaaacactgatgaagttcattgttctattgggctcatggaactatcaaaaagaggacagacatggaaccatgaaacatgtccggtgatttatgtttatggttgcaaaacgattaaagttgagatcgttcatctcataatgtaaatgcttgcagagaaactgaccaggagacttggggggtaaacattcccatgcaccatctgatcataacttaaagccggccaccccgtctgtgtcgcaggagctgaggagaaaatcatagaagccatcgttgtagccatccggatcgagatcgtacagtaaccctcccccttctccagacgatgtttcggcctccactttcatcggcgacgacatcgcagtcggctgccacgacgatagcgatgatggcgaagcatcctcgtccgtgagtgccgacgccgcgcaggagcccttttgggacgatggcattccggtgagccgctggacgaccttacgaaagtcccgagcctctgttttgataacctccggcgccaagacgtgaacgatcctgatcttacgcggcggcgtcttcgggatagcgtgggagagccggtgctgtgacgacgatgcaccgcgggacgggagcttcgcggcgtgtttcatggcgtcgccgttcgtgtgtgtgagtgtgagggggagagagaccgaacgagatggagccaccgccgccagtggagaaggagctgagaacactggag

SEQ ID NO: 23240 - DNA, 1502 bp, Zea Mays
agaaaaccttctcacgcaggtcgagaaaactcccgaacccctgccccacccatacacagcggcactgtagcccatgtgagaacacgaccgtgaccggaattgggccttagacctgtattttgcgtggtacagacaagtggatttttttaaccacagcctgaaattcgctcccatagggagtcgaacccaggacatgagaagtgctacttagaccaaactaaccaactcggctagagaccctttcgctatgtacctgaaatcaaatattggtcttttgtttcataggattaacacctgtactcctaataatcccagatcccattaaggtacctgaggatcatccttgttttggaacaacgtagaatgcatcggcttgtactgtttgaagttaatagagccaacattgttcttaacggaagtacattttttaactgttagacattgcaatgccatcccataattagattcagtcatcccggtccaaaaaaaaaagattcagtcatgtaaaacagacatctagaagcccttcagtacatactgccatttactttaccttcaaaattttatatattgctgactcttgccacttattaccttattttttatggaggatgaatacctttttcacttctgcagagtttgtcaacagaagacagaagaacctctggtcgaccttggatgtagatgtcgtggtgatcttgcaaaagcacatcgcacatgcattgatgtttggtttcgtactagaggttcaaacaagtgtgagatatgccagttgctgccaatatcccccctccagagacgcaagcaagtggatggtttagcccactttgggttgcatttgcaatcctgattggtggtctcttattggatgtgctgatatctgtttctcttggtgtttccgcacttcctgtcaatataataattggcgttcttatagttctcggattgggcaccgcccttcgtcttgctctcgagtgctgccaggaatggggctcaaggaggaacgtaggcaatatgccgaggctggagaacataccgccgactgggtaccaccctgcagtagtataatcattatgggacttgtaaatagcggtaggaacatctaaccttgtgctggctcttggattgtattagctttagctcacacgttgctcgttaatgtcgagctcaaattcaaagcttgttgattacgatcgggtccatactccactagtccaatgcaatgtaaatgcagagttactgatactcggtcttcatggactagtgctgatgccgaattgccagcatcttaattggttgtctggctaatcgttcagcatgacagcgcttggtttcttcttccttgtacggtttgctctcacaaatcacttgttgtgtttcatcttatctgtggcttgttggtataggcatttgtgaaggccatttgagcgaatgctgttttcatacgtttatgcacagagttgtgtggatatagcatttttatgtgaactaataacctgctg

SEQ ID NO: 23241 - DNA, 367 bp, Zea Mays
cggcatccccccccctgcagccggtgagctgctgtgagcctatccagtggcgattccattcctctccgtgtggacgcaaggactcagtgaaccacttccagatactcgctgcttctcccgtgcccatggctacaccacttatagcaggacttgcagttgcagcagctgcccttgccggtagatatagcatccaagcttggaatgcttataaggcccggcccgtagttccaaggatgcgcaaattctatgaaggtggtttccaacctacgatgacacgaagggaagctgctttaatccttggtgtcagctaataatttgggctttagaaatggcatcattgaaagtgacaaatagacaattttataca

SEQ ID NO: 23242 - DNA, 2233 bp, Zea Mays
ggctctctgtgtcccccattcacttcacactctagactctagttcgccccatgagtctggcaggtcaaagaagggaagagacaaccgaaggatcaacggatcaagcgaggtagtcgactccgcgtctaattaaacctgtggtctgcggacgggcggtcgtcggttagagcattgcttccgtgtggtgcggttgatagctcggatcttctgctggccgagttcgtcttggaggagaagagagagagagagagagagagagagcgccgggatcggagccaggaagcatccagcagcgatggcgggcggaggggtggcggcgctgggcgtgaagacggagcgcgcggcgcagtacaaggggcgcatgacgctcgccgtcgccacgacctgcctcgtggccgccgtcgggggcgccatcttcggctacgacatcggcatctccggaggcgtgacatccatggacccattcctggagaaattcttcccggtagtgttccaccggaagaactccggcgggaagaacaactactgtaagtacgacaaccagggactagcggcgttcacatcgtcactctacctcgccggcctcgttgcctccctcgtcgcgtcccccgtgacgaggaactacggccgcaaagctagcattgtctgcggcggcgtgagcttcctcatcggcgcggccctcaacgtggccgccgtgaatctggctatgctcatcctcgggcgcatcatgctcggcgtcggcatcggttttggcaaccaggctgtgccgctgtacctgtcggagatggcgccggcgcacctccgcggcggcctgaacatgatgttccagctcgcgacgacgctgggcatcttcacggcgaacctgatcaactatggcacgcagaacatcaagccgtgggggtggcggctgtcgctgggcctcgcggcggtgccggcgctgctgatgacgttgggcgggctctttcttccggagactcccaacagcctcattgagcgcgggcgcgtggaggagggtcggcgcgtgctggagcgcatccggggcacggccgacgtggacgccgagttcacggacatggtggaggcgagcgagctggccaacaccgtcgagcacccgttccggaacatcctgcagccgcgcaaccggccgcagctggtgatggccgtgtgcatgccggcgttccagatcctgacgggcatcaactccatcctcttctacgcgccggtcctgttccagagcatgggtttcggcgggaacgcgtccctctactcctccgtgctcaccggcgccgtgctcttctcctcgacgctcatctccatcggcatcgtcgaccgcctcggccgccggaagctcctcatcagcggcgggatccagatgatcgtctgccaggtgatcgtggcggtgatcctgggcgtgaagttcggggcggagaagcaactggcgcggagctactcggtcgcggtggtggtggtgatctgcctgttcgttctggcgttcgggtggtcgtggggcccgctgggatggacggtgccgagcgagatcttcccgctggagacgcggtcggcggggcagagcatcacggtggccgtgaacctgctcttcaccttcgccatcgcgcaggcgttcctgtcgctgctgtgcgccttcaagttcggcatcttcctctttttcgcggggtggatcaccgtcatgaccgtgttcgtctacgtcttcctgccggagaccaagggcgtgcccatcgaagagatggtgctgctatggcggaagcactggttctggaagaaggtcatgccggacatgccgctcgaggatggctggggcgcggctgagggtcatgcggcacctgccagcaacaatcacaagggatgactggagtgaagcatgcatggttgcctggttggtttcgtggacactttatataataactgaagaaaacaagacacacactaacatgtaggcggctgcttattcttattgtattttgtataaagcaggctgtgtgatatgcagggataaaaacgaacgagatcgttccaaataacctctcttttgttttcatttttacattttatttgggaaaaaagattgaagaagggactagcgggataacgaaaacgaactaaaatgaacataacaaattaataatagatcaaaatcgaatataaaaagtatgaacatcaccgctttctcttttctaaaaaccaaaaaaatgatcaaaatatctataaatacgaa

SEQ ID NO: 23243 - DNA, 2924 bp, Zea Mays
gtcaccacttggtccaccccttcgctgtcctctctggctaaaaagaaccgcagaaagatcgttttttttccctgtccccgttcttgcactcgagttcttcagttcttaggaatagtcagacggaacaactcgagtttgccatggtggtgatctggaaccggggtgtgctgccccctctttgattccctgattggtctcgctccagttcgacgcgggatttggacgggacgggcggaagttgggagagcagagcggccggcatgtttgggtccagggtccaggatgaggtggagatgcagaggaggcctaacaacaggatctttcccgacgagagacaaaatcaatctaagtcattgtatcaaactacacgggctgacagatttggcgcaaatagaatagatctgaagaatcctgagaagcttaaggtgttaaatgaaagcaacaaaccctggcaccagcgtattctagaccctggaagtaatattgtactgagatggaacagggtgtaccttgtggcatgtttgtttgctctttttatagatccttttttctattaccttccattgattagacaaaatggcaatggatcttcatgtgttgccaaggaccagggactgagcataagaatcactgtcctacgatcacttgctgacttattttacatgttgaacatagcaatcaagtttcatactgcatatgtggatccaaagtccagagtccttggaaagggagagcttgttgtggatattaagaagattcaacgaagatatataagaactgatttctttgtagacatacttgcagctgtgccacttccacagatgcatattattttgactaaattgattgatttgcgtctatgtggcggtaagattctcatggtaagcctttgggttgagtccatgtcattattttccttaatataagtaagtcatccgaccttcctggtgatgttgctatttcctatcctaggaaattgtaggcagtaaacgtacaattgcgacaaccacattgtgacttaaggttactgtgtggttaattatgcctgcgataaaaagctcagattataacatccggaacactacatttgctctcgtaattgtaattcagtatgtcataagaatgtatctcatcatccctttaagcaatcagattatcaaagctgttggagtagttgcaaagtcagcttgggggggagcagcatacaatcttcttctctacatgcttgcaagccatattactggtgcaatatattaccttctctccatcgaacggcagattacatgctgggatcagcagtgcgttgctgagtacaatgatacacattgcaactttagttttataagctgtgagaataatggttctaatgattattctgtgtgggcaaataagacaaaagtatttgccaactgtgatgccacgaatagtagtatatcatttaactacgggatgttttctagtgcactgagtaaaggtgctgtatcatctccattccttgagaagtatttcttttgcctatggtggggcttgctgcagcttagttcaagcggaaatcctctcgtgacaagtgcatttatcacagagaatgcatttgcgatagcaattggtgctatcagtctcatactctttgctcagttgattggcaaaatgcagacatacctgcagtctatcagtaaaaggcttgaagagtggaggctgaggcaaagggacatggatgagtggatgagacaccatcaactcccatctcatcttcaagaacgtgtgcggcggttcgttcaagtcaaatggcttgctacaagaggagtagaagaagaatccatcttgcaagctttgcctgctgatattcgtcgggatgtgcagcgtcatctttgtttggacctcgttagacgtgtaccttttttctctgagatggataaccaacttctcgatgccatctgtgagcggctggtgtctttcctgtgccctgagaacacgtacatctctcgcgagggtgatcctgtgaacgagatgctcttcattatacgcgggaaactagagagctcaacgacaaatggtggccgcagcaacttcttcaactccatcatcctgcgccccggcgatttcgcaggcgaggagctgctcacgtgggccctgctccccaagaccaacgtccacttcccgctctcgacaaggaccgtacggagccacacagaggtggaggccttcgctctgcgggctgaggacctgaagttcgtcgcgaaccagttccgtaggctccacagcaagaagctccagcacacgttccggttctactcccaccactggaggacctgggccgcctgcttcatccaggccgcttggcggcagcaccagaggaggaagctggccgagagcctcagccgctgggagtcgtactcgtggtggtcggcggaggaccacccaaccggcgataagccgaggcaggagggcacctcgagcggcggcggcggcacgaggacgatcgctgaaggtgccatcgcccatatgcacaagctcgcctctgcttccagaaggttccgcaccgaggacgtcgctatccgcaggctgcagaagcctgacgagcccgatttctccgcggaccattttgattgaaccttcttaatattgtgcttcgcagctgggagttgcatgttgtacgaacgatcgcagccgtagcatatatactctactgtaattttactgcacagccatcttaggtgtcgtgaattgtaatagaaaaagaagatgtatcgtgtaattctaaatccagaatctaccctgtataggcttaaccttttgtgcagtgcataaacttgagtatttcgaagcgtcatatgtgacttgttagagaccagagcagtgacagcactacagatgagtgataacattggtatagctcgagcacatgtcaccagcgccaactctgc

SEQ ID NO: 23244 - DNA, 2012 bp, Zea Mays
acacaaaaacctacgcgcacccggccgctctccagtgggcaggcagttggcctcctttcctcgccgcgctttggagcccacctcggtctcggtgcagtgtctcgctcgcgcgtgccggcgtgcgtgccctggtggcccatggggaggaggataatgaagagtgggcgacgcacgacgatgcagccgcggccggcgcttcttctcctcgtcctcgtcctcggcgtgtcgctgcgtggatgcattgcgcagggcgggggcggaggaggagggctcacgcgggggagcttccccaagggcttcgtcttcggcaccgccgccgccgcttaccagtacgagggagccgtgaagacggatggcagagggcaaacgatctgggacacgtttgcacacacttttggcaagatttcagacttcagcaacgcggatgttgcagttgaccagtaccaccgtttcgaggaggacgtgcagctcatggcggacatgggaatggatgcgtatcgcttctctattgcctggtcaagaattttgccaaatggtacgggccaagtcaatcaggccggcatcgaccactacaacaaagtgatcaatgcactactatcaaaaggaattcagccatatgtaaccctgtaccactgggacctcccccaggccctggaagacaggtacaacggatggctggacaggcagatagttaatgactttgcggcttatgctgagacatgcttcaaggcgttcggagaccgtgttaagcactggatcacgctcaacgagccgcacacggttgcagtccaaggctacgatgctgggcttcatgcgccagggcgttgctcggtgctgctccatctatactgcaggacagggaactctggcactgagccctacatcgttgctcacaacttcatcctagctcatgccaccgtttcagacatgtacaggaggaaatacaaggcagctcagaatggtgagcttgggatcgcatttgacgtcatctggtacgaaccaatgacaaacagcacgatcgacattgaagctaccaagagggcgcaggagtttcagctaggatggttcgcggacccgttcttcttcggagactacccggcgacgatgcgggctcgggttggagagaggctgcccaagttcaccgcagacgaggctgcccttgtcaagggggccctggacttcatgggcataaaccactacaccactttctacacgaggcataacgacaccaacatcatcggacggctgctgaacgacaccttggcggacaccggaaccatcagcctgcccttcgacaagaacgggaagcccattggagatcgggctaattcgatatggctgtacatcgtacccagcgggatcaggaagctgatgaactatgtcaaggagcggtacaatagcccaacggtttacatcactgaaaatgggatggacgacggcaacagccctttcacctccctccagaacgccctcaaggacagcaagaggatcaagtaccacaacggctacctcaacaacgttgctgcctccataaaggaggacgggtgtgacgtgcgtgggtacttcgcgtggtcgttgctggacaactgggaatgggccgccgggtacacctccagattcgggctctacttcgtggactacaaggataacctcaagaggcaccccaagaactcggtccagtggttcaagaccctgctgagctccagctgaaggcgtcacacgggctgtgattggactgaccatttacccgacaccatacccttatcctgttgtgtcaagcactcaagctccaatcaatgtaaaataatgttacccctctctctctctctctggtagaaaaacatgtcgtgtagggctacatttagttacacattaaaagggcatatcagtaacttcaaacttagttcgtttgaaagcataagttacacgtgtggatttgtattgaaatacactttgtaaaaaaaagtcatgtttgtaaataaattaaataatatagcctagaataaatcagc

SEQ ID NO: 23245 - DNA, 2146 bp, Zea Mays
aaaaccaggccgcacgagcacactctctcctctcgctcgcgtccgcacaaatcccgtgctcccccgtctgaaaaccctccccacctccggcggcggcggcggcgctggcgaccgggtgtcttctccggcgagtctcccccctagtaacaagaaaatatggatgtacctgttgatgaccctgtggagaacctcactggaagtcctagtacccttggcaatgaggaagaagccactacttatgctaatgtgcaagatcagtccaaggaagaaccagaaaagctttacgaggaacccaaagacccaatgcaagacgagttgggtaaccaagggcatgtgagcatgaacaatgaagatgtgggaggccagaacaaagtggaccaagctacccccacagagcacggcgaggaagctggggtgaagcagcatgatgctacagttcctgatgacaagaaatggcctgggtggcctggagagagtgtgttccgtatactggttcctaccacaaaggtgggtgccgtcattgggcgcaaaggggatttcatcaagaaaatgtgtgaggaatcaagagcccgcatcaaggttcttgagggaccaccagctgtgccagaaagagctgttcttactgctgtctaaggcctcaagttgagtcatttgtgtatccaaatcccaaaatagatgtacaatcatggttaccaaagtacagtcttgtgctcctctgctgcacatgtggtttaagccttatgaatattggatgaagatccctgtgaagaagctgcactttttgtctggtaatgatttcagcaaaggatgaaccagacacagagctacctccagctgttgatgggttgcttagagttcatagaaggataacagatggtttagaaactgaaactgatcagcctcaacgagctactgtcaacactgggccgacaaggctactggttccagcttcccaagctggcagcctaattgggaagcaaggagcaactattaagtcaatacaggatgcttcaaagtgcgttctccggattgttgagaatgttccacctgttgcattaaacgatgacagagttgtagagatacagggtgaacctcatgattctcacaaagccgtagaactgattgcaagtcatttaagaaaatttcttgttgaccgcagtgtcctccctttgtttgaaacacagattaaagcacacaatatgcacagagagcaacctatgcctcctccacaggcatggggcccccctcctccgtcaccctggggtcatccaccaccaaaccttcctcctggtggcccaggttatgttgggaacccacactacatgcctccacggccacaagagaactattatcctcctcccgatgtgccccctgtagaaaagcagccacactatggaatttcttcatatggacgagatgcacctccaagtgctcccccagggaatcaaaaccaagcacatgggtcatctcaggtgacacacagcatgcaagttcctctttcctatgctgatgctgtgataggggcagctggtgccagtatcagctacatccgcaggcatagtggagcaactataagtattcaagaaggcgctcctggcgagatgacagtggagattacaggaagtgcttcacaagtacagactgctcaacagctaatcaagggaccaccagccccaggtccacacggtcaaccagtggacacgggttacggctcgtacccaccttacggtggagcatcctatgggtctcctccaggtgctccagctccagcgcctcacaacggtggaagttatggtgctgcaccatactcgtcgagctatggatactaatccggagcaagagcttgcctcagacttagggaaggagggttatcgttatggttttgtttgctagtctattcatctgttgagaactcaagattgttattgttaggacgtgtgaactttggtgttctaggctgctttcagacgccagtgtcgatatactctctttgctttattgttgcggaatttatcgtaatatgttattttaatgttcaagaaaaaaccaacaaaaaaaaacatctataattccaatgctatttttttctgtgcggacattgaaaagaaacttgctttataaagctgttttcagcctcttgtcaaac

SEQ ID NO: 23246 - DNA, 1843 bp, Zea Mays
tctgcctccagtccgccgcccgcgcgactgctccaacgaaggaaagtctgatcccgccatggcgccatctccacccccgcttacctctctcggccgccatcatggaaggtccgaccccgccatcgctgtccccacgcggttgctccaaggaaggaaactctgatcccgctatccccgcccccgctctctctcgccatctccgtgcggctgctccaaggaaggaaggtccgaccccgccatcgccatccccgcgtggctgccttcccctctcgccatccccgcgcggctgctccaaggaaggaaggtccgaccccgccatcgccatccccgcgcgcccggtcgagcgccaccagccgcataagtctgggctagcgccgccggccaccattggctcggtcgagcacctcatgcccacgacggtcagtcgccgccttcatggctcagagtcgtcggtccctgcccaccaaggtcaccatgggctcgacgacgatggcaacaaggtcaaggtcgtcatcacaacccaagaaaaaatcatcttctacgattcagagaaattatgtgaagcttcaatttgactccatgcaacaggtttagctattgacaacctcgattacattttcacagtgggagctccttcgattattaaccacagttgtgtaccaaatgcagttttgatatttgatggtaggacagcatatgttcgtgcattgcaaccgataaataaagatgaagaggtatctataagctacattgagactgcggcagtcaccaagaagagaaacaatgatctgaaacagtacttcttcacctgcacatgtccacgctgtgtaaagggttttgatgaggatgcactacttgaggggttcaggtgcaagagccaagcatgtgatggctttctgctgcccaactcaggtaaaaaggcttatacatgccaaaaatgtggtgcttctagagatgtggaagagataaaaaatatgagaagcaaaatactacagttatcggataaagcatcttcatttctttcatcaggaaataaggctgaagcaggttctatctacaagataatcaaacagttagagagaaatctgtaccatgctttctcaactactttgctgcacacgtgcgaaacactattgaagatatatctggaattacaagattggtggactgcgttgacatactgtagattgacaattcctgtttatgaaagagtttatccaccttttcatccgatgattggattacaattctatacttgtggaaagcttgaatgggactggttcggagggagacggcccctcactctctgccctcctgctgcctgcctactgctatactgttctcttgtgttcatgttcatataaaattcagtttcatgttcatattttcataactgtatatgttcatcttatcatacagtttgggtccttgaactttggaacactgaatccctactactctccccccataaaggctccgccgccggtgccgtggcctgcatcgcatgcccgacgctctacgcctacctgaagaagacagaccccggagtgcccgcgcagctgctggagtacgacgagcggttcgggcagtacggctgcgacttcaccttctacgactacaaccgaccggaggagctgccggcggcgatgaagcacgcctaccgagtcatcgttgccgaccctccctatctgagtaaggagtgcttggaaaaggttgccaaaacagtatctttcctcgcacgacctgaaggttcattcctgctgctgctcacaggagttacacatttacgatggcatcatctgcttctacatgtatgcaactgtatataatgtagctaaaacca

SEQ ID NO: 23247 - DNA, 530 bp, Zea Mays
  misc_feature (529)..(530): n is a, c, g, or t
cgccccgccacctcgcccaccatccagaaactcgaatcgtagacacgaacgactacttgagagaggagaggcggcgggagagagaagagtcgacgacgacggtaaccggccgccatggagattggtatggcaagtggactggaaactctatgcggtcaagcctatggagcaaaacagtatgataaactggggatgcacacctacagagctatagtcacactcattgctatactcggattcttgtaaggagacccgctcacctccaaccgttgaggccttcaaaggagtcagtgtgtttctacgcctggctctgccgtctgcactgatgttgtgtttcgaatggtggtcttttgagatccttattcttgtctcaggaattttaccaaatccagagctgcaaacttcagttctttcaatctgtttgacgactatcacattaatgtatactataccttatgggcttggagcggctgcaagcactagggtagcaaatgagttgggtggtggtaaccctgaaggagctcgatcnn

SEQ ID NO: 23248 - DNA, 3696 bp, Zea Mays
gctcagaccactactctccccttcctctcgccgcacgcaaatggtcacctaggcgcgcgaggccgacgcgccgctcgctccccacccaatgtcgcactgcccccgcgcctcactctccctcgcgccgccgtcgcccttcctcttcccccactgcccgtctccgcgccggcggcggcgcccgcgcggtcgcagcctccacctgacctcgcgccccctcctcaccctcgctcgcttcgacccgccgcggctgttccgcctcaaggtctccgactccagcgcctcccccggcgaggccgctcacgcccacgcccaccacagcaaccaccgcgcccacgcccaccacagccccgcgccgtcgctgctcccgtggccgcgggccctgatcggctcgctcgcgccggtatggcgggaggggctcttcctcgtgcgctgctccgtcttcgccgccgtggtctccgtcgccggcgcgctctcctggttcgcgcagctccgggcccgctccttcgtcgaggcccgcctcctgcccgctgcatgctccgcgctcagcgagtacctccagcgggaggtccgcctcggcaaggtgcgcagcatctcgccgatcgggatcacgctgcagacctgctccatcggcccgcacgaggaggagttctcctgcgccgaggtgcccgtcatgaagattagggtacgccccttcgccagtcttaggaggggaagggtcgtcgtggacgccgtgctgtccgagccctccgccctggtggcgcagaagaaggatttctcgtggctcgggattcccgcgccctctgagggcacggtcaagaggcactcgggggaggagggcatagactaccgcaccaagacgaggaggcttgccagggagaaggccgcggagcaatggaacgaggagagggataaagccgcaagggaagccgctgaaaagggatacaccattccgagcggccaatcggttcctctgtccagtaatgagattctggaggctgatgggcctaccgagattgggaagtccagtccacccctttgcgctgatcaaatgcacaagaatgatcatcacttggcaacaggcatcgactctggttcaaagcatgcagatttggagaaatcttttggcttcaaatcgcccattccagggatcaacctctggtctagggtgatttcaagccctagtaggctcaggtacatgagaaaggctcccagcaaggttattccagatgttgataattcttctcagcaaaggattcttagacgcagtgcagatgctgctgtatcatattttcagaacacaggtcacattaatattgatgattcatctcctggaccaggaaaaggctcgtcggatggtggtcatgccaatgttggtggcagtggaatcaattcaaatgatgaaactgtcagcaactctaagactgcatcaacgagtttggctgaatccccatcgcatagtcaactatctagtcagtgcagttcaagtaatttggataacttgttactatggcacaatttggaagatctgcagatcggtcaggccaagaatccttctggaaataagcctgttccacaccaagaaaatatttttgggaattttggttcatgcacacatgctcacaactgggtgccattttggccgttccaattaaagagttgtcctgtcagttttaattcaccttgggcatctctggaccttcaaattgagaaattgaagtcacaatttgccattggtcctggagatttctctgctgaacttacagaaggggttagtgagatccatcctggtggtgttcagaatgcacttccaatcaccctggattctgtgtatttcaatggaggtaacttgatgcttctgggatatggtgatcaagaacccagagaaatgaagcatgctagtggtcatgtcaagttcaaaaacaattataatcgtgtacacgtgcatgtaactgggaattgcatggagtggaggcaagaccgatcttctcaaggagggggttatctttctacagatgtatttgttgacatagctgaggaaacatggcatgctaatctcaatatagtcgatgcatttgccccgctgtttgaaagaattttagaaatacctgttgtttggcacaaaggaagagctaccggtgaggtgcatatctgtatgtcaaagggcgatagttttccaagcattcatggtcagcttgatgtgaaaggtcttgcttttcagatattggatgccccatcatcattttctgatattgtggcaaaattatcatttcgtggtcaaagagtatttctgcacaatgcaagtgggtggtttggtgacgctccagttgaagcttctggagatttgggactaaatcctgaggatggagagtttcatctaatgtgccaggttccatccgttgaagttaacgcacttatgaggacaatgaaaatgaaacctcttatgttcccattggctggttcagttactgctgtatttaactgtcaagggccccttgatgctcctgtttttgttggaagtgggattgtctcaaggaagtctttttcagtatctggtatgcctccatctgctgcttctgaagctgtgatgcaaaacaaagaggctggcgcagttgctgcatttgaccatattccattctctcatgtgtcggccaatttcacgttcaaccttgacaactctgttgctgatttatatggtattagagcatgcctattggatggcggagaaattcgaggggctggtaacgcatggatttgcccagagggggagggtgatgattctgctatggatattaatttgtctgggactattctgcttgataaagtattgcatcgttacattcctggaggaatccaactgattccactcaagattggagagctcaatggagagactagactttctggttcccttattagaccgaagtttgatatcaaatgggctgcaccaaatgcagaagattctttttcagatgcacgtggcaatattgttattgcacatgattacattatggtcaactcttcatcagtctcctttgatttaaatagtcgagttcaaacatcatatattaatgactacttgttgaacaaggagacttatcaaatgaaaaaaatcatgccactaattgtggagggtgttgatttggatttacgtatgcgaggctttgagtttgctcatatagcctcttcaattccttttgattcaccacgtccattacatttgaaagcatctggaagggtcaaatttcaaggaaaaatcatgaaatctagcaatatagctgatggcaatatcaatggtgttcttcaaagtaacattgaccaaaataagcttgagaccaatgcgtcaaagcttgtaggcgacatatctctttctggaattaaactcaaccagctcatgctagcgccacaatctactggttttctttccatatcacgggattctatgatgttgaatgctactggcaggcctgatgaaaatttttctatagaagtgaatgggccattgcttttcacttcaaacgaggttattcaagatgtaaggcttctgtctatattcctccaaaagggccagctgagatctaatatctgttatcatcctgagaatttgaccagtctagaggttcggaatttgacactcgatgagctggagtttgcttcattgcgcggatttgttcaaaagagtttaaatttacaagtcac

SEQ ID NO: 23249 - DNA, 664 bp, Zea Mays
aggacctccatgatcgctactgccataactcgtttcgacatctccttcatcctcgtcgctgctgctcacctacccagtgggcccaggcgccaggccgcaccatgtctcacgcgcgtgctcgtcgcgcggacgcgcagcagcccatcagctgctccaagttctcctcttgtccaaaactgcttctctcgcgcagcagagcaaccgcgccaggcttcttctccaggtccgcgtgtgagaatcgcagcctctgttcatctcccaaatttcaaaccatctcctaccaacgtcgcgaagacctgggatccatggcgcccttgcagcagaccagccggtcttggcaccccaacccctgcggctcccctgccatccgtgtcccctgcgttctagggtggtcgtcccgcgttgttgccgtcgagattgcgatctgttcccgagcttcgaggaatcgacggacaagcttcagcgaccaagagatcgaactcttcgagttctacgaggctgaagattctgagcatctgtttggtgaaggcaagtgtcctctgacctattatatcccatttactttataattcatcaacccgcataccatgatcaacctaaggattgactagctttgtatttaccttgtccttgactaccttttgggctattatggttagcttca

SEQ ID NO: 23250 - DNA, 4336 bp, Zea Mays
acggccagcaggtaccctgacgatcaatacgacagattatggacacctatgattattgacgccatcgactggctggtgctatccacgacggaaaaggtgcggaacatatatgatgacctcttcgaggtgccgtcgaaggtgatgcagacggcgatcacgccgcgtgacgctaccagcagcatcaacttctattggaactccaagggctcgtcgcttgggtacataccggtcttccacttctccgaggtgctgcaggcgggcgccggcgttgttcgccagttcaacatcaacatcaacggcaagcggttcacctcccatgattattacacaccacggcacctcgaaagtggctacgtatacggtaccagaccttacaccaaccagatccggtataacgtctccatcgttaagacagacacgtcaacgctcccgcctatcatcaacgccgacgagattttcatcgtcatctctacgaccaacgttggcacggactcggaggacggtacgtgggatggactgacgtgcagctatgccatttctgatcctccaaaaattactgccctaaacatgtccttcagtggtctgaccggtgacatatcatctgctttcgcaaatctcaaggctgtccaatccttggatttgtcacacaacaacctgacgggctcaatccctagctccctgtcacaactgccgtcactgacaactctagatttgacggggaatcagctcagcggaccaataccctctagtcttctcaaaagaatccaagacggctccttaaacctaatctatgccgataatccagacctttgcaccaacgccggggattcatgtcagacggcgccgcaaggaaagagcaagctagtcatctactacgtcgctgttcctatggctctgatcgtggtggcgttggcagtactgctgtgttgtcttctgcggcggcgaaagacgcgagggctagcggacgtctctgtgaagccccgggacaagactccgacgagccttgcttcaatggcggccgacgaacacagacttagctcgctgcggcttgagaaccgccggttcacatacgaggacctagagatgatcaccgacagcttcaagcgtgtcattggccggggcggctttggatacgtctacgagggcttcttggaggatggcactcaggtggcggtgaagatgaggtctcagtcgtccaatcagggtgccaaggagttcctcacggaggcacagatcttgacacggatccatcacaagaaccttgtctccatggtcggctactgcaaagatggggtgtacatggcgcttgtctacgagtacatgtcagaaggatccctgcaggagcacattgcaggaaaacgcttgacttgggggcagaggcttcgaatcgcattggaatcagcgcaagggctagagtatctgcacaggggctgcaacccgcctctgattcacagggacgtgaagaccagcaacatcctactgaacgcgaaactggaggccaaggttgctgatttcggcatgtcaaaggctctagaccgcgacacctatgcgtccacgaacactcttgttggcacaccaggatacgtcgacccagagtacctggaaacaatgcagccaagcaccaagagcgacgtgtacagtttcggcgtggtgctcctggaactggtcacagggagacctcctatcctgcacagcccacagcccaccagcgtgatccagtgggcacggcagcacctggcgcgcggcgacatcgaggtcgtggtggacgcgtccatgggaggcaaccacgacgtcaacagcgtgtggaaagccgcggaggtcgcgctccagtgcaccgagcaggcgtcggcgcagcgccccaccatgggcgacgtggtggcgcagctcctggagtgcctcgacctcgagaagggccgctccgccaacgaaagtttctgcgacggagacgacagcggctccgcgaccgcgagcttgagccacagcagcgcatttgtgacggggcgtatttttgggacggtgccaatggtggagacaggccctgccacgagacgcgcgctcgtgtgtgtctcactgtctcccctgtcccctctcccgcgtgctcgtctaccttcggctcccccatgggatgagagcgccttcctcgccatggccgcctcccacctgccccccgcagccaccctcgtcaagaagtacccaactctcctccacccgttcggcgccaaaccacacgcccagaggctgatcttcaggtgccgcgcgaccagcagcgagggtgcggacgatggctgggcgtcctttgtggacgagctcaagaggtcgctgcaggtggacccgtccgacgcggtgattagcaacgccggcgcgggtctcacatcaaataacgacctcgtcaccgcgctgccactggaaccctccgctggtccggctgcgggagacgcgaccactgccgctgccggcgcggtgagcgagctcctgggcgtggacgcgtcaggcgcggtggccacccccgaccgcctcctgagctccctgctgcacctggacgcgtccaacccggtggcgagcgtggcgggcggcgcgctgtctcgcctggacgcgctcacgtcgggactgtcggacgcgcagcggtgggcgctgttcgggttcctggccgcgacgtggctgtacctgaccgcgcggcccggggtgctgagcggcgccgtggacatgtacgtgctggcgccgctgcagctggcgctggacagcgtgctgggccggcggagcctcaagatgagcgacttcgtcgtcggcgagcgcatcggggagggctccttcggggtggtgtatgccggcgccgtggtgccgaagaacggcgccgtcgtggaggagcggtccggcaaggccaagacgagcctccagaacgacgacaggtacaaggagaaggtcatactcaagaagatcaaggtcatgacggtgggggcgaaggagtgtggggactacgaggagtggttcaactaccgcgtgtcgagagcggcgccggagtcgtgcgccgacttcctcgggagcttcgtcgccgacaagaacaaggcggagttcgtcaagggcggcaagtggctcgtctggaagtttgagggcgacaggacgctggccaattacctgagcgagcgcggcttcccgtccaacctggagcgtctcatgttcgggcgcgtgctgcagggcctgggcccgctggagcgcgaggcgctggtggtgaagcaggtgatgcggcagctgatcacgtcgctgaagcgcatccacgccacgggcatcgtgcaccgcgacatcaagccgtccaacctcgtcgtgacccgccgcgggcaggtgaagctcatcgacttcggagccgccaccgacctccgcatcggcaagaactacgtgcccgaccgcgcgctgctcgacccggactactgcccgcccgagctctacgtcctccccgaggagacgcccgagcccccgccggagcccatcgccgccatcctctccccgatcctctggcagctgaacagcccggacctgttcgacatgtactcggcggggatagtgctgatgcagatggccataccgacgctgcggacgcagtcggggctcaagaacttcaacgccgagctcaggtccgccggctacgacctcaacaggtggcggcagagcgcgcggcggaggcccgacctgcagatcctggacctcgactccggccgaggctgggacctcgccaccaagctcatctcggagaggggcgccaacggcggtggccgcctgtctgccgcggccgcgttgcgccacccgtattttctcctgggtggcgaccaggccgcggcggtgctgtccaagttctcgctcagtaaatagcatccatccatggcccatggctgggtacctacgacctacgggatatatacacatcggcttattggaatcctccgatcgattcaccatccttgtatattgcgcattattgaatccttgggcataccataccggcagtgggaggcatcccaaattcaaaagggagtcatctggtaactgatgttacaacttttctgtatgggaatgctgtgaacaatgtggtgcagagtttcacacactaactaaccttacattatgctagacagagatcctacttcctttgcttcagttcctcgaatctatgcagatgcagacactcgcagagagagctcatcaactggctgcaaaattctgacctgctccttctttcagccaatcagatgtttggccatgctcgttctgatcctatactgacagacgaatccggccatggatcgcctctactgtcactggcagtacggatcgaacttcttctgga

SEQ ID NO: 23251 - DNA, 883 bp, Zea Mays
gatctgacgactggcgaggaggcgtaaggtctacgatactgtcgcgactatattacctagcccagcaccaagtccatcaaaagcccctgaagcgagatcgtttggacctcgaatttccccttcacatcctccgagtgcactacctccaggatctcctggcgttgatgcgcgccatcattcacacaagcacccgcaccacagagagtcaaatcagggcccttcaccatcctcagcacccacacctgaaggttgttctagttatatctgcaccgagccactgactgcaacaccaattggttccccttgtggctgtgtcgagcctattagtgttatcgttgatctggacttagctccttatctactgttcatgagcatagctgagttagaagttgaggttgcagctgggacatttcttaaacaaagccaggtgaagatcatggctgcagttgcaagtatccaggatgaccagaagacacgggtgaccatttatttggtgccgctaagagaacagttcgatacttatacggcatccctaatatctgataggttcatggagaaaaaggttcagataaattcatctatatttggagattataaagttatcaatatcagctatcatggattgcaatccccgccatcatctctgcctggaggatcggatccttcaggaactgaagaatatcctataactgcagaggtgcctgatcagaagaaaaagcacaataaatcagatattttggtcatcgtggtagtgttagggtcttctcttggacttctgatgacatgtgctgttctgctgatcttactagtaagatggaagaaacttggacggcttcatgaggctatgacccctgcaactatcccagcagttaatagaagatat

SEQ ID NO: 23252 - DNA, 1080 bp, Zea Mays
cggccccgttcgcgcaatcgcgctcccgcatttcgtcgagcaggtgtgaatttgtgatgccgccgtctcctatcgtcctccctgccaccgcgctgccggcggcccgcctcgccagagtggtggccgcctccgaaagcggaggcgcgactcctccgagggcgtcccctcggcgggggcggcgcggcaagcccgggttctctcggcgttcggcaatcaagaagagcttccaccaggagcaggtcgtgttctccactcccgtctccaccgaccccaccgttgccgtcatcggaggcggcgcttccggcctctcctgcgcaacttccctcgccgcccgcggcgtccgctccgtcgtcttcgatacggggatgcatggcctagggggaaggatggcgactaggttcgtcgacggaggcaagcagctggtgttcgaccacgcggcacagttcttcaccgcgagcgacgagaggttccagaggctagtcaacgagtggctcgacagagggctggtccgtgagtggagcggtttgatcggcgagctcgaagccggcggctgtttcaggcccataccttcgttgacaccgaggtacatcggtgtgaatgggatgcgcccacttgcagatgcaatgctgcctgagactgatatgattaaagttttgaggccttgttggataagcaaacttgagccgttcaatggtttgtggcgcttgtttgagaatgaaaagcctcgcggtgaatacgatgcagttgtgatagctcataatgggaaatgtgccaaccgtctgctctctacatcaggattgccattactaacaaaacaaatgaagcatttgaagatcctcttccgattccacttcttgattccaatgcagcatttgaaggagcatttgtgagagatgtggattctctctcttggatgggcaacaatacccgcaaactttttccaatgcagacaggcgcacccgagtgctggacatttttcagtactgctgcttatggaaaaagaaacaaagttccacaggaaaatatcccaaaactcactgcagaaaaggtgaaggaagacatgcttggaggagtagacga

SEQ ID NO: 23253 - DNA, 3428 bp, Zea Mays
ggcacagcccacccacgggagggaaggtctctccctctttctcttcgtcttcttcctcctccttttggtttccttttgattgattgatctagtagaacacagaaaggagagagaaagagaggagaggcaacacagaaacaagagaagaagaagaagaaggggagatcgagatcgatcacgcaccgggggagcagatccttcgcctcgccatcagggataaggattcatgcgaaatgccacctgaacttggaatgtcttctagaactgttgctggtgctgttgtaaataggaggcctcgccgcctgtttgggagatcatcagagaggaagaacccactcaaccttcagtttgagcgtcaagtagctcgcctcgaggcaaggcagcagcaacagaggtgtgttattgtgacagttattcccttcaatttctgttacgacttcaaatcactatcgctcaccgagagtgcaagtgaggatccttcatctcgacctacatctccagaagagaaccctgaaacatcgtcctcaccatcgattttgttcctgcaccttaatgctcaagatgtatctcacagaagatggcaggataattcatcaaggctactggaagataagcccacaacatccaatagcatgtctgattcagatttcttagtcaacagctttaccaagccgagtgataatgcaaggccatcaagaaggaagagcaaaaagaaaagcaagaaacacaggcaacgctgtaggaagccgactgatggatctgaagctaaattcagagagggcaatggtgctgcctctgcagctgatgttggtgattgtgaagattcgacactttcgcctaagcatgttggtgacatacgctttgaggaaacttctcccagttcttctgtcaaggaagcttctgaagaggctcctgagagtgatgatgatgagtaccattgctgctcaggtggttcagtttcgagtgcgtcctactgtgatgagatggaactgtccaaatcaacaacttcgtgccctgcattgtgtggacaatgtcctagcagtaacttacagtatttggacaacactcaaaattctgcaccaacaggtccatctcaagaaacttgctatgctggcagtaaagcgaactgtaaccatgataccaagtccctgtttatattcagaaatgaacgtggatctgatccttgtgaggcaacagagttttgcagctctagcagtggatttgatgagaactggatagagaagtttgactatgatagtggcatttgttcgccaaaaagtgttggtacatatggtggagaccaggctgcccacttgtgcagtgacacaactggtgacaatgatttctgtcttgtaatatctagaaagagggccagaaaggagaagaaaatgtcattgtggaagagttatggagcgcatgcatccacacctgcacttgatcgaaataaaaaatatgttggccattcttcaatgcagatgaccaacgaattcaacagtaacgactggtcccatagacaaaatcatgttagcaggatacaccctcagcatggaaatgcactgaaaagctccaccaaaaatttcatgcagaggccaagcattggttgcagggagactcaatatgggtttccagctaaagaatccaagttaggagcaagtctcaatcattctacaggtccaagagaaaaaacttgtggaaaattaactggcggttttgataagacagcacaacagctttatttggacagagacctatccaatgctcttaacagcagtgaatcaatacgttgtgagacgagatcaatttcctcttctgaaccgacaactccaaagtctttaaaaggcaattatacttcagagtctggtgaatcaacagatattacaataggagctcttcccatgcagaaaagaagattgcaggatttagttcgaactgatgatgccagtgaaactatttctgggcgatcatcaccttgttctgagtcatcgacaactgaattaattgctggacatagtacagattcatctattgaagggaaccatggctgtcaagggctctgtaactctagaacacatctagcccagatgctcagggttgtaaacgatgcctgtaaagttcagttttggtgtgcaagggagggaattactgatatcatcaaatactgcaagctctatgagctctcatcctgtgcatgcaaaagcgcatacactgcttgaggaaagtaatgcatgcttgccagagtcatctttagttgtagaagatcctggagaactcatatttgagtactttgaaacagagcaaccttctctccggcctccattatttgaaaagatcaaggagcttgttagcagtgcaaatgtttctgaccaccgggtttttggggacactgaaaaattgcaaaatgcgaaattgtgtgagcttcatccagcttcctggttctgtgttgcctggtatcctgtttatcgtgtgcctcgtgggaatttccgtgcggcatttcttacttatcattcactggggaagttggttcataaaaaatgctccatggatacgaatgacgggcatacacaagtagtttcaccagttgttggtctccagagttacaacgacaagggagagcagtggtttcagctgagatgcccagatttgaagcaattgccaatagaagattctttaaaaaccagtcctgctgaagttcataaagagaggctgaggacgctgaagatgggtgcattggccatggcaagagctgttgtcccaaagggaagtggggagtcggtgaaccaccatcctgattacgagttcttcctgtctcgttgcgcctaggctaagcggttgtgatatgaaggaagaggggcttttctgcttctagctcctgaatgtagtagtgaccatgaaaatgaaaaaaaaacccagagtagtgactaaccagagaccggctatagatacagtttatcttagagagaggagagcctggggtgatgcatatcactgactgtataggagatagactcgaatattagatactctaacctgattccggattaccaatgcaaaccaagttggtgagctgttgaagtatggcagtacccgcgggatgggtgctttattggggctgggggcaaagatgagaagataccacagatgagatgacgctgcaggtgttcatcttttgtacaaagaccacaccagaggagcagcaagaaatttgctaccagcaagaaatttgttaacacatttgcgaggttgggcttttgttgtggcttgtttgctttgcagacttgcagtgttgctgtttctaatcatgatactgtgctgcttctgtttctaatcatgatattgtacatgaatgtgtcaacgtctggtgctgtgctgctagcaaacgcaagtgaaagcgtgcgagtaattagaggcgtgcaacctcattgcttctc

SEQ ID NO: 23254 - DNA, 1697 bp, Zea Mays
aggaacaaactcaagcagaacactataccgatgcatttgctgacaccatcacagtgatgacatccttggtggccctttcattctacggtgctagccagatcaagttccactgggtggagcgttacgacaagatcctcgtcggcacggtgctgtgccttgttggagtcttaacatatgtgttccatcatcacgatggtgatgagcatgtgcaccagaaactcgtatctccctagatgcatacatactgaagttccatctctgttgctccctatttgtatacaatcctgattatcgacttactctgccgctctggttttgctggagatacgtatcatctgatcaagtgaatatatttgagcaaactgcgtgaagtttgtatcgttgtggtggtagtggcctctttttcggcactctgaaatggtaccttcctacttttggacgcaataaattgttttctgaaatttcctttccttggttcttttttcctttcaatccattttatttaggaaaaaaactgtttatgctgggtgtaaaagtaaaacccaattgaccgcaaattgtgtttgaaaaaaaaaaactgttggcagaagatgagagcttaggttcagtggggtttttcgcaaattcggcccagtatactgcaaatagccgagccgggcctggggaaaacgcgcggcaggcagagcggccacgacgccgcccgtcgccgccgatccctttcgaccgctcgggtctccctgctccttcgcctttcctcctgaaatccagcgaccgaatccgatcgccttggcgcaggcgttcgatgggcaaccactaccagacgctgggtgtccggcaggacgccaccaaggctgaggtcaaggctgccttccgtcgcagcgcgctacgcgaccaccctgaccgccacgccggctccaccgacgcggccgcccgtgccgacgccgccagccggtttcgccaggcgtccgacgcgtactacgtcctctccgacgacagacgccgcgccgagtacgacctccgtcttcgcggttccacgtcttcctacgcgcgcacctcctcctctggttgggcctcctcgtcggcttcctacgggtacggccatggcggcggttcgtggcgacggactcctccgggtgcaggtgccggcgccggcgcctcggtggggtcaattgattgggaattcttactgaaggcggtcactcggcgagggttccttatcaatctgggattagccagtgtattgctatctggggcaacttttcttgattggactattttagaaatttggaagatgaataacaccgggaaatcatttgaggatgcgatggagaaggtcggaaagacgcaggaggtagatagagcttgaatctttttcatggtacattagtgtatatatatatacactaatgtacaaacctatgtgcatatcgatcgttgtccacatcctcctgatgttactttgtaatatgtatagatctgaacagttttttctatcacgactcacgagcttgtgcttgatccatagaacccctgctgtcgccgtcgtagaaactgaaccatgtaggttcttcgacagcgaaagctcaggttatgctctgattcttttgctgacgaaacgaagtaactgttgaataaattgctgtaattcaagtacgcttcgaggccagctacatggtcgcaggaataaaataataaaa

SEQ ID NO: 23255 - DNA, 2898 bp, Zea Mays
ctcgtccgggtttcacatcccaccatcaccaccaaaaggacgcccttttttcttagtcatttgacttgcagccaccaagttgtcgcatttcttcccactccggttctcatctgctgctccacgccgatccaactcggagtccccactccctcgaatcgcagctgctgcagcggagcaccagggtcttgcctcgatttgcggcgaaagcacgccgtttttctggtggtttgtagcgccgagcggttcttgattccggcgctggttttggtgctattgaggaggaggtgggggttttctttcgattggaggggtaaaagttgccgcctttcttgcattccactctgttcttggaccggatttcttctccctgcacgaactcgagctcgagctcggctcgggcttctccaacctccaacgcgtagtcccgtctagttttcttacatacaggtggcattttagtgcttgcttctttcaagaactgcagcgtcttgattactgctttacctctttgcggatggatggatgcgattgtattgagccactttggcaggccgatgatctcttaatgaagtaccagtacatatctgacttctttatcgcacttgcatacttctcgatccctttggagctgatatactttgttcagaagtcagctttcttcccctaccgatgggtactcatacagtttggtgcgttcatcgttctgtgtggggcaacccaccttataaacatgtggactttcactacgcataccaagaccatagctgtggtgctgacagtggcaaaagtggcgacagccgttgtgtcatgcataacagctctgatgcttgttcatataatccctgatctgctgagcgtgaaattgagggagaggttcctgaaagcgaaggccgaggagcttgatagggagatggggataataaggacacaagaggagacgggaagacatgtgcacatgctcacgcacgagataagaagcacacttgacaggcatactattctgagaactacacttgttgaaatgagaagaactcttggtttagcagagtgtgctgtgtggatgccatcacgctctggaacaacccttcagctctcacatgcactccataccaatgctccgcttggatcagttgttcctatcaatcttccgattgtagctaccatttttaatagtaatcgtgctgagagaataccacatacttccccattagcttcagtaaaggctcagaaaagcaagtacgtcccaccagaggttgttgctgtccgtgttccgctgctgcagcttacaaattttcaaataaatggttggcccgagctatctgcaaaagcctttgcagtgttggttttgatgcttcctccagacagtgcacgaaaatggcgaccccatgaactggagcttgttgaagttgttgctgaccaggtggcagttgcactgtcccatgctgccattttggaagagtccatgcaagcccgtgatctgctattggagcagaatattgctctggacgcagcacgccgagaggcagaaatggctatatgtgctcggaatgattttcttgctgtcatgaatcatgaaatgcggactcctatgcgggcaatcatttctttatcatccctcctgttagaaacaaaacttactgcagaacagcgggtgatgattgagactatactgaagagtagcgatcttctagaaactctttcaaatgatgttttggatatatccaagcttggagacggcagccttgagctggaaattgcaccttttaatctacatgccacctttacagatgtggttgatttaattaaaccagtagctgcattaaaaaggctatcggtaatggttcatttggctccagaattgcccacctgcgcaattggtgatcggaagaggttgatgcagataatactaaatgttgctgggaactccgttaagtttacaaaggagggtcatatttcagtttcagcatctatcgctaggccggattctctgagggacccatacgctcttgacttgcatccagttctctccgatgggtctttttacttggctgtgcaggtaaaagacaccggctgtggaatcagcccacaagatatgcctcacaccttcacaagatttgcacaccagcaaaatgctacaaacaaattgcgtagtggcaacggattgggtctggccctttccagaagatttgttgcccttatgcaagggaacatctggctggaaagcgaaggcgtagggaagggctgtaccgcaacgttctttgtgaagctaggactatctgatgcaaatctccggaggatggtgcctcctgtccagccaaaacatggaaatgcagatccagatgtatcatcaataatcaacggcgacatggcgattcttccgcgttgttaccagtcgatgatatgacaaggaactgcaggaggagcctgatcttgtgatatcatgatttgaaggtggattcacggggttaaggatgctgtgtgtagagattgctctccccgttttttttttttttttttttttgcagagccgtcgcgctctaggcaagcaggtgcgagtgcgatcgggcgaatccaaaatagcgggacgcctctactagggaattaacagcgcagggagagcggtgcggtgttttaagaaattataagttgtgagatgagtggcgtgtttgttagacgtcatttagggttttctagtgttgtactagtatagtcttggtagagagaagcagaaagaagctgatctgtacacgaggcaaatgaaatgctgatgactacttataaggcttctactgtttgtacagtattttttttgtctacataaattgcaacagtatagtatttttgtctctatgaattgaattgcaggtgtaacagttctttaatttaattcgaaacgaa

SEQ ID NO: 23256 - DNA, 233 bp, Zea Mays
gttcacatggtgatgaagccgagcgagaagcgtcgagttaggagagagagggcagtgagatctgtcgtgggctagatgagagccatgtcggtgataggcccgtggcgggctcaaggttaatcccgggcgtcctcggcgctgctccaatcgctcaccggagcgcggcagtcgccgtgggagcgctcctcgttgttggtagacctactcgctacacggacacgtgtcatccgaag

SEQ ID NO: 23257 - DNA, 3011 bp, Zea Mays
atacactgtttggagtgctggccagaagagctttgctgatagtactggacaagttgaccagaaccctcaatggatgaggccacatacccacaggatggaaaatgatcaaagaagacttcccaatcagggtcagatgtcaggcccaagtcatgaatttcgggttgtgagggacaacagatttcaacatggtgtggtggagaacagaccagagcccggacacaaaggttcagcagatgtacaaatgtctgataggagcactgttgttcagtccgctcgaaacctctcacctgctacaacctcagacggccagatcacacatcaaaatgctatgcagaactcacaatctgacataactcaagggaagagggatggtcaaggtactacacagaagcacgcgaagccatatctgaagaactctcagaatgagcagcactttccaggttctgacccagctcatgggtcagccacagttagaattgctggtggaactgttggacctactcgacgtcatgttggagttattaattctagtaggcaatttgttggccgttcaggttctcagatgcatgcaccaggtggttcttcctatgcaaatattcagagggggagttttacctcagtaggggcatctgggcgttactcagcttttatgtcaagaaacattcaacaaaacctgagggctgatacaacatttcgtggaaggcccactggtagatcttttattgcacaaaatgtcaacaggtatcaccagggccctactaccaaccaaaaagtacaccctattaaggagtggaagccaaaattgacaaagaagtcacccaccatcgatgcagaaaacagtatagctgatgctgcatctccttcagcaagcaactgtgaaaatgccaacacaacagatgtaaatgggttgcctgaaaaactttcacaagctaacttgcatgaggtggagcatgttattattccggaacatcttcgtgtaccagaatatgagcagacaaagttaaggtttggcagtttcacacctgatttggatttggaacaagtacctgatttgaccccacaagacactgagcaaccagaacatgtacaagaaccagttcaacaggtcagtgaaggcgatagtttggatgatggacatgatgacatggatgagcaagctagatcttcacaacacctgtcctcatcaacagctgagatttccttgtccccatctgaggatagtgatcaaatgagtgggcaagtagagaatgatgatgggctgggcttagttcagagtgacactccagttggagcagcagatggtgacagtacccagatcacctcgactttgactgctttttcggcttatggtcataaagatcctaatattcatacaaccaatgaggcccagctatatggactggtggagcctaatgtacatccacaagcattagcttcctcttctcagggatacccttcagaaaatccagaagcagataatgctgtgcaagtcttcaggatgccagattctaatgttcactcacaagttctcccgtccacatctgaggccctaaatccacagatcgtgagcaacagccctgttccgatctcttcacagcagcagcatatctctcagcaacaagctgcaacacagatgtaccctcaaatgcatgtgcaacattttccaaattttatgccatatcgccaactctattcaccagtttatcccatgcctatgccaaactattcgccaaatgtcccttatccatcaaatggaaatagttatcttcaaatgcccagtggaggttcgcatttaactgcaggaagcgtaaaatatggagtttcacagtataaaccagtcccatctggtaacccttctggctacggaaattacactcatccagctggttttacaatgggttctcctggtgttattggagctgcagttggtgttgatgatgtcaataggatgaagtacaaggacaacatttatgcctcaactccacaggtcgagacatctgacatctggattcagacagctagagagatgccaccattgcaggttccttcatattacaacataccaggtcaagcaacacctggtgcttttgtgccaaatccagcaaatgcatctttcaatgctacatctcaatcccctcatgcgcagttcccaggcttgtaccatcctcagcaacctccctctattgtaagtccgcaccccatggtgcatcaacaggtgccatcggccattggtcccaatgttggggtcggggtggcagctccaggcccacaagttggggcatatcagcaacgacaaattggtcatatgaattggagacccagcttttgaagaaggtttcttaattatctgtaattaggggggtcacaagagcctttatgtaacatcagtaggctccttttgacgggaagcacctttgtttttagtgcagctctttctgatctatttaagctataacaaggtttttgttagcttttccttcccccaggtgaattcaatgtcccatctgaactggtatgtagattgtgatttaaacattgggcaagatctcgcacgagcaccaaggttgagtgccttccattttgttctattgttttgttttttaatctaagttgtgtaggttgcgtgccttccattttgttcccttatctgattcatgcacacataaggttgttagttttagttttttagtagtgcaagtgtcattgtagtgtgctgttaccgagcgctatgtggtaacttggtcagtttacaacctaattgcatgtgataattttctgtggtacctctacttttgtagtagtctgtgctgtatgtagttgaagactgttgagcactgatttagttcttctggaatattatgtatcttggatatgaagttcaaatgggcatgacggagcaaattacggcacttcatatatttttccaaccatctcggcgatgagctagattaagtttttttgacgaggaactcaactaacttttctttacgaggatctcgactaacatttct

SEQ ID NO: 23258 - DNA, 949 bp, Zea Mays
cttagacacagaccatggtcacaccgcagactgctacacgggccgtcgttcggtgctcctcctagtcctagcctcagccagcgctcctcctagcctcggcttgccgcagcctgcatcacggatcccctcccatcacggatcgacgctccccatcacggatcccgctgggcgctgggcgctccccatcacggatcagcctgcatcacggatcccgctgggcgctggcctcggcttcacggatccactgccagcggcctagctccccatcccgtcgtggctggcgagcagaggcgtcgccggctcccctgccagcggcctagctccccatccctccctggctggcgagcagatgcgtcgtcggctcccctgccagctcccccgccatctctacgccagaggcccagagtcgtggcaagcagagcgcgattgaacgcctgtcaccagcacgactgaacgtccgccgccctacaacagcaacagcatcctcctgtaactggattgtggctgctccgttgctgtttgactcagtgaagttcagcttgaaggacagagaactgacaccggtgatattacaaaacacgattgagtggagatggatttaaggatatctgagggttctggtactaataccaccttggatgaccaatcgatacaatcgccgaccagaagggcaaaggtttgggagtattttctacaagagttagttgaggttgatggagtgatgaaggctgtttgcaaatactgtggggcgaagctgacaagtaaaaggaattcaggaacaaatagccttagaaaccatgttgcggatacatgtcctaaaattccagttgaggaccgcaagcaattcattgctacaatgagaaaaaggacaggagaaggttcatttgtgtttgaccctcgaaagactcgtgagtgcatggttaagtggtgcatcagtgccgaggtcgca

SEQ ID NO: 23259 - DNA, 1492 bp, Zea Mays
tgagctacactccgcagtcgcagcgaaggatcaatctgaacaagatgttgatgatgattttgagaaatttcagaaggaggttatcgaagccgagacagaggtgaaggccttgaaaggcaatgatgtggaccagcaagatgatgagcggccagcaaccccccctgatggagaggaagaatttactgatgatgatggcaccatttacaaatgggaccgtactttgagggcatgggttcctcaaaatgatgcatctggtagcaaggaagattacgctgttgaagagatgacttttgcagttgaggaggaaatatttcaggcacccgatatcctgggtcctgcattagaagaaatcaacaatctacctgaaagcaaaaataaaggatcagataaagcagaaatgagaggagacaaaaagcggaaatcttatgagaatccagctgagaaaaagctaacaaacctccggacagttggtttgatctcaaagtaaacacacatgtctatgtaactggtttgcctgatgatgtcacagtggaggagattgtggaggtattttccaagtgcggaataataaaggaggacccagagactaaaaagccacgagtgaagatttatactgatagagaaaccggcaggaagaagggtgatgccttggtgacatatttcaaggagccttctgtagctttagcggttcaattgttggatgggacaccattccgtcctggtggtgatgttttcgtttcaaagaaaactgacaagcaaaagaagaggaagataaagaaggttgaggacaaaatgcttggatggggtgggcatgacgataagaagctgatgattcctgctacagtaattttaaggcacatgttcactcctgctgagctgagagctgatgaagagcttcttcctgagcttgaggctgatgttagagaggaatgcatcaagtttggtccggtggataatgtcaaggtttgtgaaaatcatccacaaggtgtcatattggtgagattcaaagacaggaaagatggtgccaaatgcatagagaagatgaacggcagatggtttgctggacggcaaatccatgcgagcgaagacgatggctctgttaaccatgctcttatccgtgattacgacgcggaggtgtcaaggctggatcgatttggacaagagctagaagagtccacatagagtgtatatatacacacacacaccagggattagagtaggtgtgttacctcattcataggtaggttcgcctgattgaacatgagaaagaagttattggatacacctgctaataagagtagtgaccggcttgcagagctggtgatatcatcactagcgaagtagcagcacactgctttctcaaatgtgttgtttaatgaatgagaagctcatatcgatactattaacctcggctccctatgaaagtacagtgggcatttctatctgaaatgtgggaatttttatatgcattactggcttgttcgtactggtt

SEQ ID NO: 23260 - DNA, 2103 bp, Zea Mays
tttgaaaacttgtgttcctgtttccaacacagtgaggccacgttgtagggttttgcttgcttcgcccggcggtaaagctgagcgcggcgagagccggagaccgaagaagcgccgcgcgcccggtcatggagatcggacagtaccccgcgagcggctgctccaaggagcaccagaagatctaccaggagtggttcgcgctcgcggacgcagatggggatggccgcatcacgggccccgatgcgatcaagttttttggcatgtccaagctctcccgccctgacctcaagcaggtctgggctatcgcggacaccagaaggcaggggtatctgggtttctctgaattcgtcaccgcgatgcagctagtctctctggcacaagcaggcaacgagattactcaagatagccttaagcgagatgatttgagcagtttgaatccacctgtgatggaaggtttggatgccctacttgcgaaatctaagcatttggtgaagcgtgttgatccagaaatggatggatatcctcaggaacaatctcctttaacaaacaaatggtttagctcaaagtcatcaaagaagacaagtagtgattttgatgcaaagccaatggttatgctcttaggtcaatattctactggtaaaacaacttttatcaagcatctgctaagaacaagttatccaggtgcccatatcggaccagagccaacaacagacagatttgtagttgtcatgtcaggatctgatgaaaggactattcctgggaatactattgctgttcaagctgacatgccttttagcggtcttacaacatttgggactgcatttttatccaagtttgagtgctctcagatgcgacatccactgctagagcatatcacatttgttgacacacctggtgttctttctggtgaaaagcaacgcacacagcgcagctatgatttcactggtgtgacatcatggtttgctgcgaagtgtgatcttatccttctcctgtttgatcctcataagctcgatatcagtgatgagttcaaacgtgtcattggatcattacgtggccatgatgacaaaatacgcgtagttttgaacaaggcagaccaagtagacactcaacagcttatgagagtttatggtgcattgatgtggtctctcgggaaagtattgaatacacctgaggtttcacgtgtttatattggatcattcaatgacaaaccagtaaatgaatcagctgttggtccacttggaaaggaactatttgagagagagcaagatgatcttctttctgatctcaaagatatccccaagaaagcctgtgaccgccggatcaatgaatttgttaaacgtgctagagctgccaagatccatgcttatataataggtcatctaaagaaggagatgcctacaatgatgggcaaagcaaaagcccaacaacgactcatagacaatctgcctgatgagtttgcaaaggtgcaacgggaataccatcttccgtcgggagattttccttacgtggagcacttcaaagaggtgttgagcgggtacagctttgacaagtttgagaaggtgaagcccaagatggtacaggccgtggatgatatgcttggatatgacattcctgaacttctcaagaacttcagaaacccatacgagtgaacccatacaggcggttgaaagatgacttcgatctgcaacagaatgagggattgattgtcaggcgatgtgaatcatagtggtcaatgtctcttggggcgttcattgccatccatgcttagccattgttatataactttatgcataagaatcatagagccattgctcaagctttcaccagacatctgattatgtaaaatcgacaaaatagtgatgttagtgttaaagaatatactgtgatgttgtttcttcaaatgagtatttattcgtttggaacagctggagaatgtgggtttgtcaattatcagcccatgaagaatatttggaccaccgtggggtgttgtcctgagcatggctccttgttttgattttataatgtcatgtatgttgtggcgctgcaaaatctgctgtgatatgttgcaaatatatttttgaaagacgaacttttgagaaattaatt

SEQ ID NO: 23261 - DNA, 2356 bp, Zea Mays
acaccttgtgtcgtaccctccggatcgaaggctggacgacgcgaccgcgcggcggcggctcgacgcgaccggtggctttgacgcgaccggcacggcggcgacgcacagcccgacgacgaccctccccgctgccttctccccgggcatttgctggagctggaaggcggaagcgttcccgttggattacttcttgggctggaaagagtgaaagacccggatgcactaaatcctgtcttggaacagttacggccctggaattgatcccatgctgccgaacgggccctaagttggaacctgttcaggcggggggtcagctcgcagctgactggggatccggcaccgcatcgccagacgccaggaggggactatcagccatggcagcgaggcagccgccgccttcgtccgcgtccgcgcccgcgcccgcggcgggtctctccatgaaggactacctcaagaggtacgtgtcgggcccagggaccgacggcgaccagaagagggcgaagaagaagacgaagaagaagcccaagcccgccggcggggtgctcatcgtcgacgaggacccagtgtggcagaagcccgtgcaggtggacgaggagcccgcgtcgtcaggtgacgacaagcctctggtcgacgaggacatcgaggtcaagcggatgcgtcgcctggaggcaatacgcgccgcaaggccgtacaatgctatcgccgaggatggcagcgggtgggttaccgtggccgccccagaggagcagggcggtgggtccacccaccagcgcaggaacgacacgccgttgccagagcggggacgtgctcctacgagggaggacctttctcctgtgcggcggaggcagcggcgcaacacgccctcacctgtgcatggcgatgctgctgcaaaggatttttcaccacctaggcggaggcagcggcgcgacacgccctcacctgtgccggacggtgctgctgcaaaggatttttcaccacctaggcggaggcagaggcgtcaggacacgccatcaccaaaggacagtggtgcagcggaccaggacgatatgtcaccaccgcggaagtctaggcagagagaggacctttcgccgccaaggaagggtgctcgtcatatcactgaggagccccgggatatctcgccacgaaagaagagagacatttctccctcaaggaagagtacaaaggaaggagcctcaaaacaggtgaagaaatctggactgatgacagcagaagaagttaaagaggacataagaaagattaaggaggctgagatgattaagtttgcatcacaggatccttctctggttgggaaaggggcaaaggcagtattcagagataaggaaggaagacgaataagtgaagaagaaatgtgcaaggcaaaggaacctgagaagccaaaggaaatacatatagaatggggtaaagggttggttcagaaacgagaagctgagtctaggttgaaagagattgaagctgagaagagtaaaccttttgctcgaacaagggatgatcctgagcttgataatatgctaaaagaaagaatccgatggggtgatcctatggctcatctggtcaagcggaaagatccagaatttattttggaagacttgggagatgatgaaaagatgaaagaatctggcttcatagtaccccaaagtatacctactcacagctggctgaaacgtggagtggatgctcctccaaaccgctatggcataaaacccggtcgtcattgggatggcgtggatcgcagtaatggatttgagaaggacatgttcaagctgaagaacgagaagcaagcaatggagcaagaagcctatctttggtctgtctctgatatgtgatcccaactgctgctccttacgagaggaatacagttgtgtaaaggaagaaccaatggaagacctttcaaacgatttttttttcactcttcttattacacaaagtgacatcactggtgatgctgcgccggagtagcctgaatattttccaggaaagcattttcaggaatgcagttcaatgaagctgcattacgtatttgttggaaatctgttactgctgtaccatttgtcatccttcacgttttgtaatatagatgaacgcactgcaaggttttggaacagttcaaaagatgagattttatattcactttctggtttccatgtgtataacttgtcttagcagctgtcgcggtttaatttaaattaaatgatggtggatttgagagccagcagttgtcgttccgaaagcaggaaacaacagggttattactccttattagtagtaactgtaactgatactgtgtgtacgagctgatccgtccaacagggttataacttgttcgttgaggtggagt

SEQ ID NO: 23262 - DNA, 937 bp, Zea Mays
ccacgggtcagataagcttttctctccccttcgcagctgcaaccgctcgccgcgtgctccctttgtactgaaccgcatcctccccgcgccgacctgctccggcgagttaaacatggccgtcctcctccgcagcacctccgccgccgcctcgactgctggcccctcctcggcgctgctcgccaccaccttccgccgctcccgcggctgccttctgccccgtgccgcgccgcagcgccgcttgtatgtggcccgcgcctcggcccagcccctcgaggtctgcgctaaggagtccatcaccatccctggccgcctcggagactgtcctttcacacagagggttttgttgactatagaggagaagcatctgccttatgatctgaagctagttgatctagctaataagccagattggttatttgaaatcaacccagaaggtaaagtgcctatcgtgaagctcgaggaaaaatggattggtgattctgatgttataacacaagcattagaggagaaataccctgaaccacccttggcaactccaccagaaaaagcttcagttggatcaaaaatattttccactttcattggtttcctcaaaagcaaagatccaagcgatggaacagaagaggcactacttaatgagcttacttcatttgatagttatctaaaagacaatggtccatttattaatggtggaataatttctgctgctgatctctctctgggtcctaaactatatcacatggagataactctgggccactacaagaattggtctgttccagattcactttcttatgtaaaaacatatatgaagtcgattttctcaatggattcttttgtcaaaactcaagctctgacagaggatgtaattgctggatggcgcccaaaagtcatgggttaaattcatttctaaagttagacgttaaggagagggagg

SEQ ID NO: 23263 - DNA, 310 bp, Zea Mays
ggccatcgatttggtggtactgggcgtgcagcgtggtagctcagttcgggcaggtttatgctgagctttgtttcgggtccgacaacgagttttgttttcggcccagttttccactgcatcacaaacgggccagaaaaggaaacgtcaaaaagaaaacgtaaatcctccctaaaaaacagttactactgcaggtttgtagttgtccggtttttattttccaccatgtgcaacagctccgagtataactcgcatctattgttggggtctgattccttgtttctcctgaatgcaattcatctgcggcatgtcg

SEQ ID NO: 23264 - DNA, 928 bp, Zea Mays
caaccccctctctcctacttctaaagaaatataggagacatattttaggctttgctccatttcatgtactgggatgagttgccggatcttgaagagcttactggtgtaaatacaacttgggtatccaccttgatggctcaacatttacttgctgctgcagaccgttatgcattggagagattaaagttgctctgtgaacttaagctgtgtgaagatgttgcaataaacacagtggcaaatactttggcactggctgaacagcaccactgctatcagctaaaaactgtttgcttaaaatttgtggctctgcctgagaatttgaaagctgtcatgcaaaccgatgggtttgattatttgcagcaaagctgtccatccctcctgaccgagcttcttgaatatgtggccaagataggagagcactccgtgagcccctgcctgtattcaactgaagtccttgatggtggagatgccaatggacgacgcgtgaaaccaaggatctaacggctgcccagatgagcctagaagagggagttccttgtcttttttttttgttgttgttgtaaagtgattccaatgacgggcgccttctgtggtgccataatcatgcatgttgtagcgttggtttgtgtgtgttgtgatttccccagccccattgctgctactgtagagggactgatatacatcctactgactagactgcgttgctgctgcaaagcagcttttcatcatatgccaaggatggtctggtgcaaaggtttgatcaatatgttctgcagaagttttacctttcgctaggccagatttgtcgattcatggtcatctgtattgactgtattcaattgaaatgaaatgtatccgttgaacattcactttcatactgatccgttcatctgtcctacccttaaatctcaaataccttttacctgtg

SEQ ID NO: 23265 - DNA, 2404 bp, Zea Mays
cgcaccctgatcccgcacaccagtcctgctcatggctccccgaaaccgtcgccccagcctccctcccctccccggctcccccgatttcagctgcccccgaactccgtcccctgttgtccctacctcgattctgccgccgcaaacgccgatgtgagtcgtccgatcccacccgcaaacgccgctccccgcctcgaggctcgccggaacggacgcctggataccgcggccgcaacccaccgccgcgcagggaggttgcgcccgcactaaaatggagcacagggaggctttgccccccacaactcggaggacgtgtgcaggccggagggcatgggggaactcgtgttgaggtctatgcatcaacatcttcttcaagaacccaaggttgttggggttcaatgtcggctggacaggggatggtgggggcggccaggtgatgtaagccaaatcgctttcggcctcctccagcagcgctgcgaagacgaggtgctcgaggtggcccagcgggaccacgaactggtgacggaacctgctcaacaaccacgcgcgcttgacctagcccccaccggagaccctcactgtggcctcctgagtcggatcacgcctcaccttgaactgcatcgacgcctcaacctgccggggcaaggtcacgtgccttgcggaggctataagaatgttggggggttgtacaactccatagcttggtgatcacggtggaggactacaacagctcccgcagaaggcctgccagcttgttcgccatggacctcaaccacaacaagctcgatctcttctactgactgctggtgtgcatcagcaccgtcaaccttcatgcatcccctagttcatgtaccggtactttggccgcggcagagtcgacatctgagatatatgaggccttggaattgaggaatggtggatctgattattttgtcaagggtgttcttaagatattgctaaaggaggtgctcgcagggaggaggacctcaacgtggtgggcatactttgcagggtgcagagatactgtccaaggaaggaatcagtgctgaggtaattccttttgtaaacgttatagtttcactgatcagtgcacgcacccagttacaagtcggattccacgtgcccacgccgtccgcgcaagtttgcatcaaagcgctggggaggatggaatggcagatttgcattaaaccagcgacaccacttcataaccagcaggcaggcaacacactccttcagatcggtgggatgttcgaaaaagataagcccttgtaacctttgtatgcatagtaggcaatccttgtgtagtagaacccagggatgaacattacaatgcccaacatcatgaagaaaattcctgatacaacataaagggccataagtttaggtaaagggagtgaaaatattcatgcataagcactgcatttcatttgaataagtacttaactaaaactgctatatgaaagggttcaaaatgcatcagtacttgaaaggtgaatcagcatccatgcaaattatcaagcctgtgcgagcaaatcacaacttgttctaatcaacaagcagtttagtgcaaatcacaacttgttcttaatattcccctatcataggcttctagcgtggagtatgaaaatatgtgatatatattgtggtggtattgttttctgatgaaatgaatattattaccccataagtggacacaggccagttgaaccaatacgaacccgatcaactacatcgatgcatcaccaacccaagcatcccaatccaaacaacttgtaatttgaaactagagattgcgaactgaatttaaatcaaatacttcagtattggtctctagagaggaagctctgccaaccattactaataactgagaaggatttggcaatcgcttatctttgactcaataccttatgacctcggaaaggtttgaacccgtcagggactaaagatgccaaaggttgaagaagggtcacgagcaaagagggcatttactatcctttgcaatcttcaccgttggaaggattatgataactgcaatttcatttcttcttggatatgagctccacaagaggatgagacccctctcttcgccatatgtataggtgaagcaagctagaagctcatcttgtacccgcaacaagttgatacctgcagcacgtggacaaagctagatggcgtggacaaagctagatgggaagcctagtataattgcaaagtgaatcagttagattctagtagttactaaaatttttaagtgatatttgtatgatattgccactttggctttgcttctttgtgaacacaattggcagttactgaacatgtttgctatcgagttagttagcttcttgatattttgccaaggccaaaagcaatattattgagggtttataatttgattttttaacat

SEQ ID NO: 23266 - DNA, 83 bp, Zea Mays
catgcaccggggcttgcctttgttagtaggtgagtcaggctcggatccgcagatatcaaagtagaaacaatttccggcctgag

SEQ ID NO: 23267 - DNA, 1220 bp, Zea Mays
tgttatattggttcccacaagggaattggctctgcaaacatcacaagtttgcaaggagcttggtaagcatttgaagatccaggttatggtcaccactggtggaaccagtttgaaggatgatattgttcgtctgtaccaacctgtgcacttactcgttggaacacctgggcgtattttggatcttacaaagaaaggtgtttgcattttgaacgactgttcaatgcttattatggatgagatctttttacaaggggaatagatattcaagctgtgaatgttgttatcaattttgatttccccaagaactctgaaacatatctccacagggttggtagatctgggagatttggccaccttggtctggccgttaatttgatcacctatgaggaccggtttaacttgtataggattgaacaagagcttgggactgaaataaaatcaattcctcctcagatagaccaggctatatactgccaataatctgaccgttttcatatgctttcatttctccgcgaataatgagaacttttgtaaataccagctcatcaggttttatggtgttgatctcgtttgttgcatcagagacaattctatgttggtggataacattagatgaggcacccaactttttttattacaccttgtcatgctgacactgttatggctatatgagggcaaatgtcctgccacattaggcacaaagtagtgtatattctaggtgcctattcctaggccctgtcctgcttttagtttctttttctcttattttcatcctattgtgtcattagctgtttcacacaggacattttaaccctgttgctggttctgggcgtgtgatctgtcggtgctcacacaagcttgttgcccgagtcgaacttggggatgtgggcctcagatgggttattgggtgacaggtcggccattgaacttgaagtctggagtctgaacggtagtgaactggttaagtttgcaaataatcggtggtgagctgcatcatgttgtgctgtcttacccttgcagtcatgtcacttttgcttggtgccgtggtcaccatttagatttgcttggataaaacgctcgtcacgtttgtgctgactttgtgttcggcacaagcaacctgtccaggttatgtgtaaagaactgtttacttgtttttttcataataacaaacgttgcagctgtttttgcactctgtttctttccttttcgtgatataatta

SEQ ID NO: 23268 - DNA, 2419 bp, Zea Mays
cgcccatctccatctctccctactcagcctctcctgcacgccgccgcccatggtcgcccaggtcgtggcctcgccggatcccgcgcgctcctgtgtcgtggcgttgtccccatgttttctccgcgccagcgcgccaccggctctacttgagctcctccctcgccgtagctcacaggtcgccaccccatggctgctgctcctctctccctcatctctgcaactcggcgcctcctctactcctccacctgcagttcgccccatgttctggacgccaaccctccatccccctaccctccagccatggacgccctagctcccttttgttgctcgctagggaccagctcggtgccctctcctcacttgaagccggcaacaacgccttggtagtggtcgagcagcacgtcgtcggctccgtgggttttttgggcagcccggttgcggtgtcgtcaaaccccgttcaacagttgaatttcatcgagtcccagccagtttgattatatgaaccagaggcaagccaggatgccctaggtacataaatgtgtttctggtggaggtaaagttctaattccaacgtttgctctgggaagagctcaggtattgtagttctcttaattctactttatgagacaaagtgatggttaagtgtgataactatatatgacttaaatgagcaagtttccctgagaagtaccattctgagggcacactgttcgaaggtttcataatttgtgatgacttgttccactttttaaaaaaatcagtagagttgtctggacagctaacctcttgactgcttatgtttgatttgtatttgatatgtgcttttaattatttattaactagcagtagactcctaattccatgcttggttaattactctgaacttaaactagctaaatatagcttatgcaagttcttagactggcacatatcacttgcatccactgcctgtagccctgtacatgcaaaaattcgtgttagtagtatgtaatggccctagctacaactgcaaatagtacaagggatagcagtagagaaaacaaatgcggtgagaatgagaatcaaggtaagttggcttgcaagcttctatgcaagtgtttcctgtatccataactctgcaaaagttttggctaggataggaatcaaagggagagctaattcttccattgacttgctagtttggtggtactcccaacagaaactaaattgcaaggtaatgaacttaactttatatattccgttttgtggtactcccaacagaatctaaaattgcaaggtaattgcaagtgttctttgctaatcctcttgactggtgggataacaggacaaataaggttagactgggattgttcaaagttataaccacttgtcatttacatggtaacagtttacctcgcatctgaataataaaccttccttttgagcgcattctaattagcaaacataaaaaaacagagaacacatgagaactcaagaactaaataaaaaaagttcaaatatttactgagggagagggatatatggtcagtagagtgggtgaatattgagacggaaataataaacagccaaatgagttatgaaaggtattattgtttttctagtgatttaatgcatattttgtgtgtctttttatcatgatccatatgacgtttaatctgagtaacatgttacttgcacgattttttctgatgattgatacttatatgactgactattcaccctttaaaattattgcagtttaccaggatacatatttttgtaattgtttgtgacatgttagtcttttgtttaacctatttcatccatagggttctgcaaaacatccttttgtgaaatgatcctcgaccgtcaattctttgaaatgttccctagtaaaatgatttattcttgatggttcaaaagtttccctattccttggatgtatcatatgcatcggggatgtcatattgaagaatcagtataataatatggactatttggaggggtctttaaatgagcttggaagttggtgcataaggctgcaacaccgtctagtgagggtgttttggacaaagaaaacttgtaccttaaaacaggaggatacaagaagctggagtggttgtctgaaggcttttgaactgcttgaagcattagtgtagctttggtgcttttgtgactgatcaactctggagcagctagagtgatgtagttgtgggcttttgaacaatagctggagtgatatgaaatattagtgatgtagttgtgggcttttgaactgcttcaagctggagtgatgtcgttgtggtgcttttgtgactgatcatctctggagcttttgtgaatgatctagctagctatctgtaaatgatctagtcgtgaatgatattataattgtgatgcttttgtgaatatataattgtggtgcttttgtgtttatgtg

SEQ ID NO: 23269 - DNA, 2788 bp, Zea Mays
cagctccctcctgatgccgtcctcctccgactacttatttgtcttgaaaaacaaaaagaagattcctggactcgaaacttcaatctattttacagatatctgctaatgttgacatgtttcccaaagttctacaagacgccatgaacaaaagagatgaacagaaaagattagagaatttcgcaaatggaatgcgggaaatgcttgcaccttttgaacatttggctcggaagaatcatgtatgcccatgctgtgaacgtgctttcacacctgatgaggaggatgagttcgtgaagaaacaaaggatgcaaaactcaagtactgcagagagatctaaagctctggcaatggaatcatcaaatgctgaagctctttttcagcaattggataaacttcggactatctatgatgcttatgtgaagctggtagaagaaaccatacctctagcagagaaaaacttgaatcaacatttggcggatgaaagtcagaaggcgcaggcatttgatgatcttttgggtgttcttgcccatgttcaaatggacagggatgcagtggaagccttattacaacccactgatactattgacaggcatgtacatgaaattcaacagctagtcaaagaagtagaagatcttgaatatgcacttgattctagtggccgaggtgtcaagtctttggaggaaattcaactggagctgaactttctgcagagaacaagggacacattgattgtcgaagtggatgatcttagagatcaacatagaatgctaaatgaagatatgtcaagtgctcaggtgagatggcacaatgctcgggaagagaaagtgaaagcttctagcatattggaaagattccaaaaatctgaagaggaattggtgcttctagctgaggaaaaagaacaactgattgtagaaaagaagcttttagaagagtctcttgatccattgtccaaagagaaagagagcttgttgcaagagtataatgctttgaagcaaaagctggatgaagagtatcatcagcttgcagaaagaaaaagggagttccagcaagaacttgatgctcttggaagacttagtatgaagataaaagggtacttggattccaagaaaaacgaaaagcttaaggaattgcagggaaggcatgttctttgccattctcagttacagagttgcatggcaaaacagcaaagaatatcagctgagttaaacaagagcaaagaactactgcagggccagggccagttgaaaagaaacattgatgacaatctcaagtacaggaaaacaaaggctgatgtggaacaacttactcgtgatatagaatcacttgaagaaaggctgctttcaataggtagcttgtctgctatagaagctgatctgaaacgccattctcaagaaaaagagaggcttaattcagaatttaacaggtggcaaggaacactttctgtttatcaaagtaatatttcaaagcacaaacaagagcttaaactgtcacagtacaaggatatcgagaagcgatatactaatcaatttctccagcttaagacaactgaaatggcaaacaaggacttggacagatattatactgctttagacaaggctcttatgcggttccacagcatgaagatggaggagataaataaaataatcaaggaactgtggcaacagacatacagaggccaggatattgattacataagcataaattctgattctgagggtgctggcactcgatcatacagctaccgcgttgttatgcaaactggtgatgctgagctggaaatgcgagggcgctgcagtgctggtcagaaggttcttgcttctcttataatcagactagcacttgcggaaactttctgcctgaactgcggtatattggctttggatgagccaactacgaatctagatgggccaaatgcagagagtcttgctgctgcgctgttgagaataatggaagccaggaaagggcaggagaacttccagttgattgtaatcactcatgatgagagatttgcccatcttatcggtcaaaggcagcttgctgagaagtactatcgagtctccaaggatgagaaccagcacagcataattgaatcccaagagatatttgactaagggtgttctaggaggctgtagcacgcactcgtttgctagtcgaatccagttaatttatgccaagtactggtgccagagcaatgttaacaagctttaggaggctctgttacgccgttacgtcagttgcgtgaaacctatccttcgttgttgtatacttatttaatctggccagaggatggaatgtgtgcactgggtgatggatgtttcacgacatcaatgaatgtttcacaatctagcatccgttttttttgcttcacatgatgtcatacaaaatcgctacggtttcatttggttttggaggtacctacgagtacgatggaacacaacggcatgtttctgcgtcgttggagccgttggattcgcttcaacatttgtaaggttgtctcttaacgtatgatgcttgtgcaatgacgaccatatttgagaaagatatttgttaaaaaggagacttgtcacttaatatctagcttggctgtttgttctagtgaggtggtactatctaggagcgctgtgctatatgtggttgtgtcgtgttttagtttgggtgttttcttaccatctatctaagaggtaacgacctataccatttgacgatgtgaaccgttatacatctctatatttcttctctatgtatcccctaaagatttctctataagatatgttataaacttatattacag

SEQ ID NO: 23270 - DNA, 369 bp, Zea Mays
agtaaatatgcatagaatatcacatgcgataatgaacttaccatgattggaaagaaatgagaaaaggtcttgcgaggaagaaattcatcgggactccatcggccacacctcctgacctgcccatagtccaccatggcgcagtggttccagagccccttcggatcgagcgggctcgcctggcgggtggagttcgccaggtgctcgtgcattggcacggcgagtaggccgcatcagcaacatgggaatacctcgacgacttctatgcccggttcccggactttcagctcgaggacgagctggacctagaggggggagagatgtcatgtgcggccgcatgtacgccaggcacagacgcgcccatgacgtccg

SEQ ID NO: 23271 - DNA, 2340 bp, Zea Mays
tttatgttttcttttcgttcaaagaaaccgtactgataggaaacagttgatattttacatggctctaaaagtttataataataaagaatttaccaacccaggtggaattaataataacaggaggacctgtatctaaaattagaaatccttgaaggagaacacaggaagaccacccaccatgtcagagcctatttaaaccgcgctttgggcagccatctttcacacaacacaagagccttctcgctctgatctgagcaggaggaggaagaaagccaaaggccttccttgcgcttccagggcaaagaagatctgaggccgcggcggagcgtgacgacgacgaagtcggtcaggatgagccgcgaggataccctgaaagtgcagaccctcgagctcaaggtgaacatccactgcgacggctgccttaagaaagtcaagaaggtgcttcacaagatcgatggggtgtaccagagcacggttaatgcggcggagggcaaggtgacggtgtccgggctcatggacccggacaccgtcatcaggaagctgcacaaggccgggaagccggcgcagctgtggggcgccaccgccaagcctgccgtggcgacccagctcgagaaactgcagctcaaggatgccgggggcaagggccagggccagccgcccaagaacgcaggcggcaagggtcagccgcccaagaacgccgccggcaagggccagggccagggccagaagcagcagcagcccaagggtggagcgggcggcgccggcgccggcgcgaaagtggtggcgctgccgcactcgcagccgacgccgcagcagctgatgcagatgcagcagcagatgcagatgaacgggatgaagtttgctcatccggagctcatggccatgggcgcaggtcgcatgccgatgccgatgccgttcccggcggcagcgcaggcgcaggcgcaggccgccgcggccaaggaccccaagaccgtcaagttcgacctcccggggggcgaggagttcggggacgacggcagcgacctcgacgacgagttcgacgaactagacgacgtggatttcgaggacgacggcctcgacgacgacgacgacggcgacctgtacgacggccccgggatggtgatgaagcccatgggcatgcccccggccgctgctgccggtggcggcaacggaaacggcggcggcaagaagggtggcggcgggaacgaggtcccggttcagatcaatgggaacgccagcaacggcggcggggcgaagcagaacgggggcggcaaaagcggggccaagaacggcaagggccgccgcatgcgggcatgatgatgaggccgccgaacatgatgggcggcgcgggcggtttccccggcatgggccagatgggcggccacccccacatgggtggcggcggcatgccgcaggcaggcgggggcgccgcgcacggcatgccggctggtggcagcatcagcatggccgctggcggaatgcctggggccgggttctttccgcgcggcgttggcggcggcatgccggccggcgcggagatgctgggcatgtcgcagctgcctccgcagcagcagcagcacatggcggcggtgatgcagcagcagcagcagcacatggctgcgatcatgcagcagcagcagcaacagatgatgatgatgaacgggcacggccacggccacggccaccatggccacggcgggtacgggtacgggcgcccggcgatgccgcagtacccgccgccgccggcgtactactacccgatgccgcagcgccacccgcacgacagcatgttcagcgacgagaaccccaacgggtgctcggtgatgtgaggcgaggcgcggcggcggcctgcggggggctccggagaaagtgaaccaggcaaccagccagccagccaaccggaaggagggagctcgggcccgtcaggtcggaggcggccgccgtgagtggaagagtcgtcgtcggtatacatgaagaaaaaaaaaactagctatatgctatagcaccagccgtaacctcgccgccccatttcgttttcgtctttcccctagtttgttttcacctttggtactttttgtttcccttctctgaacaaagaaagagcggcatgcagcttcctcttccttgagtggaaggtaggtatagtggtaacaacaatgatagtggtgatgctagctgatggctgtcttccttcgcttctttctttcttgcttgcttgcttgcttgcttgcttgccccatatctaatgaatggacaatgtgcaagagcagtgcctctctctgcctgcctagcttgttgtgtgagagagacagagaagaatcatcatggatggaggtagat

SEQ ID NO: 23272 - DNA, 657 bp, Zea Mays
tcattaccctggaactcatctgattgaggtctcctcaattggttacttcttttcccctgtccgagttgatataagtgcaaggaatcctggatatattcaagcagcattgactgaaaccagaagggttctgaatgagcttgttctggaacctctgaaagaagagcagtactatgaggttagggagccgttctccatcatgtcacttttgaagagccccatggggttaatggttggttttatggtcttaatggtctttgtgatgcccaagatgatggagaacatagatcccgaggagatgaagcaagctcaagaacaaatgaggaacaaccctgtatcattctctggcttgctcgccagagcgcagggctagagaagtagactgtagacatgaggatactgcaaaggtcaaacattctagaatgtgaatctttgacaccttgcttagtcatcatcagaccacggcggactgtggacatttttagacttgtgtagtgatgcgtcagagacctcgccaggatggacagagggatacccatgcaaatttgtgcacttatgcatccagctaggggtgtaatcggatcgaatacagagtatccagccatccgattcgtatccaacacatgtcagcgaatatgagtaatttttttaaaaaataaa

SEQ ID NO: 23273 - DNA, 2502 bp, Zea Mays
gcgcgtcgagatgacccaaccgcccacttcctccactccccacctccgcctctgcttcgcgacacggcggcgctatccatgcaccgtccgcccatcacatcggcgtaactcccaccgattgctgctgctgttggcggtcccgagccggccgcggagttcttgccgtctgcctcctctatagtacctcatctctgctccggattcaaaagctcctattcttccaccgtttgcctcctcccgcgtcttaattgcggtcactgtccagccgtcgatctcccccccctcttcctttcctcgttcgcttcttgcgattttcgtcactcgcatgtgaaacctctccctccctccctctcccgcctccgtgtttctgtcacaaggatcgggtggggcggaacctcgaaaccgcgtttcgtgtacagcctgccacccttcgcacctccaaccatcttccctccgtttctttcaagtagcccttccttctcaatcgcttctccgccaaaaaaatcctttcttgtctggggtccagctttgtcacgagccactgcatccaggaggaggaggcggcggcggcgttacctgccctgctccggtcgactggctcccgggagttcggagccgagatctcgccaggccccggtcggcggcggcgttgtgggaaacaggatggggggatctgccccgcgctgcgcctgtggctctgcttgctggcggcaatggcgggcggccgcgtcggcgccctggccggcggatgcgctggggatgaactgggggcacgcaggccacgcacccgctgccgcccaaagatcgtggcgcagctcctcagggacaacggcatcaagaaggtgaagctgttcgacgccgaccagggcaacgcctcagcgcgctcgccggcaccggcatcgaggtcatggtcgccatccccaacgtcatgctcgacaccatgacggactacgacaccgccaaggagtgggtgcgccggaacgtgtcccgctacaacttcgacggcggcgtcaccatcaagtacgtggccgtgggcaacgagccgttccttgcggcctacaacggcacgttcgacaaggtgacgttcccggcgctgcagaacatccagaacgcgctgaacgaggccgggctcggcgacaccgtgaaggccaccgtcccgctgaacgccgacgtgtacatgtccccgaaggacaacccggtgccgtcggcggggcgatggtgcaagtttcctgaagcaaaaacaggcgcgcccttcacggtgaaccatctaccccgttcatcaccctgttctgaaacgacgacttccccggtggacttcgcctttttcgacggggggcgccgcgccgctgggtgggacccgggcagcggcgtgtcgtacaccaacgtgttcgacgccaacttcgacaccctggtggcggcgctcaagtcggtggggcacggcgacatgcccgtcgtggtgggcgaggtcggctggcccaccgacggcgacaagcacgccaccaacgcgtacgcgcagcggttctacaacggcctgctgaggcggctggcggcgaacgccggcacgcccgcgcggccgaaccagtacattgaggtgtacctgttcgggctcctggacgaggacgtgaagagcgtggcgccgggcaacttcgagcggcactggggcatcctccggtacgacgggcagcccaagtacccgatggacctgagcgggcaggggcagaacgcgatgctggtgccggcgcgcggcgtggagtacctgccccggacgtggtgcgtcgtcaacaccaacgccggcaacatggacaagctcgccgacaacatcaactacgcgtgcacgttcgccgactgcaccgcgctgggctacggctccacgtgcggcggcatggacagcaacggcaacgcgtcctacgcattcaacgccttcttccaggtgcagaaccagaaggaggaggcctgcggcttccagggcctcgccgtgcccacgcagacggacccgtccaccgccgcctgcaacttcaccatacagatcgccaccacctcggcgggtcaccggcggccgctcggcgtgggcgtgctcgccttcgccttggcccagctggtgctgctccttctgcattgattagggataggctggcgcgttttttgctgttactcatgtttggctggcatttggattatttggataggactggtacactactgcagtttgaggttgctgcctgcctggcgccattcgattagtttgttgggtttttttttctttgggggctgaaataattggagtggtagaaagtgttgtactggagatactgtacatgtatactgcttcaggttcaggattataaacaacagcagatgactgaagacttcagttcatcgttcatgggctaggacgcagggctgcaggcgatccaggcttgcttggtcctaaagactaaggccttgctcgtttatgttggtgggtcggaacgattctgagccagtttgtttctctaatttatg

SEQ ID NO: 23274 - DNA, 759 bp, Zea Mays
gcgagaattacggcccattagggttcacttccaaactcggcatctataaacacttctctcacgccccgccgccgcctccgctcgccaccgtcgtctaagttaggctagggttcgaccagctagcggaaatggtggccttcaggttccatcagtaccaggtggtggggcgcgcgctgccgacgcccggcgatgagcaccccaagatctaccgcatgaagctctgggccaccaacgaggtccgcgccaagagcaagttctggtacttcttgaggaagttgaagaaggttaagaagagcaacggccaggtcctggccatcaacgagatctttgagcgtaacccgacgacaatcaagaactacggcatctggctgcgctaccagagcagaaccggctaccacaacatgtacaaggagtaccgcgacacaaccctgaatggcgctgtggagcagatgtacaacgagatggcctctcgccaccgcgtgaggtccccctgcatccagatcatcaagactgcgacggtgcacttcaagctctgcaagagggacaacactaagcagttccacaacagtgagatcaagttcccgctcgtgcaccgcaaggtcaggccgccgaccaggaagctgaggaccacgttcaaggcttcgaggcccaacctgttcatgtgatttagctgtgcgagcttggtgaaccaatcgacgtgttgcgggttgttcgctctcggcatacttgaagtgaatcatccccatcaacattacttcc

SEQ ID NO: 23275 - DNA, 2284 bp, Zea Mays
ccgttgtcctgggaaaaaaaatgcacgtcgattggcggtagcctgcctaaccatggcggcgggcgtcctgttcatcatccttggcttcctcctggtgctgccgtcagcaacggcaatagggcaggtctgcggcaacgccggcaactacacggccaacagcacctaccagtccaacctggcctctctcgccgccgcgctcccagccaacacctctacctctccccaactgttcgccaccgccaccgccggccaatcccccgacgcggtctacgcgctcgcgctctgccgcggcgacaccgccagcagcagcaacctcaccgggtgcgccgcctgcgtcaagaactcgttcgcctacgcgcagaggacgtgcccccacgccaaggccgccagcgtgtacgacgacgactgcctcctcggcttctccagcagcgacatcctcatccccgccaacaacatgagcacgctgttccagtactggaacccggcgagcatccccggcggcgacgcctccatggtgagcgccgacgtgaaggacctgctgacgcagaccgctagggcggcggccagcagcccgcggaggttcgccaccgccttcatggacgcatccggcagctccatcccgacgctctactcgctggcccagtgcacgcccgacctgtccgctggcgactgcctggcctgcctccagcggctcgtcagcctgctcaacgccaccacgtccgtgcgcctgggcgggcgggtcctcgtgctgcgctgcaacttcaggttcgagaacatgatgttctacgacggcgcgcccacgacgcgcgtcaccacgccctcgtcgtcagggcccccggcgccaccgtttccggcgccgacgacgacggataagagagctgctgggacgaagccctgggtagttgccgtgtctgtactctgtagcacctcctctagcggtagtagcagcactctgcttcgtcttgtactgccgctggcgaagcagaaggtacacaaaaggtaggcctagattactacgaaagcctacttataacagctcgcgagggggagacgaagtagactgggaaatggaggcgcacctctccgagttttgggtctttgacttgcatcagatattggaggccacagacaacttctccgaagaaaataagcttggcgaaggtgggtttggccccgtctacaagggccagttgcccgagggggttgagatagctgtcaaaagactcgcttcacattcaggacaaggtttcgtagagttcaaaaacgaggtgcagctcatagcaaagctccagcacaggaatctggtccggcacctgggatgttgctcgcaggaggaggagaagattctggtctacgaatacttgccaaacaaaagcctggacttgtttatctttgcagacgaagacagaagatcgttgctggactggaacaaccgtctggcgataatcgaaggaacggcagaggggcttctctacctacacaagcactcccggctgcgtgtcatacaccgagatcttaaaccgagcaacatcctcttggacagcgagatgaaccctaagatctcggacttcgggctagcaaagatattcagctccaacgacgtcagcagcgaaggaggcaccactacacggagagtggtcggtacatacggctatatggctcccgagtatgcctccgagggcctcttctctgtcaaatccgacgtgttcagcttcggcgtcctcgttcttgagatcatcagtgggaaaaggaattccggcatccatgagtgcggagatttcatcaatatccttggatatacatggcagctctacgaagagggaaggtggagggagctagttgatgcttcgttgctatccatgcagcaccactcagatgaaataatgatggtgataatgaggtgcatgaacatcggattgctttgcgtgcaggagaatgcggctgatcgaccaaccatgttggatgttgttgccatgctgagtaccaagactaaggtcctggataagccgaaccacccggcgtatttcaatgtgcgggtagggaacgaagaggcgtccactactgctactactatgtcgtgcagtgtgtcgatgagataatataatgtatccatatatagtttgtgttttcaaggctgccatatcaatatttatttatctacataatataatgtatccatactttcatcctatctctctcatatatttttttattaaattgcatgtcatgtcatcctgtatatttatgtgacatactatttaatgagaatggtatatatatatat

SEQ ID NO: 23276 - DNA, 1565 bp, Zea Mays
ttctttcaactttttattcttatttggcaatatgcaagcatataaatcgtgctacaaggccaatatttgatcaatatgttggacaatatggtatagaatcaattgaatttggagagttgacacttgggactcttccacctacatttcaaggcattaaagtttacgaaatgttagaaaaagagttggtaattgagcctgtgattcggtgggctagtacatcaaatgtaacagtgaacgtaaaggtgcaatctttcgaagtgacggttcagcttgaagatttgcatataatgctgacaccacgtgtgattttgaagtcacttgtgccaagctttccctgttttgctaacttgtgtgtttcactaatggaaaagccacgtatagattttggattgaaactcttgtgtggagatgtcatggcaataccaggcttgtatcaatatgttcaagatcaattatcaaagcaaatctcaaatttgtatcactggcctaaggttatacagattcctatcttagatggagcaagtggcgctacaaagaagccagttggaatcttgcatgtaaaggtaattagagccctgaatcttctcaagatggactttctcggcaaatctgatccctatgtgaagatgcgcctgagtggtgagagactgccctcgaagaaaacatctgtcaagatgagcaacctgaatcctgagtggaatgaacacttcaggttcatagtcaaggatcctgatacccaagtccttgagcttcacatgtttgattgggaaaaggtttctagcagttaagatgcatgataaattgggcatgcaagtaattcccctccgcttgcttacaccttacgagagcaaattattcacgctcgaccttgttcgaagcatgaacccaaacgatccgcagaacaagaagaacagagggaagctcatcgttgagttgacatttgatcccttaagagaagacaatatgtcttcagatgctgaaggtaatgctagcgtgagaagggatgcggacggtggtggtgggggggtgctgttggtttcggtagaaaatgcggaagacgtcgaagggaagcggcatactaatccatacgctgaggtccttttcaggggagagcggaagaaaacaaaggtgataaggaaaacaagagagccaagatggagcgaggagttccagttcatggtagacgagcctccggtggaagataagatccacatccaagtcaaaagcaaacgccgcgggcttcccttccgcaacaaggaatcgctggggcatgtgaatataaacctggtggatgtggtgaacaacggccggatcaacgagaagtaccacctcatcaactccaggaacgggatgatacacgtggagatcaaatggagcactgtgtgattattcagctcgtgtaatgtttaacatcaacgggctgccaagaggcgtgtgactggtttgtgagttgttgccgttattattataaaaaaaccgatcggtcggggcttctttggttgcttcctatggcaacatttggtaccttcacaagaatcagtagatgacaagtgtagatgccgatt

SEQ ID NO: 23277 - DNA, 725 bp, Zea Mays
tatctcaatgttctctctagagcttgacaatgtattgaactcgaacaaaagctccgatctgaaattgctgaggtggaaaagaagtatcaggaattgttgggagagctcagatcattggatgtgaagaaagagaaacaatgaactctccacttcagcgcctgttgtacaattaattgctcttttttctttcctgacctgtgaagatgatgactggattacttcccgagacgtgcagggaactggtcccttggacaaatgttatctaccgattaccattcgcttggtagtttcgttggatagctgtagaggtgtaatttcgtttcactaatcttcctagggtcctgtgatggtggaagaaagtgagcatgtagtctgttgtaaaattatgcaacttgtatctgaatgtacagcagcggtttcaatgttaatggccctctgtttccagcagcacatctcggtcccgtgtcaaaagaggtggattttgatccggcactctggagtctggactctggagtggatacttagaattagacttcatatgttgtgcagtatgtaaaattacttttcgtactcgtgacagtcttaaactggtggttgtgttgtatttgagacgaggggggttagtcaagcctttgttcactccaacagtacattgtaactgtacatgagtgatggtgggtatcagctgtttggttgctgcattaatttattttccaaacctctta

SEQ ID NO: 23278 - DNA, 1283 bp, Zea Mays
tgcacattcaattcttgtctataatggtagcaagttccacctgtgtagtttgccgtatatctgactacgtggcagtttttgtcactttaggaggcattagaatatagttactagttttttattaactatgatcttgatactactcgtacttgaacaaatgtaatctctttttaatcaactatggtcttaatactatctttacttcttgaacaggcattttacattagaaatatgactaaaatagtgtgcatatatttgttataaaaagagtgtgcatataaaacgttccaccttataatgtccattatgaatgcatgttgtaggaagttgatgacttggggagttggggtactggatcatgttatagtttctgccaggcttgaccatttgtgacccttttggatattattaccaagaaatttggacatactgccattttacacctgaatctcatggttggtttgctgcttctagagtctctgctacttcttggctacttttctttgttccatgctgggaaccaagctgttcttcggtggggaaagagtcccactatacttcacaaggtgtgcgacctgccatttgttttcttcagcgaccccgagttgatgcccatcttggctgctgctctgatcgctgtttgctacggttgcgatcagaacctaagcgttgtacagcaggaaataagcacggatatgctgcgctgcttgctcaagtcctgccaaacttcaggatcaaattctccagattccattgctgtggatggttctggaaacaattccactgaaagcattctggatatcaggaactcacagggtgacatcccaacaaggtcaagccgcaaaattggacggccagttattgggaagggtgtttcagggggtatcagattcaacagaaataaggttcagaaggatggtaggggaacaagagcaattgacgatgggcctctgaagcaaagagctcaagaagctgcatcgaacttcatgttgcatagaaagatcccagcttcttttttggacagagccgaggagttcttctgcagtgagacatgaaatcggccctgtggttcgcctaacttgtatggcacgagctactgaatttactgttttgcaaggatggtgtttcctgacctgatattttgatcgaatctgtagtctacagattaaaaaaatgagtcatgtacggaaacgaatgcactgtttgtacagaaacacagaagaaaaaactgataagagaatctgatttcgtatgaaagaaaggaactgtccataatttactta

SEQ ID NO: 23279 - DNA, 609 bp, Zea Mays
cagactttttttgcgtgcgtgggcggtttcgttgcgcgtgccgcctcttcgtgcctgggtgccgcacgccctcaggccactgcgcagatcgcccccacgggcgcggcaaggcagggtcgggtctctgcgcacggcagccggccggctccagcccctagccgtggccatggcggcggccagccccatcccagccgatctcggtcctccggtgatgcccctgcgtcggtcgagtgccagtcgcctgctctggatgaccgcagagctgtctcgcccgcactcgacgtcgcgcctggagccgtctcgctcgctcagccgctgccgtcgagtctcccagcgtgtgcagccccacctccacgttggctcgtcgttgatcgccctcgccagtgtgagtcgccgatccgagctcgcttgcaaagcaccgcgcgctagagcaagctgtgtcttgagcctcgcctcgccgttcgccatcttcgcaaggtgagaatcctgcgtctacccctacgctaattaatttcctacttagttgtgagtcattaaattgaatactcaatcaaatcaatttacgattttaattatacgattgtaagtacgtggtaatgtgattttaac

SEQ ID NO: 23280 - DNA, 1090 bp, Zea Mays
aattgctctacgtgaacgaagcttctggaaactcgctggcccgatggcatcggaggccgcgattgctcgtgcgcagtgcctccttcgcttccgccgctggtcgccactgccgcttcttcctctcccttcccctcccgctaccacacgagcagcttcctgccgccgcagcgtacgcatggcctcgtcggacggctctgccgcggccctgcccagcgctaccgtcgatgtgcccggcgccggggcccctgtcctcgtcgtgggcgcgccggggctccccgaggctgacttcaggaacgcggtggagtcgtcgctgttcaagcagtggctgcggaacctgcagtcggagaagggcgtcctcacctacgggaggctgagcctcacgcgggttctcatccagggcgttgacatgttcgggaaacgggtgggctttctcaagttcaaggctgatatcgtggacgaggaaaccaaaaccaaggtggaagaagagactggtataaagctgaatatagaagacatggttgatcttacggcactgctggaccctgctactggaggtcgaatgctaccatcaccgggtggctgcgacgaagagattggcctgttcctgtacaggggccgcgttgacgaggagaccataagatcgctccaggggaaggaaaccgggctgcgcgaccacggtgagctgatcaagctgcgcgtggttccgtacagcgagctctggcggtcgaccggcgacgcgaaagcactctccgcgatagccctgtacgagatggccaagagggaaggcctgctgccgcagccgacgccgtcggccaacttgtgaagacctgctagcactttaaaacagtggtggccgtcatgcctgtaaaatggaaggaggaacgtcactcgcgaaaccaaatcatatatatctctatctcttcgtttggtataacgcgcttaagcttgtctgtttgtgttatgtatacatatactaataatttaaaaataaaagtataatcgtgtttaaataaatatttcatttaatcctatataatatatagaatgtacgatcaattgactagtaaacatgaacatcgagtttaaagtt

SEQ ID NO: 23281 - DNA, 2956 bp, Zea Mays
ttaaggattttcttctccgctcccccggcccccattcgcacccagcacagctacagacggtctctatggccaagaaaggggcgaagagaaagcagcagccgccgccggcggctcccaccgcgaagaaggggagcaaggctgtgcccccaccgaaggctgcgaagagagcgcccaagaagcaggagcttctcgagtcctccgacgattctgatacggagcagcagctcctggaggaggcctcccacctcgacgtcccctctgattccgacgccgaagagctctctgggtcggacgctgaggctgacgagctctcgggctcggatgccgattccgacggaagctcgagcagcggcgacgacgtggaggatgaggaggaggaggaggaaggtgatggaagtgatgatgaccccctggcggacgacttcctcgctggtagcgacgaaggaagcgagggtggtgactctggactggagtcagacgagtctgatgacctcgaggcaaaatcacgagcaattgatgagcagaaaatcaaggcggaagaagatgcagaggaggaacttcaaaccaacataagatcagaatctgatgagttcagattacccacggcagaggagctggaggaagaggcacacagaccacctaacctaccaaatctcaaaaggaggatttcagaaattgttcgagtgctctcaaacttcagcaagctgaggcagaaagatgttccacgaaaagattatatcgaacaactgaaaactgatatcatttcatactatggatataatgattttctagttgaagcattaattgagatgttcccagctgttgagcttgttgagttactggaagcctttgagaaaaggccgcccgagtgcttgcggacgaatacactaaagacccggaggagggatcttgctgctgctcttataccaagaggatttaatttggacccgataggaaaatggtcaaagaaacaaggtgcaagttcgtttttaccagtgatggcacttgctccacaggagaaggaacgaattgttgatatggcggctgctccaggtggtaagactacttacattggcgctcttatgaagaataccggaatcatctatgcaaatgagttcaatgagaaaaggttgcatggacttttgggaaatatccatcgcatgggtgtgacaaataccatagtttgtaactatgatggtaaagagctacccaaagttcttgggatgaattcggttgacagagtattgcttgatgctccctgcacaggaactgggaccatttggaaggatctacaaattaaaacatcaaaggacattgaagacatcaggagctgcgcctttgtccaaaagcaattgctgctagctgctattgatttggttgatgccaactccaaaactggtggttacattgtttactcaacttgttcgataatgattccagagaacgaggcagtaattgactatgcacttaaaaagagaaatgtaaagcttgtgccttgcgggttggattttgggcgtccaggattcatccggtaccgggagcatcggtttcatacttctttagaaaaaacaagaagattttatcctcatgtcaataacatggatggattttttgtagctaagctgaaaaagttaagcaatacaattccggtgacgtctgagccgtctaaagcatctgaagaagcagctaaggctgatggtgaagatgagaaagctatttctaatgaacaagagactggtgttcctgataaagatgagaaaactgttgagataaaaaatcataaaaatgtgactaataaaagaacaagtgtcaccaaagagactggaagccataaacgtgaatccaataagccaggaaagcatctcaagataaataagaataatgctacaaaagaaattgatggccctgagagcagtgaaacaaatagagatgggaaagaagagcatcgcgtacaaaccaagaaaatgagtcacaagaggaagtttgcttctgatagatccaaaaaatctggccccgagagcttctcgggtgtcaaagagaagagacaggtcagtgacaagaagcggaaaaagaaatggcaattcaagctgaggcgtgactgggaagctgaaaagaaaggtgacaagaggaggaaggtatgaaggagtattcagatgtccacaggccccaatgaaatttgatgggtgtgtaagggcaaccgagaattttgagcaagcacgagtttgcagccaccgaaaattttgatgtatgaaatagcgattgtagtttattattttttattcagtgtacgtctcaagttttatctttaatgagtgacatatctggcagggaaactgaagcatattattatcttgctgaatgctatgtgaatcctgctgtacgtgttataaaaaaaaatcatatctgagatactagctgcaagaacctgacttctagatactgtgggttctgaatagtttcatcatgtggcttgtttggagatctagatcatgaaggcgcagtggcaactgattctgaagttcacgtttggtttggagtcttggagacaaggtgagatcagacatgtcctttagctgatcgatgtttgtgtttgataggagtgatggaggtggagagaatgcatggttgtttgttttcagatcagacatgtcctttagctgatcgatgtttgtgtttgataggagtgatggaggcggagagaatgcatggttgtttgttttcagtaattattgttcacttttccaatagagggtgcgtttggtgcttgaacagccgtgtccctccaattttaagggatagctaagatagtcttattttaatcttgatcttgaatcaaataatcttatctgagagtatgttctgccttgccctgttgttattgcaacaaaacatgctccgtcgatttcagccttgatataccgaacaagggcctcaaagatctgaagtggtgtaaggg

SEQ ID NO: 23282 - DNA, 2074 bp, Zea Mays
cttcacccaccagccccccaaatctcacgggctcacgacgatagacccgccctctgtgccacaaaggagctcctctccatcccatctccaacgtcgccccaacccccatcaccgacagggaacccacctctcacgtcgacaccgccagaggaggagatggtggagatacgggcgttgcgatccgaggcagcacgctagagcgacgagagcgtggcgacgtggagatcatgggagtcctgcgcagcgtcgcggcgaggcgcccgtcggggaggcagcgggcacggagagagcggagagtgacggcgacaacgggtcccgcctgtcgcgcgaaccagggaaatatctacatctcgtctgcgccgccgctgggatttattagggttctacttctagcccaggccaactccacaccaatccaatcctggggcgggcgactgcctccttccctcgatttgacgtgcgcttcctcttcctcgctcgctctcggtcgcagtcacaggcccacaacacaagcaactttcttattactgtcggggttccgaagccaacaaaaggacgcatcattccaactaactttcagagcagcgcagcgtgtcttgctttgttggtgccttgcaaaccgcaggtgctgtgctacaattgcagaaataaggtgtagtgtatgagaagtagagaaccaatgctcttttatagccctcaatagatatcagtttctttcttttctttgatttacacgcacactttcccagctactgtttgcttgtttggtatagcaggaagtatctttgatatataaaaatgagaaataggccaaggagtatgctatcacgatgagccgcccagatatatatatcgtgtgcctccgtcacatcgtgctagctggttcttttcttcatgaggcatatagggtatttattcaaatgcccgcaaagggagggcagtgcactgagtgcatcgggagggctcatagttcttctttgactgcaagggataggcagcaggtcttcttcagcctcttttcaattctccctttctgatggaagctggcgtgccggaaggtgccgagcaggtacatgtctcagctgaagaatccgaagactgccaagaaaggcgaggagaccacggtggccaagagcgagaagcgggggcaagaatctaagacgaatgccaagaagaaaatcttaggacgctcacggaagtgtgcccatgccgaacctgatggggagaaccgaaacggttgcagcagcactgatgcagacgagaactcacttgcagaaactgctgcctccgatcaggagaggaaggtggtgctgcaggaattgagaatcgaggtggatacatcacgagctgacaattccaatgacaacaaggagaatctgtcgagtgctccgagtgatgaagaagcattgaacaattcacattctgaaaatgaaaacagacagttggagaacaatgagaacgttcctctgaacgagaatgttgctctgaaggtggctaaactgcagagcaaagtgcatcaagagcaaccaggaaagctcaagaaaactaccaaccctaggccattcaggctaaggactgatgaaagaggagtgcttaaagaagcaaaaccagagaaaaggcagccgttcactgagaataattccacggcagtactcaaggatgcaaacagaggagtgacgaagaaacgaagcacccagattgtaacggctcagcagctcgatgagtccagctccaggccggccgtcaacagcatccaatgcagagctgtgaaaccggagagggtttctagggttgcatcatcaacacgaagagccaaaacagcaagtgaccttatggcaccttcttcccggactgggaagaagaggaaggcggctacggtgaagctgtcgaggatccaaacaccagctgcttgagctcgggcagatcaaggaggaaatgagaaactgccgacaacggtttttgttgtctgctccagcgacgagttctgtatttattactgcgtcgaattcgttttccggattaggaagtatctttgatatataaaaatgagaaataggccaaggagtatgctatc

SEQ ID NO: 23283 - DNA, 911 bp, Zea Mays
atgggcccatgttggccacgcaaggcacgcacgcatgagacacaggagtacagccgtacaggacacagccgccgcctgttcgtgttccttcctgtgcgagtcggcgaacggcgaggcgtctccggagtccggactgcggctgtggacagcgactctgtgacggcgactcggcgaagccccaagctgccaagcccccagttgttcgggggaattttttctaggtgctggttggaatggcaagtacagcatgctttgtgattgtcagtaagaatgacatcccaatctatgaggcagaagttggatctgcacccaaaaaagaagatttgtcttatcaccatcagtttattctgcatgctgcattagatgttgttcaggatctagcatggacaacaaatgcaatgttcctgaagtcagttgatagattcaatgaccttgtggtgtctgtttatgtaactgctggtcataccagattcatgctgcttcatgactcgcgtagcgaggatggaataaaaagcttttttcaagaggtccatgaactttacatcaagatattcctcaacccgctttacctgcccggctctcgcatcacatcctctcatttcgataccaaggtgagggcgctcgcgaggaggtacctgtaatacgggcatatgctggggtttcatcgtaaagcaggcacgccgatttttttgtgccatcatcatctgataacacatacgtctaatttttcttggcgttggctttgttatgaccgacctatggatcattttttttttcgagaacaaaatgacttgtctaatttttcttggcgttggctttgttatgaccgacctatggatcatttttttttcgagaacaaaatgacttggcgataatgttcaaactttaattgattgtgtcgtgcatcgcag

SEQ ID NO: 23284 - DNA, 1233 bp, Zea Mays
ttgcaagtaacaactactcttctccggactctcggggtttcccgacgtccaccacccatcctcgcttctctcgagtcctcaatccatcctccggctgttccctcccagcgacgaaaccctagcccgtcacctcgacgcctagcccgccaccttgccgcccgtcgctgcaggtttatggcgcctgtgtgatcggatcagcagtccgctccgtctccctcggcccacgcatctgatgttcctctcccgcatcgtactccgcgacctggattccatcgactctccggcctccatggcgtcctcgaagaaggttgtgacccgtgacgagtgggagctgaagctccgcgacgtcaagatccgcaaggaggacatgaaccgcctcgtcatgaacttcctcgtcaccgagggcttcgtcgacgccgccgacaagtttcgcatcgagtccggcacccagccggagattgacctagcgaccatcactgatcgaatggaggttaagagagcagtacagtcgggtaatgttcaggaggcgatcgagaaaatcaacgaccttaaccccacgcaaacatttctcgaggaaatagaaaaaactgtagcactactggtttttgaagatgtaaaaaattgcccttatggggaactattggatgtttctcaacgtttgaagactgcaagtgaagttaatgctgctattcttacaagccaaagccatgagaaagatccgaagcttccaagcttgttaaagatgttgaaatggacccaaaatcaactggacgaaaaggcggcttatcctcgaatcaacgatttcaccactgccgcgctggaagatccatcgatatgaatctgctgtgaaggaactgagggtatgcaccaagcctgcctggtgcctacacgtggttgccccggatctgtcaatagatcatcgtctgcagcgattgagttcaccccttgcactagtgtttaagatcaatgcaagcaattgatccgaaaacatcacctgtgttctacctgtacatgatgtagaagacatgtttgaaacctttttaagttagtgaaatgttggatttttttcatggacatatattcgtttcaaacctgtggtacttgcaacacgcaaattgtttcagtcatgctttgggccttgaattcacggtcctactgtcagtttgatgcaactgtgcaaagaagctcattttttttcaatgtcagaaccaattagcggctacagatttttag

SEQ ID NO: 23285 - DNA, 924 bp, Zea Mays
cacaacccggaaacgcgcaaagcgaagagggaaggggggatatcggggaaaaaaacgcaaggtaccaccgtaccagcagcgcaaagagccgggtgttggcacagatcaggcggccgccatggcggatcagttcgcggattcggcggtaagcctcgaattcttccttccttaatcatgtggcgtgggagaccaaagcaagttcgagtttgaatgtacagggtcagaagcggcacagccgcatcgtctctctgggcgactccgccgccgccgccgccgaaaaccaccaattgccccctctcccggccgtcgcctgtcggcaccaccttttctccctcctctatcactctttttctccatcttgcgattgaacctctggcagcgtcggcgccgtccggtcggcggctgtgtggatccggggcccccaggtgtggatccgctcgtaccttccccggatctggtgtcctgtcgcccgggtgtgctccgatgctctgcccggctctctggtgtcgtgcacgggcaggttccacttattctcgcgcgagacaccttgggctaagcagtctgtgtggacgggtttactcgtgaggcggcggcagctgtttgttccgatgttttggcttgtagaagtaagcgctccatggccggagctgtagttgattttggtgcatctgatttgaatttgatgtgtggaggactggatctgtagaatttgggcaagacttctacgtgatcattaggtcatgcgataaactgataattgtgtttgtttgaaaaaggcatgtttcaattgtgtcctagaaaagagattgcagactgcttttatcttgtacgtgagctttgatatcatacactagtaatttgcataagcttgataactgttagtacaaccttacaggtctggagctttctggctatcatatactc

SEQ ID NO: 23286 - DNA, 1818 bp, Zea Mays
gcacaaggcatcctcgtcgtatttttatttcgcccagcgccgcagcccgtctctcatcgcggctgcccctcggcgatctcaagagcctcggtcgcctctcttcctcagcccgctcgccccctcttcgatacccccgataaaacccccgacccgccccgtctccagctggccaccccatcctcgtcttctccaattccaaagtaagaaagccacacgcgaggccgaccgaggaagtccaatctcatggcgctctcctgcatgaggtgccccgcgggcgccggcgccgcctccgcccgacgcgccgcagcgcagccgttggccgcggaggctgcggtctccttcgccagatgccgcggcttcgggaggtccgccaccgctgcgactgccgcctggttttggcgcaaccatgccgttgcctcacagggagtgaaagctcccatggatgctgatgtcaagaatgctgtcatacctcctacctcaccaaaggtggaaagtggctctccttcagaaatcactctggatgaatttgaagacttgagcgctctatgcaagaatgatgattctactgttagcatcacagtagttggagcatctggtgaccttgccaagaagaagatatttcctgccctttttgctctctactatgaagattgccttcccaagcatttcaccatctttggctatgcacggagcaagatgacagatgctgaactgaggaacatggttagcaaaacactgacttgcagaatagataaaagggaaaattgtagcgagaaaatggaagagttcctcaaaagatgcttctatcattcaggccaatatgattcagaagagcatttcatagatctagacaagaagctaaagcaacatgagggttccagagtttctaaccgccttttctacttgtcaatacctcctaatatattcttggatgttgtaaaatgtgcaagcaaatcagcatcttcggtgaatggttggacacgagtaattgttgagaagcccttcggccgagactcagaatcctctgctgcattaacaagcggtctgaagcagtaccttgtagaggaccaaattttcaggattgaccattatttgggaaaagaactggtggagaatttgtctgtcctgcgcttctcaaatctcgtttttgagcctctctggtcaagacaatatataagaaatgtgcaacttatattctcagaagactttggtactgaaggacgtggaggatactttgatggctacggtattattcgagacataatgcagaatcatctcattcagatactagctttatttgctatggaaactcctattagtttggaagcagaggatataagaaatgagaaggttaaagttcttcgttccatgaagccgttgcagctggaagatgtggtcgtaggacagtataaaagtcacacaaaaggtggtaccacataccctggctataccgatgataagacagtgcccaaggatagtgtgactccaacgtttgctgctgcggcgcttttcataaataatgccagatgggatggagttccctttcttatgaaagctgggaaagctttgcacacaaaacgagctgagattagggtacagttccgacatgttcctggaaatctctacaaggggagttttggcacagatcttgatagggccactaatgagcttgtgatacgtgtgcaaccggatgaagcaatttacctaaagattaacaacaagattcctggtctcggtatgcgactagataggagtaacttgaatctccattatgccgcaagctgcaccacaagtccacaatgaaaaaacagcacaatt

SEQ ID NO: 23287 - DNA, 3111 bp, Zea Mays
aaggcaatcccttggtgaagatatcagcatactgagaggagggacggaagacagcaactcctcttggggataaggcgagcaaataggcagcccgttaacctctcatcatctgttttgtctagcgacagtatgcatattggaattcttgctgctgcagcccatgcagcagccaataacagccaattcacagtattctataacccaagggctagtccttcagaatttgttattccttttgccaagtaccagaaggccgtctatagcaaccaactatcacttggcatgcggtttagaatgatgtttgaaactgaagaatctgcaacaagaaggtacatgggaacaataactggtataagtgatatggatcctttaaggtggaaaaactcccaatggcgcaatattcaggttgcatgggatgaagcagcaccaagtgagagacgcaccagggtttccctttgggaggttgaacctgttatcgctccattcttcatttatccctcgccattgttcactgcaaaacgtccgaggcaacctggggtaacagatgatgatagctcagaaatggacaatctttttaagcggaccatgccatggtttggtgaggaggttggcaagagagatctgagtactcaaaacggtttagttcctggattaagtttggttcagtggatgaatatgcaacacaacccctctcttgccaacacggttatgcaaccggaattgctaaattcgttagctggaaaacctgtacaaactctggctgcggctgatctatctaggcaaattagcttccagccccagttcctgcaacaaaataacatccagttcaacacttcgctgctacctccccaaaaccagcagaccgaacagttagcaaatgtaatagctacaccaaaccaattgggaagtgttatagtaccacaaaaggcagttcaaaattccagttctgaacagaaacagaatctggttacacaaccactgcaagtcagccaaccaatggttagtgtggcacagcctcaacttgtccatactcaactccagcaacctcaagtagttctccaggctcagcctcagcaacctcaagtcattgtccaagctcaactacaacaacagcaacctctggttcaaaatcacaccaccatacaaagtggccttcaacaaatccagcttctgcagcaacagcaagttcagcagtcagtgcaggaacaacagcaaataaagatacagccttttcaggtacctaatgatgccaacatggtaacacagttatctgatcagatgaaaatacaactattgaaggctctacagccacagcagcctctggtcatggaacagcagaaaatgatatttgatttgcagcaacaagcagtaaattctcagtcaactgctcagcagtgctcacaggtagctacccaagtggttggtttgcatagcagtagcactaatcagtacccgacgcagcaaaagactcaacctctcaaaacatttcaagattttcctgggaatgctgtttctattgtaaaaccagaaattgtcacctccgtgggtgctcgctctttgcatgtgcctggtggagtgcagtcaatgaagatggatgaagttccctcttcttcaacatcgccatccacaaacaacaatcctgttattttgcgatcaactccaagtagctccaagaaccaatgtttacctactgcagcaaaggctcctcagtcatctgttgtattgggttctacacttgaacagggtatgaagccttgtgacagtacacaacacccaatggtgattcccaagctggctgaagaaaggccagctactggacaagactacatgaacagcactcagctggattatttggatacgtcatcttcagcgacttcagtttgcctttcacaggctgacggatcgctgcaacaaagttttccaccttcatccttcaatcagcatcaaccgttgagggaagcagttccagatagcgagtttgaggttacagatgcaggaaataactttctatttggggcaaatattgatggccatatggagcctcttaacgaagacgatttgcttggaactgccttcgaagctgacaagtacatggaacagatgccaggaaacggcatctctaactacatttcatcaaaggattctcagcaagagttatcatcttcaatgatctcacatccatttggcgttgctgatatcgcgttcaattccatagattcgtcgatcaatgatatccaattcttaaacagaaattcccgggctccaggtcctgttcaacaacgtatgcgaacatacaccaaggtgcacaagcgtggcgctgttggaagatctatcgacatcaacagatattctggttacgatgaactgaagcatgacgttgcccgtatgtttggaattgaggggcagctcagcgaccaaaacagagttggctggaaactggtttacgaagatcacgagaaggatgtcctattagttggtgatgacccatgggaggacttcgtgaactgcgtgcggtgcatcaggattctttcgccgcaggaagagaggcaaatgaggctggccagcgactacggagacagctttcttggcaaccaagcgtgtagcagctcggacgggggtcgtccgtggagggtcaccggcgactagaaatagcaggctatgcctgagcacaaatgtttgatataatccgtcccacgatagcaagaaaatgatacgcgatttctgagcacaaacttttgcactcagatgatcgtgcaaacagttagcattttaagaaaaatgttgcagttcaatgtaactgcaggaatgtctctgatgtagcctcttcgatgtggcagccttaacaatcgatgtgctacagttactctgcctatgtatttactatactaccttggccttgtatatccttttgatgtaggcgcagctggatgctgaaccccccggaggctgttagggacaattacaaccgttcataatttgccacagatacaaatctgagtggacaaatggattcagtttacgtatgcttcattgtttgtgagcctaccttgatggccttttattttgttcagttccactaaaaaacgccaggtggacgtatgcagatttggg

SEQ ID NO: 23288 - DNA, 1715 bp, Zea Mays
atggccgcgcccgccgccgcctctgctccccggcggcaatggcggtacacgtgggaagccctaacgcacctccccctcctccgcctatacctcttcccccgccccgcattctcctcctccttcccctccgacctccgcgccgacctccgactccagggctccctcctccacctctccttctcgctccccggggatggggccaccatcgcgctcagggtccccgtcccgagggtgctcatagacccttccgcccccttcgagtgccgcgccgccgccgcgggggaccacctcgagctcctcctggcgctcgtcctgcccgtcgaccaccccgtcgtcgccgccgcgtttcccccgcccgccggtgcggagcttccggctcctctagctctgcgcgatgatttgaagggcttatctactggagacgttcacttgtattgcagaaattgttcgtcaaggttgacaaaacagccactaagtggtttgcactttgcaccactagaaatggtagcttgttctccccttggtagagattttgttgatatgaaaaaagctatttttgatgttagtgacgaaaacgatcataccgctgggaagataaagttgaagaattcagaagagcaagcaaagatcatagctacacatgcacaaccgcctactattttggaagaggggcctagtgttagtagtagtgaaacaattggagtcagtcagactaatcagcctgtcacttctcagatagaaactgatactgatgtgtactttgagaaggagcttgatttgttgctgggagatttgggccattgttgttgtgtcaatggatccaatgggaaagttgaagatagcccttcacaaatctccttgaggaacaggcagaatatgttggagattaaaagagattacaaactaacaaaaactatttctcttggtagtagctttgttattaaagcttcaaaccttttgaatgattttgagtgggttgaacttttttgtggtcgatgttcatcacctcttggctcatacccttctcagagttcgcttgttccggctgatggccgtgtacgactcttcaaatgctacacatctacagaaattcctgtaacagggtctcatgatgtgtttagggggcatacattggaaagagtttttgtgaatctgctgctcgaagtcgcagaagatgaaatatcttttcggacagtagtcagagatttgaaaaccaaaaggccaatgctgcaattagttcttcttagctcaaaagcatggttatcttctggttggtgctatgaaaatgataccaatggttcacatggaacaacagatctgcagcctagtgttaaactcttgtattctgattataggaatgcttcagaagcagacttaagtagaagagtgggcatccaaataccgggctgaagagctgtacatgatgaggcggcaaatagacgaactcactgaatgcctgggctcggcaatggacaactttccagtttcttgttcttcccttgaaggcttgctgctctcttctcttaggcgctgacttgagtatacggtaggattaaaattctgcgtgaactgatcacatttttgtacccaaaggagtctacagctgatcggcatgcctggtcatcctcggtttcttttggactttgagctaggccgtaatcatctctaacatctgtaatggatcaattgctgctgctaattgtaaacttccaggt

SEQ ID NO: 23289 - DNA, 1277 bp, Zea Mays
cgcagcttcatggccctatgggtcctggatatggcggaaaacaggtggaggccgttgcaactgcacacacatccaactccggctccatgccgctccaacccaagcagccagcagctgcagcctgccctcctctccgactccaacccaatccaatggctctccgcccctgttgtctcacctcacgcgctctctgccctgatctgccgccaggcgccagaacgacgcgctgctccgcaccgcgtcaggtagaatggtagatggaccatggacgatatcgcttgggagcggggaaggaacgcagacgactcttcccgtgccgtgctgacgccaccacgcggccccggtctcctctcgccctcctctccgtctggatctggtcctatcccctccgccgccgtccttgccctcccggcctcagccacgagccagagcgccgggctcctggcctcgtctcgcctcgccggcgacatggacggaggcggggagacgctgctggtgcggaggagcaagggcaagaagagaccgcagccggcggcgcccgcggaggagggctccggcagcgggggcaggttccgcgcgatctggcgggactaccacgacctgctgcaggagactgaggcaaagaggaagaggctggcaagcacgaagcggagaagcctcgccttgcttgctgaagtcaagttcttgagaaggaagtaccagtcctttctgaggggtggctcgcagcagacacattacaggttgaagaagcaggctcggtacatgccatctccattgggaagcaataaggctgcagcgttagccgatcatggtgcaggggacccaagtgccttctaccagcaaaaactcaaaacttgacttgaatcaagactctgttctgaatgatggcatccataagtcgaaaagtttgatcaggtctcaaattatcagtttgtagggataaaggaaactctcctgcaattgaaggtaagaggacggttccatggcaagaccggctagcgttgaaggccgaggccctcagttgatttggccaagaaataagctgcttctctgatagctggctttgcaacagtatccctcagatgcacagtaatgctttgtatagaacaataggacacgatagttatatacatgatacattgcctaattgacaaactcagatggttgcaccatgctcctaagcaagttagacaaataaactgtgattttatgaatggttctgtccagattttggattgactgctttgaacatgccaaatgctttagcatgaacaagg

SEQ ID NO: 23290 - DNA, 2296 bp, Zea Mays
gtatcatgaaaaatagaacgagaaggtaccaaagctgggaaaatatcgtcacagaggcccaggtcctcgccgcccccgatggccgactcctccggtcgcagtggcggccgccccacgtcagcctcgccatccactgccacacacacctcaccggcgtctttcgacggcggtctcctactccgcctcctccaaaaccctccttctgcgcacccgcgagaggaaatcctcgccccgtcccccgttgccccgggggcgcaccacttctttagtgaccctgccgtcgccgccgtggggcctctcttcgccgcatcggcgcagacgcaaggaggggacttcgggtggtcctccacctcgaccacgcacgtacagcagcaaccccgattctcggatccccgattcgctccaggggaccccttcgctgctcttggcggtagagggttcggatctggggatgcggttagggcggagaggcctcggtcgggggcgccgcctccagggtttggcaagccgtcgcatccacttcctgctgcccgtgatgcgcggagtgcatctggtgtggtattgcgtaaggagcagtacaatcctcgtcccgtggatttcgttccggctcttgcagatgttcgtgatccggttggcagaatgcctcatggacacggagagcagttttacagggaacagcagcaagatcgttttttgtcacggaccccgcctgagatcaatgccaatggacagtttggcaggatgccaattggagagcagcatacacttcctatcttaggtggcaggaggctccatgtagatcagtacatgcctcccgtccaggaaggcagggcaccacatggtggtcatggcaagcatgaatcccgcttaaccaatccgctacaaagggagcagaggtggcagggtcttagggaggacaagggctatgcttcgcggaagctgccaaatgtgaatgcccattacacatctggtaaggcactggtgaaggaggtgcaccatttgacaatacctgctggcagttcagttccagtggaaattacggagaatcaagcgagtggtttggaaggaggcagaatagggaaagtagttttggaggatggaattgatgaagaaggggtagtggaggcaagtaagtttgaagtgtcatatgaaaagagtaagattagatttgctggacatgatgaacaagatgatggtggtgacagggaagatgctataattgagcagatggcacaaaatctgctgattgatggcaatggtgatgccaagggagtagtgttggaaaaacctatcctgaggagtaaggatttcagatcagatttttctagagggcatcatgtatcaagtcagagaataagattccagaggagaaacaggccatgtcgatatgacatagatcgatttacacctaacttcttgtcaatttttgaatctttggtgccctctgaagaggaaattgcaaatcagaaacagttgttaacatctctaagcagactgataaacacagaatggcctaattcaaaactatacctctatggatcatgtgccaattcttttggtttctcaaatagtgatattgatctttgtctctcgattgataacaaggaaatgagcaaggttgatattatattgaaattggcagatattttccaagctggaaatctccagaatattcaggaaaacagctatccatgtgcctaaaccttgatcattttggtcgcctgggagatttggaagcaccgtaatgcttgggggttgtgctctgcacccagcgagttcagagtgctgtgattgaggagggcagcgcttggtgcttggctggtgcatcagctctgcaggacctcctcctgcgccaactccctaggggaccctagcagtttgcctgctggtggcatgcttattaaaacgatgttaaaacgacatttaaacgtcgtttaaactataaaacactgacagaaagtgaaacgataaaacgttttacgattcatcgtaaaacgtcgtttaacgttgtttaaacgtcgcgttttgacgtttaaacgcggtatagagtgaaacgccgcgtttcgggcgtttaatgtgtctgctgctagaaattggcccagcccaattaggaactcccgcccaggtagggttggcgctctcaccaggccgccgctccaggccgcactccagggctccaggccaccgctgccgctgcttcaggccgccgcctcctcccccgtgcagcctcatccctcccccgtgctcagccgctcagcgtcgtcccccgtgctcagccgctcagcgtcgtcctccc

SEQ ID NO: 23291 - DNA, 927 bp, Zea Mays
ccttccagttcccacgaaaaaggaaaaaagaaaactcaagagcccaggcttatctagaaacctcgctaaccctcgaggcctcgagtagctatgaagcagcgaggcgacgacggtgccgacggcgcagctgctttcgccggctgcctggattgcaggtcctccgaccattgctttttgcgggaggcaacgccgccgccgccgccgacagtgacgacgctgctgccgccttcggtttctaactccttcgatcatcgcttttctgagttgtttgtgttttggaatcaaggtgcacatttgcatgaattggatcttttagcgaccagaccatataggtacaaacttagttccatggcttccgatgacactgctgaaatgtgaatgttctgtttcgacgacgttgccaagaaaattttgtgtacaaccaaatatcatttgtggatttagagaaagaactcttcatgaagtcattcatagcatcatatggaagaaatgtcattgccatcacccagatgaaacattccactatctgtcaactccaacaaaactattgtctagaccaaaacaatcattctccaaattaacaggatagtcctggagatgaaggccaggacctaccgtcgtttgagtcaccataaaaaagaagcaacattcgattggttggttggctaacggacccagcgcattgtccaaagctcaaccgcagcatggcgggaggcagctcatgcacatcagccagtcaccgatcgagcatcggcttgcggtaccggatagagcaagtgatacatttggcggatagatagccagcttttgtctaatactatagtttacaatgttgtatctaaacactatttatcaaaaccatggtatgtttggagctaccaaaactacggtattatcatagcaattgcaaagtataatattataaaa

SEQ ID NO: 23292 - DNA, 831 bp, Zea Mays
cggacatgccgcactacaatgtgaaccttaagtcaattgatgttggtggcactacattacagctcccggctcatgtttttgaaacaggagagaaaaaaggcaccataatcgacagtggtactaccttgacataccttccagaattggttttcaaacaagtaatggatgtggtatttagcaagcatcgagatatagccttccataatttgcaagattttttgtgtttccaatattctggaagtgtagatgatggattcccgaccatcaccttccattttgaggatgatcttgcactgcatgtgtatccacatgagtactttttcccaaatgggaatgacatatactgtgtgggattccaaaatggtgcattacaatcaaaagatgggaaggacattgtgcttatgggagatcttgtgctttcaaacaagttggttgtctatgacttggaaaatcaagtcatcgggtggactgactataactgttcgtcgagcattaaaattaaggacgacaagacaggcacaacctatactgtcgaatcacatgacatatcctccggatggaaattccactggcacaagtccctggttctgttgttggtaacaatggtgtggagctatttatagtacactaactctattgtacaacacgaacacgcacttaccgaaattcatttgattcgtattcttttcacaaaaaagaatatctagggttttaacttgcgttctctgaccacggaaaacgatgaaaacaaaaacgttgtgtgccatacaatgagcctgtgtgtcactagtgttatgctgagacaagtgttgatcccacttttgggcaggc

SEQ ID NO: 23293 - DNA, 911 bp, Zea Mays
tggcaacaaaccctaaatcatcacatcctctcctcacttcctccctctcatctggaggcggccgggcggcgcccccgtcacctgcaccgctgccggcgctgcgcctcccctccccacggttccagcagtccagccacgcctcccctcacaggcgcggcccctccccatctcaggcgctgccgtcgagcacctccccatcacaagtgcaatcgtccagccacgcctccactccacgtggctccaatagtctagtagccacgccacacgcttcaggctacacgtcgtccaggcatccagctcaggtcgcacgctccagccacgccatccaggcatccagctccatgccacgcgctccagccatgtcgcgtccagcggtccagcggctccagcagactagcacaacactcagttttacttgtgatggaaggaggcagtgtacggagcaagggaaaagagccatgtattggtaaatcatcatctgctacagcctgtgaatgggtggttactactgatggcttcatgatatgttgaaagagaagataggtggagagcttgttagatggaatgccacgaagtttggcacacttttttgttcctacagagtttttgggacagacaagacaagttccaagcttggatggtgtctagtgattggaaaaataatgattggagagatgaagaagaccacaaattcacctacaattgtttgataaataggatatggtgggagaaggttgaaatggtactgaaaactgtgacaccactctattctgtgcttcgatttgctgaccaatagaaaaaatggaaccatttctagctttcttctaaaaattttatctactcaagctgagatcttttgctaagttaaagcatgacaaaaatgtcaaaagagatttcatgaagaaagtgaa

SEQ ID NO: 23294 - DNA, 1236 bp, Zea Mays
aatcggggctcggacactgtttttatttgactggcactgtacagtccaaaaaatcagatctttttacctaaatccgtttagtccgaaaacacagacttagaccgggctggccggtctgcccaaattttcagtactaggtgggggtgggggaggagtacacaaggaaccgaggtccaagtaggctgctgcttcttccggttggtcctgccctccttgctgacctcggagcggagcggagcagagcaaggaaccggcaggagggaaggaaaggtccatggcggggagatcgacgtacgacaaccccttcgaggagggcgcagccgcggccgaggtcaaccctttcgcggaccaagctaaacgaggaggaccgacggctcagtccagctattctggcggcgctttctacacgacgtcgcaacgcccggctcctcctagcacacgcctttcgccgcttgctcctgaacctgctggcttctacaatgacttcgctactccagtggatatccccatggacgacacaaacaacaaggacaggaagacaagggagaaggagcttctggccaaggaggccgagttgaacaggcgtgagaaggaaataaaaaggcgagaagacgccgcagcacgagctggcgttgtgttggaagagaaaaactggccaccgtttttccccatcatccataacgatattggcaacgagatacctgtccatctgcaaagtacactgtatgtcgcattcgcgtcactcttagggttggtcgtgtgcctgttttggaacataatctgcgttacggctgcctgggcaaaagggtcaggtcctaaaatatggtttctcgcaatcatatacttcattcttggatgccccggcgcctactacctttggtaccggccactataccgtgccatgaggaacgagagcgctcttaaatttggatggtttttcctattctacttggttcacatcgccttctgcgtgtacgcagctgtttctccttcgattctcttcgtggggaaatcgttgaccgggattttcccagcaatcagtttgataggcgacagcgtgattgtcgggatcttctacttcattggctttgcactgttctgcctagagtctttgctaagcatgtgtgtcattcagcgtgtttacctctacttccgaggaagtgggaaggaagcggagatgaggcgggaagcagcacgcagtgctgcgagggcagcattttgacgaaccgtgtatat

SEQ ID NO: 23295 - DNA, 2656 bp, Zea Mays
atttcagatgaaacttgtgttctacctcatgatgatcgtggtctcttgacaacagcagatactggatccaaagctagtggctcccagttctgcattactttcaagcctaattctcatcttgacaggaagcacacagtttttggcaagcttgttgttggaagtgatgttctgaagagaatcgagcaagtagatgtgcaatcccctgattcaactcctgttgttccggttactatagtaaattgtggggagctcactgaccgtaaagatattggatctatgagaataggaattgataaaaagagggccgccaaatcaaagttgtcaaagggtatatcttctgatgaggaaagtaatgaaggacagcacaagggccgccgtaacaaatcttcaaaaaggagaaggaagaagagatatttttattcggagtcagatagctcttctgagtcggagactgaatcatctgattctgagagcgattctgatacttactcaagtgactcatctgatgtcagcagttcaagtgatgacaggcgaaggcgcagaaagagacattcgaagaaaaataaacgcaagcgttcaagaagaaagcatgaccaaaggcgtgaaagaaggcgtaggaagcgtgataggaaatcaaaacagaagtcaaaaaggataaagggtgacagtgaagctgaaagttcgagtgatagcagctctgaagatgctagaagcaagagacaccgccacgggcggaagtccaaggcatcatctcaaaggaaaatattgctgcagtgtctgctttgaaggatgccacgtcacctcaacaaaagagtggcataccaaacagtccagcacaagatgtctccccgctgcaaaatggggaaaactatacaaatggtgttaacgaatcaaaaattgaaaggaatgcagctgtcatgcctgttctaactggcaaccaaagcaaatctaggtttcctatacttcttcatacatcattctttgtgcttactgcttctggaagcggtgtttcatctgacattgataagcaggagccagagcatgagtgttaatcactcaatgagcaagagtatgagcatcagcccaagaagaagcccaatgaaaaggtcaattaccaccacaaagaggtcagttagcaggagccctgttcaccataatcgcagtggaagtcctgtcggtgctccccaaaaaagcgtgagcaggagttcagccagaaggcagagcatcagcaggagccctgctaggagcctcagcaagagcccacccagagatgcaagcagaagcccccacataagcaggactcctgttaaagctcacagaagaagcattagcaggagctcagctaggtccatggaacagagaagtctaagcaggagcctggagagaattcatgtacgaaaaagtgtcagcccaagaccaccattggcgaagccaaaaagcattacccgaacccctgtgacatctccattgcgaagcgttagccggagcccagctaggatttcaaggagcccacttaggccttctaggagaagccctatgagaagtccacgacggaacattcacagaagtctcagcaggagccctgcaagaatacttagaagtgtgagcagaagtccagtaagaggtggtcgacctcgccggaacattagcagaagtcccagtccacttcgcagggcattaacaccaccaaacaatggaaggagccgatctaggagtgattctcctgatgggtcacccaaacgcataagacgtggacgtggttttactcaacgctattcatttgcaagacaatatcgctcaccttccgctgatcgcttgcatcgttatggcggaagaaatgaccgtgacagatacatgggttaccggggttttcgccaccgatcacctcctcgacgttataggagcccctctagaggcagagtgtcatcgccaaggtacaggaggaggagccgaagcgcatcacgcagtcctgtccacagaggaaggagaggtgggtacaacaagagtcctgtacggagccgttcaccccccgccaggaaaaggtcacctagcgatcgtgcacggtcagtttctaggagccacctttctaggtcagtatcaaagtctccaccagtgcatcatccctccccacttgattctccatctctggagcgtgcaagtgatgggaaatctcggtccccatcaccgtctggtggaggcaagaaaggtttggtttcctacggtgatggcactcctgattcagctgggaagtaggtttccaccggatgtattgtactacctttggccattgtctcttgatcggtccagtgttacgtcactactgtagagaagagaacggttttggtccttgaggcgccccgtgtactggtgttgtcgctgtagaattgttacttaagttgtttgggatgatcgtcgttgtccttagattatcttaagacctagtactctgagcttagtttacgctcatgctgaacatgtagcagggcttcagcttaattaccattggtggaatttggatgttataatgtttgacgcatagagaatcattacattattttgatctcggagcacaataacatgtataattaataattaattccttctggaactatccaacactagcgtttctgcatgtatgcaataattcgcttggccg

SEQ ID NO: 23296 - DNA, 1860 bp, Zea Mays
gcgagacggctcgcgagccggacccgtcaggccgtcactgcaccacatgacaaacccggaccgaacacggacgcctcccagcaagtggtgacccgtttctccattctcgccgtccgattataaatgcgtccgcaaatgccgccagtccgctctctctcgctgcgcctccgcccccaaatctgcgcaaaggcctcccactcaaattcctcgcggcgaccgatatggttgggagcgtgggcaacgggctggccgatctgggtgcaagagccgtctccatgaacggggcggggaaggcgctgcgtcctgccgaagcggcggcggcggccgccgccgcggagacgctcccgatggagctggatccgtcggaggccttagtggccgctgcggtggaggcgaagggcgagaaggctgccaacgggaggagggagatcgtgatggggaggaacgtacacacctcctgcttcgccgtgaaggagcccgacgcggacgacgaggaaaccggcgagcgggaggcaaccatggctagcgttctcgcgctctaccgccgctcgctcgtcgaacgcaccaagcaccacctcggttacccatacaatctggactttgattatggtgcactgacccagctgcagcacttctcgattaacaaccttggtgatcccttcatcgagagcaactatggtgttcattcccggcagtttgaggttggagtgctggattggtttgctcgtctctgggagttagaaaaggatgagtactggggatatattactaactgtggtacagaaggaaatctgcatgggattcttgttgggagggaggtgttccctgatggaatattgtatgcgtctcgtgagtcccattattcagtattcaaagcagcaagaatgtacagaatggattgtgtcaaagttgacacccttatgtctggggaaatagattgtgctgatttccagagaaagttattgcagaaccgagacaaacctgccatcattaatgttaacattggaacaactgtgaagggggctgttgatgatctagacttggttatcaaaacccttgaggaaaacggctttaaaggcacctcaagtgacatttaaaaagcctattgggagtgtcagcgtctctgggcacaagtttgtcggatgccccatgccatgtggtgtccagataacaaggttggagcacataaatgccctttctagcaatgtggagtatctggcgtcaagggatgcaacaatcatgggaagcaggaatggccatgcccctatcttcctctggtacaccctcaacaggaagggctacagaggcttccagaaagaagtccaaaagtgcttgagaaacgcacactacctaaaagatcgcctcaaggaagcaggaatcggagcgatgcttaacgagctcagtagcacggtcgtgtttgaaaggccaaaggatgaagaatttgtccgaaggtggcagctggcttgtgaagggaatatagctcacgttgtggtgatgcccagtgtcaacattgacaagctagactatttcctgaatgagttagttgagaaacgggcgacttggtaccaggacgggataagccagccaccctgcattgccagagacgtaggtgttgagagctgtctctgtggccttcacaagtagcgagccttttgctttgcaagtgggttcattcttgagtcgagttaaaagtgttatgttgtactgtgttcattcttgagttgagttaaaaagtgttatgttgtactgtgttcgtgcgttctgcttctgtgtttctccacagtgtagcttatttgttgccatgggaataaaattccttctattaaattgattgatggaagttgcatcacggttggcttt

SEQ ID NO: 23297 - DNA, 3737 bp, Zea Mays
gcgacttcgtctgcttcgcatttccccccaattctctcccgcccaaagccccaaaccaccacccaaaatcctctctgccgcccgccgatggccaccgccgccgccatggccgatgacgacgacttcgcctcgccgccgctcgccccgcgtgcgcgggaggaaggaggaggcagaggcgtgtaccaggtgggcggcgtgccggtggagttcccctacaagccctacgggacgcagctggcgttcatgggacgggtcatcgcgacgctcgaccgtgcccggcggcaggggcgctcccacgcgctcctcgagtcgcccacaggcaccggaaagtcgctctccctcctctgctccgcgctcgcctggcagcggcactacccgctccgttcccctcccgcccccgatccattgctccacggcggaggattcgtcccagatgatacgcagccgcagccgacgccagtcgtcccggagaaggctgtcaagaagaagaacgccccgataatctattacgcgacgaggacgcacgcgcagataagccaggttgtccgggagtaccgcaagacgtcgtaccgagtgcgcatggccatcttggcctcaaggaagcactactgtgtcaataaatttgcttgcgcgagcgacaacattgatgagaaatgcaagtcactgctagacaagactgttcaaggttgcccagaattcaagaatgcacagaaactaagtcggcatccatcccttcagattggtggctgctatgaagttcacgatattgaggatcttgtcagagttggacagaaagcaaaaggatgtccgtattttgctgcacaacacatggcagaagcagcccaattggttttctgcccatataactacctgattagtccggttgtcaggagagcaatggacatcgatatcagtggttccatcattattcttgacgaggcacacaacatagaagatatagcacgtgatgctggcagtattgacatcgatgaagaatcactttgctatttaaaacagatgctaaagctaattcactatggcgaagtgttgcagggagaacttcaaaacctggccgctaatgaggccgttgcaatgatataccaacccttgcacgatattattcaggctcttattggttggattgctgagagggaggacaatttgcataatcatgagttcggacatccggcttcatattggactggtgaaaaggcaatgaatgaacttcagcgggctggtatttctccaatgtatttcccggtattgcaagaatgtgcaacaaaggcaattaaagctgcttcagatactgaatcagatggttcacacttaagtggtggtagtgctatgacactagagagtctattctcttcgttgagctacttttttgctcagaaaggacgcaattcatgtgattatcaacttgctttgcagcgttttgttaaaaaggaaggcaaggacgtaatttcttcaacatgcacaatgagtttgtggtgtctcaatcctgctgttgtttttcaagaaattgcagatcgaacactttcggtaattctgacttctggaacactttcaccaatgggttcctttacatctgaacttggtgtccagtttgaggcctgcatggaagctcctcatgtaattaatgctgattctcaggtttttgcagctgtgctatcatctggtccaacaaggcagatattgaatgctagctataaaactgcggacaattcatctttccaggatgaacttggagcttcactagaggaaatatgcagaattgtgcctggtggtgctctagtgttttttcctagctacaagttgatggacaaattgcaagtgcgctggtctcagacaggtcaatgggcacggcttaatgctcaaaaacatgtgtttgttgatactaacattgattcaacatggatcagaaacgatgttcaagtaaagctgaaaaggagatataatgattcatacaaatcatcaaaacatctgttaagtgggagtgaatggtactgtcatcaggcatttcgtgctttaaaccaagctgcaggtcgttgcattcgtcataaatctgattacggaggcataattctgattgatgagcgatatcaggatgacagaaatgttctctacatttccaaatggcttaggaatgcaatcaagaagtatgatagcttccaggagacaatggctaagttgcaaaagttctttcagaatgctcaggaaaaaataaaaattaaagattgtggcatcttccccaaggttaagttggataatgaagcacctcaatctttcagtgatgataaaagaaagttgccgtggccagaattgagttcctcaaaccactcagtatcacgatgtaatcagaaggtaaagactgaatgtcttagtcagaggattccagacattgatggtgtggcggtaaaccaaaaagttgtgggtatgtgttatacatcgccagaagtatcgaagatctctgttctagtaaagaaagaaaactcttcatcacctgaaagtttttcaacggtctgtccactgcatccgtgcaaaattcgatctgattccgaaggtgtagccaatactggagcaaattatggagtcaaaacagaaattataaaattggaggaggatgattttaaacctaggtatgcagagatcactatcttaaatccattagaagacaggtcacggcaacctactcttgttgagggaacttctgcagcgactccagtagctagtccaagcaactatgctgaggtaaacacctcagtaaatatcaacaatggagatcagattgcagacatgtccatttctcctttttcaacaaacagaaatctttcttccctgtccacactggcagctactcctgaaaggaccacagacaaagactgtcatgattcttttattaacagaagtgtaaattctcactatgagaaaaagagaaggttgagctccccaatgagttgtacttacacgacgcagtctagtcctccaagcaaatcattctgccacactggttctgttatgcctggggatttgaatagaaattctgaattgtgttgtaaaaatataggattgtccaggtgtgaaaatgtcaagtttgaaagaaactacagtccagaagaggtttcagcaaagaagtctatgcaaaagaaacttcttataaattgcattagatgcaaaacagctcttgggttagaagaagatgggtttcttgttacttgtacacaatattattcatcaaaattgtacttggcatatcttttgaaacatgggctatcaacttttggcatcctggaggatgatttttcagcatcgacaccaacagaggtacacgtagtgcagtgtgaagcttcgtcactcaacaaaaatgtatttggcaaattcagcagccagggtcatgtttggtttgcaaaggatggatgtgtatacaacgcaatgacctgttctttgtgctcttctgaaaacacaagtgccatggtcctcggtgtgcaagttcttgcaactgataggtcaaatcaacaattggtggaaaaggtgctcttgttcagtgatcgtttggatgtccagtctgagccatcaaagggacagatttcaagaactcgaagagatgctagtaacatctgccagcaatctgtgatcgaccttgattcttttgcatataaaccattaaagaaagatcctgtggcgctgaactcaagaaggtctaaggtgtttcttggcattgatgaattggtcattgt

SEQ ID NO: 23298 - DNA, 1061 bp, Zea Mays
taaaaatggagcaactttattctcttccactgctcaaccaaacacaccctaaacatgtccatagaggccagccgtttagaatattgattctcaataattatgaatgtcttcatcaaaatccgtttgaaaagtgaagtgatgcagagcttcgcttgtggacgtcaatcatttttcaagcttttaagtctgagaactagcggtgtagaattgtccgacggatcgatactgtaatatatcagtaccataaataatgaagtatacatgtcatgtggagaaccttactatactagcacgtagaaggccgtagcatgatcaacagagagggaaggacaggcttgcacgagcacgggggcggctggggccggggatcggaatctgatacctccgcggcatcctccggctgatcgatcacttcgaacaagcagccgcaacgcaggctggctgcggctctgcctggccggacctccctccaccggatctggacacccgatcgattcatggccatggctcgcccgccgcgccgcgccgcgccgctgtggtgtgccatcgccggacgccagacctccaacacggcaacagctacccaatcataccatacgcacagtcgatcgatcggggggggcacggatccaaccaaccggcggcgagcgtcgggacaaaatgccagccggtcgcaagcatgatcgagaatcgctgcacgtccagtccagtccagatccaacccaccattatcatctcgcacgcagacgcagccgtcgaacccttgcaggtgggtgtgcccgtgtgggggtttgagagaaccgacgcgtaggtacgccctggcgactgggatgggacggggcggcgaggacgaccggacgtcggacgatactgcccctgcccctgctatggcggctggccgggtcgccgtccggcctcagggtatttatcgctccgccaggacgtcgatgaccagctggtgcggatgaaaaaaaaaaaatgggctgacctcgcttcgtttcggtcggccctatcacctacctgtggctcaattctaggcgctaccaatacctggaacgtgt

SEQ ID NO: 23299 - DNA, 1110 bp, Zea Mays
tttagaataaagatatatatatatatatttaataattaatctataaatatagaatgtgaatggaagaaaaaaagaggtataaagaagacggaggtgggagggaccgagagagtatagcgtctgtttcgcaccaaccgaatagtcacataaaattccgtttgcccaaacctagagctacctccgccgccgccgccggcaatcaagacagctgatggatcctatgcagtcatcggtgagaggccgcaggtcttcgttgcatgctgatgctgtcataactattggaggagtccgacctgcaccacccccacaaacatccacacaacatgtatgtcaagatgaggcaatggtcagcagcggggatccctcttggatgtctggttacagcactgattcctgccggggtggttattacacttctgcactcaacctggagggtgcatcaattagagaactgaagctgaaatatcagaagctgaaatatcggaataaacctaacaattgtaatgcggacgatcatgtcaatgctgaaagatcacccggaagaaaagctgaggagaaaaaagtgctggcgagaaagcatgaagattgtgatgatgaccctttcattgaagaaattaaaaagacgagagaagcacatcaagaaatagagagagatcgaaaggcccgtgatgataagttctatgagctagagaagattaagcttgacttgaagcgagaccgactggatacaatgataatgcaaactgacacgagcgcaatggacagtgaagcaaaacaatactttaagctgatgaaagaagagattttggctcgtcgattcaagagtaggaaagcataggtgtttccatttaatggattttagactgaagttgtttttcgttctttttaatggagttagtatttggtttgtatcttcaataatgctataatacttgtggatgctctgcattagggccagaaaaaaagctcgagctggctcgggctcgtagcagttcggctcgaaccggtttaacgctccgaatgagtctgagtcgaacctctttttatagctcgtgaaaagagcgagccagctcgcgagctggttcgtggctcgaccgaagaacaatttat

SEQ ID NO: 23300 - DNA, 1268 bp, Zea Mays
cggcgatgtgtgtgcttcctaacctggaagcagaccttatgaagtctaccaaacggtgaaatatttacgtaagcgaatcagggtcttgaagatagcttccagatatgtggggttttgcatcaaatgcttgggcatccgggctggggaagaggagtcccccaaattgcacctcttcgagtgctgcttgttccgatgacgaagcatcctcgtgcacgagcagggaagaaggcctggaatgcccaatatgttgggagtctttcaatatagtggagaatgtgccttacgtgctatggtgcggccacaccctttgcaagaactgcgtcctaggacttcaatgggccgtcatcaaagttccaactgtgccgatgcagctacccttcttcgtttgctgtccctggtgcaacctcctgtcgcttcgcatactttacaaagggaacctcacgttcccacggaagaattatttcctcctctggatggttgaggggatgaatggtgagcgggccagatcacgcccagctactcacagcgagcaacatactccatggctctcaagcagcagcagagcaaatggaaatgcaggctgttcaaatcccacaagacgccaccttccgctgccaccgccggttgacactacttcgcccaccaatgcaaatcatgccaaccatggggtccctgtccctctgctgaacgcagagagagtacaagcttcgctgcgcaagtccttgtcgttcctggttcacctgaccgccaagtttcccctggtgttcatcttcctcctcatagtgctctatgcgatccctgccagcgcagcagtcttgctactgtacatccttatcacggtgctgttcgcgctcccctcgttcctgatactgtatttcgcgtatccgagcctggactggcttgttagggaaatctttgcctgagatttccttgttcggtaaaatctcaatactgttgttgagtccttgtataactgaaccttccctagatcttgttgcaagcgtggatgctattgcaaagttttggtttttacaccatgagatgtgtttacctcaagtctacatggaagggtcctctgttgcaatgcaaaacaccagcgtgctctgtgctgctggcatatgttctgttgcacagttgaggtgctcggagactgatcagagataaattatacgttccacacgaaattgtaagtatccctcctagagatggcaatgaaaaattttccgtccgattttagctcctcatctccatttccacgacaaaaaaaa

SEQ ID NO: 23301 - DNA, 4318 bp, Zea Mays
cccagtcccagtcccaccaccagggcagcacgctctcctccctccggcctccgcccactggatccgagacccacgcgcaaaactcgggccgggaaaaactcgccaggaaagagaacgctcggaagggaaacacaggctcgggctcgagacgaaaccctaaccctacctccgcttgcctcgacgtccctcctcgccggaggcctcccccggagacgcagcctccgctgagggctccggcggcgatgcgcccctcccagttggaggcgttatgagcggggaaatggcgcgcgccgaggccttgccagagggggaggcccccgggttcggtgtcgacctgtatgcgcaagccaccaaggctgtgtccctgcggacgccgttcgagggcgatgaggcggcgcccagggttcccacgctgcccgcgcggctcgtcagctgggcagggccaggggacgcccggaagaagcacaagaagattctgcctccccctcctgatgatgctgctccggagcctccaccacagtcacctgtagtcacccctgcgaaggttggcttgtgggaccagtttgaggcgtatttccgtcccgtaacactggctgacgtcgaaatgttaagaccaaagctcccatttggctacagcaaggttgactcatgtatgctagtaccatttctgggcagtggcaatgagtcaacaacccaagctgagacatatgacgtggctgtggctgaaacaaccttgtatttgggtgttggtggtgaagaagtggtcactaatcgggagcgcggcgtgcaaagtgtgcatctggctagtcagaaagagaggaatgatcaaagcattgaacatgacatacatgatgtggttgtgcaacagatggtcagcgacaaagagcttaataggcacagaggggtacagggcatacacgaagtttctattcagttgggagggagatcatctggagtggatcaagctgggagcagtagtggcattgttttaggacaatttgtcaatgaggaaggaacttcacttaattggctgctaggagcaacaggccggtttgttctcacttcagagcgacccaacaagaagagaaagcttctgggtgtcgatgctgggttagagcagcttgttctgcttccacgcgtaggggctgaggcatctgcaagctgtgatgtttgttgtcttggagaaagttccatggagtccaataggatagttaactgcagcaactgcaaggtgtcagtgcaccagaagtgttatggtttgcatgctgtgcctgatgggcaatggttgtgtgcttggtgtacatatctagagtctacagggtggtcattgaaggaagatgctggtaacacccagtcgatgccttgtgctttatgcccaaaggagaaaggagctcttaaacctgttaaagtggagtctactcgaaatgagggtattggccaccaaaaatttgtgcacttgtactgtagtctctgggcaccagaggtttttgttgaggacatggagtcaatggaacctgtacttagccttgaaaatgtccaagagaatcggatgaagttgacgtgcagtatctgcaagattaagcatggtgcatgtgtccgatgtagtcatgggacgtgtcggacgccctttcaccctatatgtgcaagagagtcaaagcatcaaatggagatatgggggaaatccaggcaccctaatgttgagttgagagcattttgctcaaagcattctgcagttgaatacgccagttctgtagataccagtaaccttgcatctgaacagaatcctagaaaatctggcccatacaataccaccctcaattctgggaaaattccagtaattaggttcacacgcaaaaacaaggacaaattcatcagttgtggaaccagtgcctctagttctggtaacctgatcagagtcaagacaatagagcaagatgctttagctaacacagttagaaatgcaaattctcaacctattcgaatatgggaaacaggtactggtcatccctctgttagtggtgatcatatcagaagttctggtgatattgctgtagtgcttagaaagctaattgacagtggaaaagttagtgttagtgatgtagcatctgaagtcggtatttcttcggaatccttggaagctgctcttgtgggtgaaactaccacgttttcccatggtttgacgctgaaaattatcaagtggctccaaaattctgtgcatatgcatgatgatgacaagggtgtacttgttgatgtgccggatttcgctgtaactgaacctgcacgaacaagatctaaaagcaacagcaagatactgaaagaaaataatgcaacatgcgcaacaggtgtgactattgtgcaaaatggagaaaagaacatggttaaagaagattctaatcccgagtgtgctgctaaagaatttgcaaacgaatctactcaggggttttctccaagcagcagcaaggatgttttaaaggacgaacatggaatattgatactgaacgacacctctggaaacaaagaatctggtacctccacacagataccaaatgaaaagcaaggtgcattacttggaagaaaaaataatgacttaactgaggtcgaactgggtccatgcttagagaaaggagtaccttcacatggccattgttttgttcagggtgataatggtgtagatggggtaggttcagttgaaaatagcttcaacacttcaaattgctctcatggacaaccttttttcaactttgatgattcacattcttatattcacccattcattaagaaaaaggtatctcatcattgggacattactttcaatcagaataaggaaactctgaatcactatatacaagagtcatcatatccttcacatgagaaaataccaactgattccttggtagaagtagagagtacagcagatacaaccgtgacagatcaagttttgaaagcaaggtcttcaaaaattcttgagcattcacctgatgatgaagttgaaggagagatggtgtacttacaatctaggctgcttgacaatgctgttgttctgaagcacagatatgaaaaattgatagcaaaggttgtccaaaatctttgtcgcgagctggatgctttcagtaaaagaaaatgggatcttatctttgtgaatcagtttcttcgtgatgttagagaagctaaaaaacgtgggagaaaagaaaagagacataaggaagcccaagctgtactagctgcagctgcagctgctattgcatcctcctcacggaactcaactgtgagaaaagatgcaaaggagaatgcaccagagagttctccaaaacttgttgctggatcttcaagggttggtcaacggactttttcattgccacggattaatgattcatcaaagtcatccaacaacaaagtatcatcagataacaaatttggaagttttcatatgccaatttcttcaaaagaaaatgggctatactgtgatgtatgcatgcgaactgaaactctgttgaaccgaatatttgtctgctccagatgcaaggctgctgtgcacatagattgctacagaaatctggaaaattctattgggccctggaactgcgaactttgtgaagatgaagacatttcatcagaagctacaagtacaaccgttagtgataaatcacattgtaatggcaagttaccctttgcacagtgtggcatgtgccatggcacatcaggtgcttttagaaagactgtagatgggaagtgggttcatgctttctgtgctgagtggttgttggataccaagtatgtaaggggacaagatagccctgtagaaggaatggaaaaccttgtagagggaaaagacacttgttgtctctgcctctgcaatgttggcatgtgcttaaggtgtagtagtggggattgcaacattactttccatcctacttgcgctagaagttctggtttatacatgaacacgaaagggtttggtactacatcacagcacaaagcatactgtgacaaacacagcgtagaacagaaagaggctgatgcacagcaatatggacctgaggagctcaggagcatgaaacgaatgaggatgcaagagctcattactcactgccacttatgaagagatcagtctgaaaccaacaaattatctttagctaccttgtgaaaactctgtggtttgcttgtatcattcgagttagctatttacagttttgggaatacattatgctgccacagcacttcatggggcagaactcatcagtcattattcatagaggaaacaatatatttaggaattgtttttcttatgcaaccaaccttgtgcattcctgacttcccg

SEQ ID NO: 23302 - DNA, 875 bp, Zea Mays
ctcatggcaagagtgcaaggtcgtgggcgtggctgtggcgaaggacgcaaaggcaagagcaagcaccttaaaatgtcagatagatcactggagaaatggccacaaagatcaatgccatcctctaggtcatggtgccacacaagatgatacacctgaaaatgttatggctggagtagggcttaaggatatgccctctggggcatccactacctaccaaatttgtgatgacaataaagacatgctgtattctcagtttactgggaaggcagaatctgttgattattcgaagctttcaacttcaagtaaaatttgcaaagtttgtgatggcactgttcatgaaaattcttgtcctgctcatgaccagcatgttgggttggaacctgaaccggagcaatccaacaagcaagctcttggcacagaaaaccatgaaagcttaagaaaattgccatgcatgccagctgttgacaaagttccttccgctcaaagtggtacatattgtttggcaagtaaccaacttaaaagagaagatgatcctcctggtccctgtgctaggccagagagctcaggtttgatgccacataattcatcaacagagaagaattatgccagacaacaaacaactacaatagctgcgaggaattatccaacagaatcgacggtttttgcatacaaaaaatttgttgagctctacagcttcaacaagttggaattgcacccatttggtctttgcaacctcgggaataggtaagtgattaatgcttcagttataattgcatatatgaaccatattatttgaggtgtataacctaactgatgtgtgccacaatttctttctatctttctacacatatgctatatgtaaatgaacataattt

SEQ ID NO: 23303 - DNA, 447 bp, Zea Mays
aacgaataggtccatcgccgcgcgacagcccactccagccgcgcccagccccgtgaacatccttcctctatcctataccctccagctccagccgccgccagccgtggaggtggagccgcccacgcccagaccccggagcaccgctggagctcgcagcgccgctcgcccggagcacggaggccggaccgccggacggccggagcactgccgtaggtcgcaggcccctcgccccaccggcgcccgaagtccagccgccgactcgccgactcgcaggttgtccagccgccggccgccgactcgtcgttgtccagccgccgaccgtcgactcgttgttgtccagccgccgactggtcgttgtccagccgccgaccacgcggtgaccgtgagcccgtgagcctgtgaccgtgagcacgtgagccaaggagaggtcgtgctccgccactgggg

SEQ ID NO: 23304 - DNA, 151 bp, Zea Mays
ctgatatactcaaagtgcataacttattacaatagcaggaaggtaggaaccctccaaagcttatacacaagcctaactaatcttcctccagaactggaaacgccctccagccacaggaacacctagagtactcctcatcacctacaacaac

SEQ ID NO: 23305 - DNA, 343 bp, Zea Mays
atggggtccgggtgaataagtatcggcgcccgcgaccgtagggatttttggagcgaaaaataaggggaggtctagccgccggttagtgagcgacacctcggtgggcgaaagagggtgtgccaccgccacaccattgcgcctctcgacatcgctctgcccccgatattgcgtctaggagtgcggcagggatcctgattgcgtgtgcgtcgagaatcaggatggttgggcgctccgggacttggcgattgctcgtcggaattcgtctccccttgtcaaactgtggcaaccgtggatgcctcaggccaacaccctaattcatggtaatgatagcctctttggattt

SEQ ID NO: 23306 - DNA, 624 bp, Zea Mays
cgactggcagactgggccgccgccgccctaaaccagctgaggctttcgttggtctcttcgccggcaacgagcaccaccaggagtgaagagttttgttcgccgtgcagtttaagatgtcagaagcacttcagaaagataaggaaattggtgaagaggaagaggaagaggagtatgtattgttagagttggacaattgtctttattcagacatatcgcctggtgctcagttcgtactctctgtcggggaatatgatgaaactattggcacctgctatctattttctgaaagtgaaactgaaccaaaacctgcaagtgatgagctggcaccttctaaagaaaacacagaaacaccgcttaacagcagtaaggaagcgcccttgaaggaggtgaaccatctggccagcgttcaaaagatcctcaaatttaagccaatcaatgtggagcactcgcagcatcgagcatatcagcacaaggacaaggaactttagaggaaaaaaaatacctgctgttttcttcagtcaatgcattcagtgtacagttttaggttcattgaaatgaggtgggctgtatacttgttgaatgttgagttcatctatatatatgagctactatatcgatctgctt

SEQ ID NO: 23307 - DNA, 5588 bp, Zea Mays
ccggccatcagatctctccccgccgcctagtcgcgccgccccagtcccccaccaccgcactccacaccaccgcccaatgtcgtcgtcggagcccgatgccgagggcgccctcggcggcgcctccccatccgcccgcgtgctcgcccgcgccctcgacaagatcatcaagcactcctcctggcgcaggcacgccgctctcgtcgccgcctcccaagtcagcgctcgatctcctctcctcctccccagctcctgatgacgagcccgagacctcctcgccctcccccgtccccggcctcccagcgcccgccgcggaagccgccctcaccgcacttctcctcgcgctcgacccggcgtccccgaaggtagccgagcccgcgctcgagtgcgtcgccggcctcctctccctgcgccttctcctcggcgacgtcgacgcggctgacccctccctgatctcgaaactcttcgccgcggtgctctcctgcgtctcgctgggtggcagcggggacgaagcgctcgagctgtccgtgctgcgcgttctcgtcgctttcgcgcggtgcccgggagtctccgtcagcggggagtgcctgggccaggtggtcaaggcgtgctacaacgtctacctcgggagccccagcggcggcaaccagctctgtgctaaactagctctcgcacaagtgctggtcatcgtgtttgcgcgcgtcgaggctgacgccatggacgtccgcgtgcgcactgtctccgctgccgacatgatggacctctctgaccgcagcctcaatgactccagcgttgtacaggcggcacaagtgttcataaacgaggccatggaggggagcgacgtgccggaggaggcaccacatgtagatgaggcgtcagttgaggcggaaggcgctggggaggatggtggaataagcaagataagggaggatggcctggctttgttcaagaacctatgcaagttgtcaatgaagtttggtacgcctgatagcccggatgatccaatgctattgagggggaaggtgttatcgctggagctggttaggatggtcattgacaatgcagggctattctggaagacaaatgaaaagtatcttgaagcagttaagcagtacctttgtttatccttgttgaagaatagtgctttgtccgcaatgagtgtcttccagttattgtgttccatatttatgagtctaatatcaaggtttagatctggtttgaaagaggaaattggaatgttttttcctatgcttatcttaagagttcttgaaaatgttctccagcctagttttttgcagaagatgacagttctaaacttcttggagaaaatgtctaaagaacctcaggttatcattgatatctttgtgaacttcgattgtgatgttgatgcaccgaatatttttgaaaggattgtcaatggacttttaaagactgctttaggtgtccctactggatctacaacaacattaactgttgcacaagaccaaacatttaggcttgagtctgtcaagtgccttgcaattgttgttaagtcgatgagtgcatggatggaccaacaactgagaattggtgaattttcaccaggcaattctgaaactctaagttcagctgataaccataatattcataatggagaagaatggagcggaatagattatgaactgcagtttgacactagtagttctgacataaccgactcttcctcacttgagcagcgacgtgcttacaagatggagcttcagaaaggaattaccttgttcaacaaaaaaccttccaaaggtattgattttctcattcggagcaagaaaataggcaattctccagaaggtgtggcatctttcttgagaagtactgctggattgaatgcaacaatgataggcgactatttgggtgagagggatgactttcccctcaaagtaatgcatgcttatgtggacgctttaaacttcgaaggcatggactttggtcaggcaattaggttcttcttgcaaggtttcaggttaccaggagaagctcaaaaaattgaccggatcatggaaaagtttgctcaaggctactgtaaatgcaatccaaatgcttttattagtgcagatacagcatatgttcttgcatattctgtgatcttgctaaacactgatgctcataatccaatggtgaagaacaagatgtctaaggcagattttatgcgcaacaatcgaggaatagatgatgggaaggatttgccagaagattatctgagtgcgctgtatgaccagattgtcaacaatgaaatcaagatgagtgctgattcttcagttgcacaaaccaagcaatccaatagtgtagggaggcttctaggcttggacaacattatcaactttgtcaattggagaccagcagaagacaaggcagtaggagcaaatgacttgctcattaagcacatacaggaaaaaatcaaagcaaaacgtgggaaatcagagtccacgttttatgttgttgctgatgcaaccattttaaggttcatgatggagtcctgttgggcacctatgatggctgcattcagtgtgcttcttgatcagtgtgatgataaggctgctacatcacagtgtttaaagggattaagattttctgtgcacatcacttctgttatgtgcatgcagacacagagggatgctttcttaacgtccatagccaaattcacatctctccattctgccgcagaaatgaagcaaaaaagtattgattctatgaaggctataatatctatcgcaatcgaagatggcaattacttgcaggaagcttgggagcatgtattaacatgtttatcacggtttgagcatttacatctgcttggagaaggggttcccactgatgcatcctttctgacagttcctctgattgagtcagaagaaaaaactaagaagtctacttctgttctatcttctaagaagactagtgctcttcagaatcctgctgtgatggctgctgttagagggggtacttacgatagcacagtggcaaaaggcagtgtgtcagcactggtcactcctgaacagatcaataatttcctatcaagcattaatttgttggatcagattggcattgttgagttaaatcatatctttgcccatagccaaagattaaacagtgatgctattgttgcttttgtgaaggctctttgcaaggtctcaatgactgagctgcagtctccaacagatcctcgtatcttctgccttactaaaatagtagagattgcgcattacaatatgaatcgcatacgtctggtgtggtcacgtatttggaaggttttgtcagatttttttgtgtctgttgggttgttggaaaatctttctgtcgctatatttgtgatggactctctgaggcagctggccatgaagtttcttgaaagggaggaactggcaaactataactttcaaaatgagttccttagaccttttgtgatcgttatgcagaggagcaatgctccagaggtacgagagctgattgttaggtgcgtctcacagatggttctgagtcgggttaataatataaagtctggttggaagggtgtttttatggtttttacttttgctgcagctgatgatacaagaagtactgtcctattggcatttgagacggtggaaaaaattgttcgagattattttcatcacataactgaaacagagacaacggcatttactgattgtgtgacttgtcttattgcatttacaagtagtcaatttaacagcgatgccaatctcaatgctattgcgtttctgcgattctgtgctgttaaacttgctgaggaaggattttcttgtcaagatagggcttttgaacaacccaggaattcagccatggtgtgtggtggaaatgccactgtgcaaaaagatggtcatatttccctctggatgcctctccttgcaggtttagctaaactgacaagtgattcaagactgaatatcaagaaaggtgctgtaggagtactttttgacattttaaaggatcacggacacctgttctcgctgacgttttggaccgatatctttgaacatgttgtttatcctctatttagcaatgaaaggtcgacacccagtgaccagatttcaacatcaaattctgcagagtataatttacctgatcttgaaacacaaacgttggcagtgaaatgcttggtgggtttgtttgttaatttctttgatgtgatccggccagaacttggtagaacagcatcaattgttacatctttcatcagaagcccctacaaacattgtgctaccattggtgtatctgcaatcatgcgtttagcagatggggttggtaacaaactttccaaagaggaatggaaagagatattgatcttctttagagaatcagtgacgcataccttcatcacgttttctaaaattgtaaggatgatgcaagatattgatatcccagatagaattgattcttattccgaaaccgagcaatatttggatcatgagatgtatgttaacgatgaagaggaagcgaatatggagacagcttcttatgctattgtcaaactgaagaatcatatggctctactgctcatggtgattcagaacattatcaaactatacgaggagcacagcaaatatcttcatgccgagcatattagcattcttttggagatgatgtcagctattgcgatacattcaagtgaagtgagctctgagttatccttgcagtcgaaatttcataaagcatgttcccttttggaggtatctgagccagcaattgttcattttgagaacgattcctaccagagttacctcaaacttcttcaagctctgcaacatgattatccatccttgtcagaagagatgaacatagagtctcaagtgcttgatacctgtgagcaaatattgcaaacatatctgaagtgcgcaggacacaaaccatgtgatggggcgtcccaaagaaatccgcctttacattgtgcagtgccgctgagcgcttctaagaaagaggaattggctgctaggactcctctggtccttcaagtgatgaaattgttgggtgatctggagagagattcctttaggagaatattaccctgctttttcccattattggctgatctgatccgctgtgaacatagctctggagaagttcaacatgcactgtacaatatcttccaatcagccattctccccatgataagggtttaataacagattgtgacccaccaattgtacagtttttgttaccccactttggtgttgtaattcagttcattgtggcgtcattccattacgaggggttgtatacctatgaggatgacgtataaaaatgctgcagggtctgtcattcagcttaaggactatggagcatctttttaatattcattttaccaatgatgttcatcatatatgctgggatcaggaagaaagacacggatatggaatcatataagtcaggtgacctcggcttctcagagccccatgttaccatttgcccattgccatccccaggatcgtgtttatatatatagcactagagctacgaaccgttttgatgttactactggctttgctacgtagattgtttttaattttatacaaaaccataaactagagttacatgcc

SEQ ID NO: 23308 - DNA, 3646 bp, Zea Mays
ctcatccttagccaccgtatttgttctaggctcttctctatcctctccacacctttcttcttcgtgcacgcctaggagcaagctgctgccctctccctggccagccctctcccatggccgccccctccctcagcttcgtcttcagccgccgtcgaaccagggcgagcaccccacgcccgtcgccactcccatcccctccccctctctgctgatggtcacgcgccctagcatccgctcgcccctgcgcgcactcctcccccatggcgagctcgccctcaactccctaccatggtgctcgcccaggctcgccggcatccatggccgcagttccctagatgctgccagctctggctccctagacgccgccagctctggctcgccggtctccgggctcgttggagatggcatattacctccaagacctacaacctagtgctcctcgacgtcgacagtcacgaccgcttcctcaagtccgtttgctgcaagcacgacgaggtgctgctcatcatcaaggtctacttcaagcgcaccggagcagagtggaggctggagaggattaggaacactttcaaggggatcgagggatcccacatgtggccctttcagatgaggattctatgcttagggcttaccgtcctgattctgattctagggtgtaggttgtagcttcagaaaaaggattggcgacatttttccaatgcacaattgcatgttctaaggcaaatttaagtggggtttagcaaatttttaacccatgtactgtatatttgtttggttcagataagtttacactaaggttttgcgcttttggcattaacttggtttaactgccttttccagcggtgtagtattttttgcctctatatgttgtgagttatccattttgattaagtcctgatgatgttagtgtagccactttattaggatgtttttgcacaagatagcatgtgtctaacatagccattttatagcatgaatcgatgaatgtacattgcttgtcggttcatatgctgatttggcttccaatgttgttcttggctgcaaatagattaggtagcatatctcctgagatagtacttcttcatcaacttgcactatcgattgagtacatgccctttctatagtcagattgcaaagaaatggcttgactctcaggtgagttctcttttctttggtgtgtgtgtgttgaatgactatcagtatttaggcgtagaagttgatcctgctggtgtccatagcgcgtaaggacatacattctcactgctacatgtagatataaatattacagtagaatgaactgaaagttttttgttgaaattttaagaaccaatagttaatcttttggacataatcaaagtctaactaaagccaaaaagtatattcgctttaaatagtctgtttataaagggaatctatggatcccacgactatttccatttactcctatgtgccgggagaacaccatgcactaatctctgtttagtgcctacaatgaaatttttggtccattgttgaaccatgctaaatattatatcctaaaattatactatttattaccaaatgctgggtttgtttcatggaattaccaagtgcacgcagtacgcctctgagcaatcgattctcacgccactcctccacgatctccattaaagacacttcagacagatcgagagcttctccatataacacactagactgtgtttcatgtatcctcgtccttgataacacacatataaaatcctattaaaaatttataatagtgaaaagcttttggcaaatgcatgttttgattgatgttacgcagacaataattttttgactaagtactgcaacaattgagttgttgaagcattcatgtacatttttgttccatgaaacgaaactcattgtgatctttctctcaaagttgtaggaccatggctgaagacaagagtcatccatggttgaatgagcggatcatgtcattcctctcaaaacggtcggtcgttgtgcattcctgacaagacttggagataggtgagtacatctacttttgcattgtagtatgattctagtggtttatacaagctgatgctttatattatacttttgttatattaaaaccgatctagggctttattaaattttgatccaccagtgtcatcacttactattataacagtttcctacgagcgcggggcacgcccaagttactagtatatttatagtatgtctcctttatatgacacaaatggatgtgtgctctagcggtataagttgcttgctttgagccgaacatcttgggtttgaatcctgtccacgcataatttttttggtattattccgcacgagccacacgaagactgggtatttgattgaatatgtacacagaaagctctgaatgcattatgcaattctaatattttgctaaatgtggtcacctattatgtttgttaatctctgaagtagtagtccagtctagtgagttgtggttgaagtaatttaactcataataaactattcttaatcatagtcacattttctagaaagggacaactgaccctagtcagacatatgagagggatacttatgtgttgcacttctatcgaagagcatgctataagttcaaagtaaaatagtatagaatcaatttttaattttcaccctataaatttaagataagcttatatctaaaattcaaaatgttttgaaatacaaattagcctagcccattaagtagattacaattccaacaaaaataaagggatccaagtgggccctttgaaaagttgaatgattctaatgtgctatatcatacaacgatgccaattaatatcttttgttttttctactaaccatattgctatgctattggcaaagctttcattcattcttaatttaccaacaaaaggctccttgagataaaaaagatactggaagtcattggaggcgaacagatggtaacatatcatgtacatataagattgttgtatcattagaagtacctaactaataattgtagcattagagccttacaaatcaattaaagtactactacattaatacattatggaggccattatcaccaatacagagcatgctaagccagagcacaaaggccttttgagagtccatgaagtgggaggtggctctacgatgggttgactccactcaattggatctgatcttactcgtattcaagagctactagagctgcggtagaatgtgtccatgcagagcgagcaagaggcctctgcagtgggtatggattcaagcaagactcacaacaagtgtgcatgaggtatatatgcaatctgatgtcctagcagtcaagaaatggtatagtctagggtcttggtgatctcaaatattatgttaaatgtatttgttagaataattagtgtgatcttaatttagttggtgtgctatacataatagtctagattagtagttctaaaagttagttgaagtatttctattcattattgaggattgtcactctttattgaggattatgtataacttctttattgaggattgtcactctttatgtatttctatctatagtttctttattgaggattgtcccttaagctaataagctaacatgtactttaaaacttataaatgttttatacattcaatttgtaatatttttgaatcaatt

SEQ ID NO: 23309 - DNA, 1000 bp, Zea Mays
atggagctcaagcgcgtcctggtcgcgccaacagcagcacgccgagctccaacggtccctcccaccacctctggtgcgaccgctctgccccctgcagggctcggtctccttcccccactgccggaagctatcccctggccctccagcggtgtgcaaacccatgttgccgctgttgaacaagcagttgtaaaagatgctacgaagctggaagctccagttgttgttgttacaggtgcctctagagggattggaaaggcaactgctctagcccttggaaaagcaggatgcaaggttctggtaaattatgctcggtcttcgaaagaggctgaagaggtctccaaagagattgaagcatctggtggtgaggctatcacctttggaggagatgtttcaaaagaagctgatgtagagtctatgatgaaagcagctctagataaatggggaacgatagatgtgctggtaaataatgcaggaattacacgagacacattattgatgaggatgaagaaatctcagtggcaagatgtaattgatctgaatcttacaggcgtctgcctgtgtacacaggctgcaacaaaagtaatgatgaagaagaaaaaggggaaaattatcaacattgcatccgtcgttggccttactggcaatgttggccaagctaattatagtgcagccaaggctggggtgattggtttcacgaaaacagttgccagggagtgaatgctattgcaccagggtttattgcatctgatatgactgccgaacttggagaagagcttgagaagaaaatcttgtcaaccattccattagggagatatggccaaccagaggaagttgcagggttagtcgagttcctggcccttagccctgcagctagctatatgaccggacaggcgacgttggttcactttcttgtgcacgggcgattttgggcaacggaattagggttctctttttcttttaatactcaccgtggataaaccaggcatgtggaagttgaaat

SEQ ID NO: 23310 - DNA, 1130 bp, Zea Mays
gtaaagaaatgaagtgacaagtattcattcttatggtcatatacatgaagaggaattaccgattcttcttcatgtttgtgtcttcaactactgtactatgcatatacgtgtttgcattctgctgggtcaatctcaggagaattatggacacgcatcaatgcaaaattggtagagctcttttgaagtctcctatctccggtcttctcatcctatacacatttattgctgtgtggtttgtaggaggattgacctcattccacatctatttgatttctacaaatcagactacttatgagaacttcagataccgctatgaccggagaacaaatccttacaaccttggagtgggtcagaatttcatcgacgtcttgttttcaaggatacccagctcaaaacacgatttcagagcaaaagttaaggccgattcttcgaccttcgcgtcatccctcagtatgggacgggttctaagcccacccaagacgagcgtggaccttgagatgggcatgaaaaggcaagcggtggccgcagaggactttgaagacttgcacagccagatcggcagtgctatggggctggagagatgtggcaccgagccgccgcattttgtcggccggaagggctgctctgagatgtcacctgacatagaggcgttcgcagaagagtttggcatggaaggtgggctcagtgagaggaaaaagattgagcggcggacaaatgatgattcgtaggaagtttcccacgtcacaaaccacctcttcggccttcctccaggccccaaacttggtaaaagcttgcaaagaagaaagtgaagtaggacaaaacggacggtagagtgaatcaggcattggttagtttgttttgggtgtcatttctagccaagacttgagttagaagtgaaagatgttccttgacgatatagaaatgatgaatccacatctggtttggacttcttagtctatgtgatgtattggatgtgtggtgtggcagtgttgcttctgattttgttgaaggtgtaatctgttgatttaacttggctatgcattcatttaagcgatcaaatttctgcacttttgcgctaaatctttagatattgttcagataagggtggattgaagggaattaaatcattt

SEQ ID NO: 23311 - DNA, 417 bp, Zea Mays
cgtgctagaaagccatcttggccacattggatgttccatgctgaaggaatgactccttgggagggtgctcaggtagctgccttagaggcgctaacaaccatttgttaccagaaatgggaagaaatacaagccacatctatgaggttgttccctgcagttgctttaagtgacccattggtgtatcatcaccaggcccgattattggaaagcattcctattgggcaggattctgtagaatcggaatctgctcgagtattgatggtcgtgctagagttgcaacttactcgagggcacagtcgtcaaaagtggcagcagttgtacactgggagttatgcagcatttaagatgatggaaatggccaagaatagggcttgtacccaggcacaagaacgacttgaggaaacaaaggttcaagcg

SEQ ID NO: 23312 - DNA, 1026 bp, Zea Mays
gttaagatatgctattttctctatgatggataaggaaaacatagctgtaccaaattttcgccttactctgcctgaagtatgttctgaatgtggccatcaatttgttatggggggacctctttggagttatccaatacatgacaaggtatgggctgcttcaatattatcagatattcatgctatgagagaagcatatccagcttatccaaaaatttcggctatactatcttcagtctcagaggaattgctggaggcacctttatttgtgagtcttcacaatctgtgtgcaatactgaagtgcactactccaaccatggttatgttacaatgtgctatcagaaatgctgggtatcaagtatcaggaagtcatgtggacccgctagctcttaaaacagatgccccgatgtcagtgatctgggacatcatgcgatgctgggtcaagcttcacccagttaaacatcgacctggaaatcatcctggcaatgtgatactttcccaagagcctaaatttcaggcaaaattttccagagtactgggggcctcggtcacccggaagcgcgcaagattcatgccaaatcctgagaagtattggggtcctgggacgaaggctggcaggaatccgagaacatttcagatggataaccgtaactgacgcgatctccgcgccagagcccagaagacggataatttagtttattgctttgtcaattgatatagtttgtgcgattgcaatatttgaatgatgtttgtgagtttgttccttaagttcacccttcctaaaattttaggttgagtccaccggtgaccggcagcatggctccaacactagacaggacatacgttaggtatttttggtcgaagatcgttatggacagtcttcattatcatcaaagatacatctatgattttttgaagagaaaaacgacttctacaaattcaacatgtgggaggtaacaaataggagcctctctaaagatcgttagacatacaaccaatattttggttgaaaaccgctatgactatgaa

SEQ ID NO: 23313 - DNA, 1726 bp, Zea Mays
ggcttatatctcttcgaagtattgctaaaatttacacgatatgctttggatgtcaatgtagaacgggttgaagatgtcttactgcacaagaaattgctggagcaagcccataaacccatgaatggtctggtctttgatgttcgtcctgcacagttttagggttttactctggaggaaagcactggatttgagtccacaacttcctttaagcaagaagaacaagatccccagtcctcagtattcacatcaagagatcaaaggcctttgcatgaagttatatttgcatgtgacgataagccaaagcttcttagtcagttaacctctctcctcggggagcttggtcttaatatccaagaagcacatgcatattcgacgagtgatggctattccttggacatctttgttgttgatggctgggagtatgaggctgacattctccaaagtgcattgagggaaggcgttgataaaataaagtacagagcatggccgttggtaccgtcgatgtctgctaggatggatcaccaaccattggaggtttctccttcatctgactttgtccagataccagctgatgcagttgatgtttgggaagtcgatctcaggcttctcaaatttgaacaaaaattagcgtctggatcatttggtgatctataccatgggacgtactgtagtcaagatgtagctatcaaagtactcaagcctgagcgggttagcgttgatatgctacgtgagtttgcacaggaagtttatataatgaaaaaggttcgtcacaaaaatgttgtgcaatttattggtgcatgcacgagacctcctgttttgtgtattattacagaattcatgcatggaggcagtatttttgacttcctttacaatagacgaggaaattttcaactcccggatgtgattagaattgcatctgatgtgtccaagggaatgaattacttgcatcagattaatattgttcatagggatttgaagactgcaaatcttcttatggatgatcaggttgtcaaggttgcagactttggggttgcaagggttaaagaccagtcaggagttatgactgcagaaacaggaacctacagatggatggcccctgaggtcattgagcatttgccgtatgatcatagagcagatgttttcagttttgggatagttctttgggagctgctgaccggaaagcttccatatgaagacatgacacctcttcaggcagcagttgctgttgttcaaaaggatctgaggcctactattgctgttgatactcatcctatgctcgctgagctactccagagatgctggcagaaagatcctgctctaagaccaacatttgcagagattgtggatatattgaactctataaaggaggcggttcggagttctgtgcatcacaaaaggcattcatgtcgatctcactccgggagaagacgaggctgttgatgtgccagttttatgtggtgccgcacgcccttttcattttatttttgtagtcgagcgataacttcagaatacggccagaagagcttactgtgttcattccgagaggttttggtaactttattttttttaatttggacttatgcttcaaggattttcatcgttaaaaagcttagaggtgcatatccacgtttacatttggcatgtatctgtatctcgtactcgttttcttaagtttggcaggcaaccaagattttaatgaaaatctttaaccattactcactccgtc

SEQ ID NO: 23314 - DNA, 1606 bp, Zea Mays
gagtgtcaaaacatgatattttgttttaatggaaaatttggcacagtttttgttagatgggtcctctggccccagaatgtggattgttcctataactgcagactgtggttcatattatacacagaaaaaaattctactgaaaggcaaaagtgataggctggatataagagacattgcttcacagtgtggtaaccaagagaagggtggaaacttttggattaagttgaacattaatcaaacaggattttatagagtccaatatgacgataaacttgcagctgcacttcaaaatgcattgcaggccaagaagctgtctgtaatggataaaattggcattgtggaagattcactggccttatctatggcctgcaaacaaaccttaacatcgttgctacgtttactgtatgcttaccgcgaggaggctgattacagtgttctttcacacataaatactgcgagtttaagtattgctaaaatatcggttgatgctactcctggattggtcggtgacatcaaacaacttctgatcaagcttcttctgccacctgctgtaaaattaggttgggacctcaagaatggtgagagccacctggactcgttgcttagaccagtgctcttggttgctcttgtcaaacttgggcatgataagagtataaatgagggagctaggcgtttcagtatctttgtacatgatcggaacacttctcttcttcgtcctgataccagaaaggctgcatacctagctgcaatgcagaatgtaactgcttcatacagatctgcttataatgatcttctgaaagtctacagggagtcagatgaagcagaggaaagggggcgtgtcctaagcacactgtgcttttgtaaggacgagaatattgttcttgaatcactgaatcttctttttaccaatgagtttcgcaagcaagatgcatattatgtacttcaaggtcttgacgtggagacgcgtgataccgcatgggtgtggttgaaggataactgggatcgtgtgacaaggaaatacggggacacacaagcaggaggttttatcagatacgtcgtcacattgttcacctccaacgagaaggcagcagagttctcccgcttcttcgcaacccgcaagaagcctgaattcgagagaacactaaagcagagccttgagaacgtccggatcagcgcaaggtggatccagggcatcaagagcgaaccgaggctcgctcaaacggtgcaggagctgctgcgtagaccctgatctgccctcggttgagttgcaggtgtggccggaaataagctggtcgtagatgacatacgctttgtacattctcagtgtgtaaaaggttacctctcttagtgttcatggcagcatgcaaatgtaagctattgggttgaatttttagcccaagcatgtgctagcagtgatctcgtgtctaatttgagaagcgtagaggtttaaaagaagattaaagtgcatttccgattcttaaatttgtgcggctgtgttaatctgatctataaacttttaaaatatatctcttaaaggctcaatatttgttttggtgtttgttacgtgcaaacggacccaaacagatccggtaagtccatctcccca

SEQ ID NO: 23315 - DNA, 1879 bp, Zea Mays
tggattgtaggaaaaccaaaggaaaaatgctcgagctctggaatggctattttgttcctcagaaggacagtggcatgttgttgaaagtgcaagggctgcccgtctaattatggttttcttggatagcagacatgcaaatatcgacatggatattattaagaaggatttatctccccttgttaaggatttagaacctggaaatcctgaagaggaggctcctataccgttcatgatggcaggtgatggtgttaaacaaagacatactctgcaagaggtaacttcagaaataactggtccaatggttgtggaagatgttgtctatgaaaatgctgatggagatcaaggttccatgtctgagaaaatgttccgtcgtcttatttttggaagaagttctggtttagtgcaatctgaagcgttgttaatcagagatcctcccagtgatgaggtagacaaaaagaacaaaagtgcagctgcaacatctaaaaaaagaaggaaccataaaaggggatccaagaacagtctgagaattgaccataaatttcttggtagctcatatcacagcagtatcatatctgggctttctttagttgcatcttctctgagtgctgctgcttcatctggagaaaaagtcagcatcaccgttgtaggccttggtgctggttgtttcccaatgtttctccgtggatgtctgcctttcgtagatattgaggtcgttgagttggaccccttggtggctgagctagcaaagaaatattttggcttttcaatggatgagcaattgaaggtccatttgggagatggcatcaagttcattgaagacagtgttgctgcaaatcagtcagtaaatggcagtaccagaaatgcattcaaaatacttatcctcgatgttgattcatctgatctaagctctgggctgtcttgcccaccagaaaactttgtcgaagatcctttccttctaatagcaaaggagttccttttggagggcggcctttttgtcatcaatttagtctcgcggtcaacctcagtgagggaaacggttgtttcaagactgaaagcggtcttcgaacacctgtactcactgcaacttgaagaagacataaatgaggttctgtttgcatcaccgagcggaagatacctagaaatcaatgacattagtgcaggagcctccaaactgcaggacttgctcaaaattccggtggatgtagaatcagatatacagaagttgcagaaactccagtaacaatctcacctgacgcggagcaccatccatttgcatccacttgatttaggtgctgttcagttctcaccccagcagggcacaccaaaatgtcctttgttttgctcgtggaagccaaattaggaccagctgttttgtacaccagaattttgtctaactgcgctatagaaaaattttggcctgccagaatgtcttttacaaccaaagaggtgaaaaatctggcttgacctgattgggcctagaacaggctagagcgcatttcaaacttttaaacgtccacaaattggccgtgttttcccatatgtttgcctcgccaactctgcatgggtaaaacagtgcagctgtacagatttagaggatgtgtggaggaaacagaatgtgcatcatgcttggtctctgatggtttacaaatttcagcgaatatattgatcagaattcaggctgtgttatgatagctgtagcgtgtttggcaatgtgagtgtcgggtaggctctcgggaccctcgtaagcattcacacctcccgtcctagcagagtagcagcttcatgtactatgactatgggtgtactcggatacgaatgataagatttgtatgaatatgacatcttaaatactcaactttaagaatatgaatacggataa

SEQ ID NO: 23316 - DNA, 817 bp, Zea Mays
cgagcccccaccgcaatcgggcgggcggagcgcgaccgccgcatactccgctgcgcgctccgagctcaattccccgcgcgcccagccccgagctcaatcccccgcgcgcggccccgagacttaatattcgttcacccgtcgattccgcctccgatcccctccctccttccgttgcggagactcccgcttctgcggcggaggccaagcaggagtcggtgttggagacggaggaaactaagcaggcggtggcagcagcagcagcagcggcaggaggtgtgcaggccatggcggtcaccgtagtgcgggacgtcgagacgggtctggacacgagtaccagcgaccaggacggcgacaagccttcctggttcacacctaagagctgctcgggattaacttgagcttctggcgatgctcaagtgcggtgggatctgagcagaccagcggaggtagcagtttagtagttcgaactggagcaacaaatcatttggtgcggtgtgtttcattagttaattcggagcttgcttgtcgctctggttgttccattcgtgactcagagttctcgaatttctacgtttctcctcgtttgctcgctttcgtggtatggaattgcgttttcaattaagtgttcgctcgatgcacttttttttattaggcaactgctgtgctggcaacccttttcagcgagatagccagattggttaaatttagtttactgtgcattgcaattggaagggacctttttcagttgaggtcaattgtaggctgtagcttctattgcctgtatattctgctgagatagggcgaccgttggatccca

SEQ ID NO: 23317 - DNA, 2727 bp, Zea Mays
tttcaagtaataggtttttggcaggacagtcatatgccgagatctggaaactgcgactaaagttgcacgtagcaatggtctagattgcatcacacttgatggtgatcaggtagggaaaaaaggtgctatgacaggaggcttctatgattctagacgctcaaaactaaagtttgtgaagataataagggataacaagacagcaattgatagaaagacgggtcatctagagagtgtcgtaaacaagctaaaagatatagataagaaaattacagatttagttaccaaacagcagcaaatggatgctgaacgtgatcatgcgaagtcagagttggaacaatttaaggctgacattgccagggctatgaagcaaagggggtcacttgagaaagcccttgtcaagaaggaaaaatcacttaacaacatctgcaaccaaattgagcaagtccagtctagcattgcaatgaagaatgatgaaatgggcacagagcttattgatcagctaacttcagaagaaagagatctcctttcacgattgaatcctgaaattactgatttgaaggagagatttctaatgtgtaaaaacagtcggattgagatcgaagcacgaaaggaagaattggagaccaatttatcaacaaatcttatcaggcgtcagaaagagctagaagcgataatttcatctgcagattctagaaccttgcctttggaagctgaggcaaaggagcaagaactgaaaagttccaagagaaaccttgatgaactaacttcattattaaaggctaatgtcgatgccataaataatttcaccagaaagatggatgatctgaaaagaaaaagggatgatctgaaggctcgtgaagctattttagagcagactgtacaagatggtgccaaagacttagaacagttgatgaacagcaggaacacttatctagccaagcaagaagagtgcacgaagaagatccgagatttgggcttgttgcctgctgatgcttttgaagcgtacaagaggaaaaacaagaaacagctacataagatactctatgactgtaatgagcagttgaagcagtttagtcatgtgaaccaaaaggctcttgaccaatatgtgaacttcacagaacaacgcgaacaactgcagagaaggcgagctgaacttgatgccggtgatgtgaaaatcatggaactcatatcggttttagaccaaaggaaggatgaatccattgagcgcacatttaaaggggttgcaaggcacttccgtgaagtgttttctgagctggtgcaaggtggtcatggatatttggttatgatgaagaaaaaggatggggatgcagttgatgatgatgaggaggaggatggacctcgtgatccaggccctgatgggagaatagaaaagtatatcggtgtgaaagtcaaggtatcatttactggcaagggagaaactcagtctatgaaacaattgtcaggcggacagaagacggtggtcgcactaacactgattttcgctatccaacgatgtgacccagctccattttatctgttcgacgagatcgatgctgctctggatccacaataccgaacagcagttggaagtatccttattgtttgttctagtgtctagctatgcacatgatcaatgcctcttctttgtgtgtcaatagtcctgctgctttccttaagtttcattccagatatgatccgccgtctagctgacatggctgacactcagttcattgcgaccacattccggccagagattgctaaagtggctgataagatatatgccgtgagacacaagaatagggtgagcaacatcgacgtggtgtccaaggaggaggccctggacttcatcgagcgtgatcagacttaggtagctattggaccagcttgtttggcgcatcaacgttgtgaatgtagcagctaccaccttggtttggtaccagctttaattaagtttgggaagcgctgattagactagacgtacgttacatgttgccccatgattgttgtatggcacgcccagcccaaaatggcagtaatcagttcatttcgacaattaacgtaagtgtaagtgtacgagtagtggtattcaaatgttttttaactgtatttttctagtacatttattttttgtacccataaatcatgttacacgtagtttcattggagggagcataaacatgttcctttgacagaaagcctaataaggctataaaacaaaaattactacacgtagtttcagcaacgcaaacaaaaaaccccgtgcctgcctaatgaattggtcattaggcatgggcttctgcttctctataaggcgactacgagctcccagctgctcagtagctagggtacatgcccatccttcctatggtgctcctgcagccgaagttgacagagcctcgaggctttctgctgccatttgccttcgtggtggatttcgcaatcctcttttccttgcccgtgaacttatcactgtctcgagctctttctttcgaccgtgccacttttgtcattgacgagagagagctttaagtcagtaccaggtcatggcaaaatcaaatggaaactaaatagtatagcaggttatctgaacacaaacaactctatttggaagatctgtgaaactagagtcataataatctggggctgtaggcattaccttagctagcctctccttaagctttggccttgcagatactaccactcttgctggttgacggtccgcgtttt

SEQ ID NO: 23318 - DNA, 633 bp, Zea Mays
gcacctttgttccatagctcacagcatcatctaattttcctttatccaatgccatctttgatgattcaagcaagtttcgaccatcaatagatgagtagaccacatgctgaaaatagaacacaccagaaacagcaatggaatcagtagtttatctgacaagcagacaataagcagtttcctaagtttcagtaatttactaccttgcacacaggaacaatgctgacaatgtcagatttgtcgaatgggttagggctattcatatcataatctcttgcagctaactccagtccaacctgagcaacaaaccatatcagtatcactatgcctgtttggaatagaaactatgaatgttcccataattcacttcactacccataccttgctgcaaagccctctcagaatgatacatttccgtaaatgtgcaaattcatctttcagtttccagcagaatctttttgaaaggaagctctctacccatttcagtcgcaaattattgtcaatatgggcatccgtgtcagcaccattttcaagtctgggagatcctagtaatatgtttagagtttcagctatagctgcagacatattttgcatgtcatcaacagcagcaataacagctcggatgatgtgcttaaa

SEQ ID NO: 23319 - DNA, 3729 bp, Zea Mays
gctgaattatgttggtccatagatgccaattcgtcatccgtagctagaccatcatcttgatcatcttgttgctgttgaaaacctaatgaacgttttcttgagtaaactttcagtgctggcatttgaactggtggttttgtcggtcttcaatctcacttcatcatgcatagatgtggaggtgatccccatctcagatggcccagtggggggctggggcgagacatgcatttagggagtcatgatgaggcgagctcagcccccagggaatgacggcggcccagcagttgagttacgctggggcaagcctttctggatcaaaacaccatgcccgcaccttgaaggatgagaaatccctcacactctcagtgtccggatgcaagtcagaaatccagcaagattcatgcaagatgtgctctgccgttgaacggaaccaagcatgctcaggaatacctctaatttcaacatctcagtgtccggatgtgtgaacctcgactaacgtttgaatagaagattaaaatgaggtcctctgagcatctttccatcattgaaaacccttgtagctgaatcttcatcaggtaaaatcaaaaggaaatcttctggtttggtttggtggatcgtcaatgagtccaaatgaaggtaaaaaactcgcaccacttcttccattaccaacataccaggaatcaacggtctagtcccaaccaatgtgacaaacagagctcgtcgaaatgccacctcttctcttgccatagcagtagaagtccaaaacgcatgagtggttcacaggccggctggacgcagcatctccacaacgaacctgcaaatccggggaggggcagcatcaacagaagggtccagggaagcctgtcttgagctagagcaaggctcccctacgcctcttccccgcatggatcgcttcctcttcctcttgaagcgaaaccccccatgattatcatcttcggggttccgcaatgggggtctctccagtaacaacctcctgaggagatatccttcaccacaccgatcctttggaatggggaccggaactagcacccaccggggggagggcttccttcttcatagagagacgctgccacaccgaaactctcccttcccttcttcccagacgctgccacacgtcctccttttgatcttcaaggaaggaaaggcagctggcagcctgagacacttgaaacacctggtggagcgacgacaggctgcagcaagatgggaggagaaacagttgtagcacttccctcagagatccacaggggaccctcaacgaggaaaattcaacactgcgaaacttcctcctacgttcaaccacctgccaaccgtccttgtccagtcgcgacatcgccgggctgctcgaacctgtgaaggtgcgtgggggccaaccttcaccgcacttgaggctcttgcactcgatgccgagggagaggagatgcgggtagaagagatgccacgcagagaactggatgtcaaagcttctttataggaaagaggagctagactggacccgcccgacgaagagacatggccagacttactccacctctgggactttgaacgtccaatgtggagagcctggcagccgaggaggtgggaggctttcctgctcatttatcctgcccttgtttttaggttgatggcatgttgggaaggcgggagaaccctggagaacatgaagccatgcggaagatgaaaaatgagtttatggtgaactgggatggtctgagaacaagggagaaagaacgtgtattagtacttgctgcaactaacaggccatttgatcttgatgaggctgttgttaggcggcttccaaggaggttgatggtgaatttgccagatgcatcaaataggagaaaaattcttagtgtaatactagccaaggaagatttggcagacgacgttgatctagaaactatagctaacctgacagaagggtactcaggcagtgatctcaagaatctgtgtgttactgctgcacaccgtcctattagggagattcttgaaaaggaaaagaaggagagagcttcagcagaagcagaaaatagatcattgcctccgtcacacactagcaatgatgtccgtgcattaagaacaagtgatttcatacatgcgcatgaacaggtgtgtgcaagtgttccctcggattccagtaacatgagcgagcttgtgcaatggaatgatctctatggagaaggcggatcaaggaaaaagacaacgctaagctacttcatgtagcttaggttataaatatattgggagaagtgccctggcacaaagcagcaatagttggaggcggtgcagttggaaaaaaaaagctatgctcatctgccagacatccatatcaaagagaattgatggttcaggtggagcggaatagaatggaatggaatagtatacatacacatggttgctgcctctgctctgggccatgcatcatgcatctggacaggacggctatcctggcttgcagttgccctatgcagttttgagtgcaatggtcaccatctgtgaagcacggataccacagagatcctggccccaaccactcttttcacaaatggagctgaggacctttggagttctaccaaaagtgatcttaaatctttgttctttgactttccgttttgtgaacggaaggccccactctgctagtatggattgttgatcctccgtttctctggtactgactgaactgctcatacaaaactcgttcaacaggcagaaatgctgcctggtggccttctagagtgcttctttgacgccgcagagagcacatcaaaaaaaatgtgtttgtttcgaacgatttgtgctgcattccattcacggcgatatcaggtgccgttgtttgtgtttggttccgcaatcaagggagtgaaagccattagcacatccaatcaaacaaatagcgatatctctttcactgtaccagttagcgctggtctcggatgctattaacattgctgttgtctgtctcggaaccaaacaccgcctaactcgtcggctgttaaatatttctgaactgaattactgcacttggttggggtttcatgcttatcaagttggcttatatagccaacaatactttgtgcagttctgcatcctctgcctgcttatgcgcgatctcattggctgagcggtacgaagataaaacggtagctaatccgaagcgatggcttctctttttctttctacggtattttgtctctatgaattacagttacagcagtcagaacagctgatttaaaaccgcagcgaaaaggctgattgccttgcccatttttgggtgggtggaggttaatacagatttctgtaatttttttactttaatattgtttgacatattgtgcaaggcaaatgatttcctaatgatttgttctacttgatattgtaatccatattgacctatatgctatgctcagttccttagagcatctccagtacttgatattgtaatccatattgacctaggggaaaaaaaggagaatttaacctgatgacactggtggactatgctatgctcagttccttggaacatctctagtagttttgtaaaaaaatctctctaaagacagatgtaaggagttgctacataataatagggagtaaaaatatctgtactctcatgtagtctttatttttagttaccaaatattataaattatgcctgctgaaactcctctccctcacgttatagaaagttttatgtttttccaatcaaac

SEQ ID NO: 23320 - DNA, 993 bp, Zea Mays
cagtgcaccatcacaatcagtttctgttttttttcttcttcttttcaacaacaaggtcatggcgcgagcacttgtgttgtgtttttacagtggggggggaggggggggggggggggtcgggtcactgcttttgtaccaccaccttgcatttgccagtggaatatttagctacctttgcaacgtcatagtaggccgtagacgtgaagcctttttacaccagtgggctttggtgcgagactccttttcccccccctgcaggtcaaccgtgaagaaggaggtgacacagacggtggtggtgaagccagggtggaggaaagggaagcaggtggtgctggaaggcatgggggacgagcggccggggtgcctgcccggcgacgccatcctcacggtgtccgagaagaggcacccggcgttcaagcgggtgggcgacgacctggtgctcaaggcggaggtgccgctggtgggcgcgctcaccggctggtccttctcgttccgcctcctcggcggcaggaaggtgagctgctcgttccaggacgaggtcgtccgccccggctacgagaaggtgatcgccggcgagggcatgccggtccccgggcagaagggcgcgcgcggcgacctgagggtcaagttggacgtcgtcttccccaaggagctcacccccgagcagcgcgccggcctcgccgagatcctcagagggtcctgctgatccatcggccccagttccaagcgtatcaagttttcttggccgtgtccgtgtgttaaattttaatatgtatactcatagcgcgtgtgatgagtatataagtacataaagagagaggggagggggcgtcgttgtacatacaggtcgtttatatattatatatgtaaggataaaaagaaatatgaaacgtgagccaaagccaagccttgtgtagctgtatcgcggcatgagctcgtggcatgagctggacgtgtttgttctgatggcaaatcagatcttctcgccccgcg

SEQ ID NO: 23321 - DNA, 95 bp, Zea Mays
agcaaaaaaaaaaaagatcgaagctcagaggtgctcgtatcatctgggaagatgacaggttgcgacgacccatgcgtcacggagcttttcatcat

SEQ ID NO: 23322 - DNA, 375 bp, Zea Mays
ctgttcctattgtttttagaggaccaaatggagctgctgctggagttggtgctcaacactcacagtgttatgcagtttggtttgcacatgttccaggacttaaggttctcacaccatactcttcagaagatgcccgaggcttgcttaaagctgctattagggatcctgatcctgttattttcttggaaaatgaattgctttatggagaatctttcccagtttctgctgaagtgcttgattctagtttttgcctaccgattggcaaagctaagatagaacgtgggggtaaagatgttaccattactgcgttctccaagatggttggctatgctctccagggatttggatgtactgcatcaatgcacttttgttagt

SEQ ID NO: 23323 - DNA, 3717 bp, Zea Mays
ctccgctctcgcaatcctgtcattatcactagtccccgccccacctcctctccctgtaaagatttcgttcgttcctcttccgggttcctgatctcggtctcggtccccgattcgacctgtggagtctttcctgcaatctgtagcagtagcacgttgcctcgggaggagtttgtgcgttcctccagaggagccgagtccgtcagtggtcgcttgccactagcgcgaatcacgtccgggttgcgtcctccactccgtgccaatctaattccgggcgcccggggaaggattcgggacggaaggcactggtttctgtgcttccttggattccacggtgaaaccagcctgcgtggtccgcgccggctcccaccgcattccggcgagtcccgagtaacctcgctgtgggggggatggtgtcgcaggctcccatggcaggggcgggcgcgggcgcgggcgccaacctcaccgcggcgctgtgcaggaagagcaaccgcgtcgcgcgggtgctcgcgtacgcgctgctcgagtgggtcctcatcgcgctgcttctcgccgacggcgtcttctcctacctcatatcccggttcgccgccttcttcgggctcgcgccgccgtgcgcgctctgctcccgcctcggcgtcgacagcctcttcgagacccacccccgccaccgaggcgtcggcgccgagcccctgcgccgcttgctgtgcgacgtgcacgccgccgagctgtcgcgcgtcgggtactgcagcgcgcaccgccggctcgcggacgccggggacatgtgcgaggattgcgccgccgcggcggcggcggcgcccgggaaggcgttgctgtcatggatgggccagagcgagctcggcgagcgggacctcgcctgcgcctgctgcggcgtcgcgctcgagagtggcttctactcgccaccgttcttgctcaccgcgtcggcgccccgtggctcagattgtgggcacaaggaagaggaagaggcagccaggccaaatggagacgtggtcttcgtctccgaggaaggtcctgtgatcgagcttttcgacgagaagccatttgtggagggtgactcaatcggcgtcttggcttgtggtgccgaagttgttgccaatgttgagcggctggtgcctcttgaatcaattgactcgttgcccgtcgccatggccaccatgttatctcaatccggtgttgaaggaaaggaagcagttgatcatgatgatgtaaggcagaataacgtggatatggagcacacagttagtaccgatgaggagacaattgtcatgacatctgatgatgacaaggttgatgatgtggttgatcggctgattgatgaacatattgcagccgtagtctttgtgccagcttgtatagaatctacgcctaacgatgggataaatgcaggcaaaacggtggaggcctttgcctttgctgatcatcagtctgctgaggatgacagtggattgaaagataaggatcagaaaatatctgatatatctgaggatgagcaagccgaacaggctactccacaacaggaattgtgtgctatgccgacaaatcctagtgaccatgaaattgttgagaggttagacagaagtattgacttggagcattttccacaggctaagtcaaagcataaaatgaactctatgccagtggaagcttctgagcatgtcactgtaactcagattgaggagaagcaggttcagcaagctgaggtaactcaggagttggattcactaccaatatgttctagggagcaagctgaggtaactcaggctgggttggaacaagattgtggctctgtgccaattgattctggggaacatggttgcctgacttcatatgctcatactgatgttgagcaagctgaggtgaagcagaaagtcacttctgtaacaagagatgttctcgattatgcagcgggcacttttaatgttaacacaaacacatggaaagaagatattgaagaggatccaactgaagctgctctaacggccatatatcaaatttcttacgaacctttgacaaacttagacaagttctctccggatcatagtgtctccgaagaagacagacagcttaatgcgctgactcatatcgaagatatatgtgattcacaggaaccgctggattctaaagcagctgtttctgatgctaaatctgtagattcaggtgttgctactttgtctactgatcttgaaagcacggaattggtgaatgccgatcaactaaaatctgctttggcttccacacgcaagtcattgaacaccctatattttgaacttgaaaatgagaggaacgctgctgctatagctgctgatgaaaccatggcgatgataaaccgcttgcaagaacagaaagctgcaatgcagatggaggcgatccaataccagcggcttatggaggaacagtcagagtatgaccaagaagcactggagaggctgaacgaactagttgtgaagagagagaaggagaagcaagatctggagagagagctcgagctgtaccgccacaaggttcatctctacgaaataaaggtgaggaaaatgtccaggcacaaggctgatgaccagaacggatcgtcgtcaacttcatcgagcgccgaggatagtgacgacctttcacaaagcttctatgaaggtgatgaatcttcccacggtcttaatggaagcaacgggagtattcccacagatgtcgtgctacaagaaactgccagacatctcgttatcatcgatggctctttagctgattttgaggaagagaggctctccatactggaacagcttaaagtgctagaggataagctttttgatctcgatgatgacgatgaatccgatagcaggaagcatttcccagaagaaaaccacttcagcggtgcctcgaacggtttctctgacgacgatagctgctctaaactccgtgacaaaagaagagttgtaacctacagaggaaaggaactccttccgttgttcgacgatgctacgactgtggaagctggaaatgtccccaatggtgacgaggcacatcatccagcagaggctacactggacctcgctagagagcgacataagcttgtgatcgccaacgaaatcgatcaagtgaatgagaggctacaggcccttgaggcagacagggagtacataaaacagtgcgtgagggccttgaaaaggggaggcgaagggttcgatcttctccaggagatattgcagcatcttcgggacctaagaaggatcgagcagcgcggaaggaactctggggagctttcgcctcattacctacatctttacacggactgaagatcagctgcaaagtctcgtgcccaatattgcttgaagatggaaaccataggacaatgataaggggaaaaaaggattgtcgactaataactagcattgtcattggagaggtttcgttgttggttcccggagaggagaaaggagctcctcctggaacagtcacagtctgttcggaaacgccatccggaaggcagatcgcggagcaagtctgtctgcattccaaggtccagggttagtgagctgcccgggtccatgggggtgtgcttgtgggttgtggcggcaatcatggccctgtgcaagcttttaaaagaattcatttatcctgaaaacatgccgatgccagctttgctgccggatacggatagagtgggcttcactagtttttttatatatttcttttttccctcctaaattcttt

SEQ ID NO: 23324 - DNA, 3069 bp, Zea Mays
actaagagcatctccaacaaatctcaaaattatttattccaatacatgagcattgggagccccctaagatttaaattcctgaaaaaagtgtcaatacttcaacaactctcaatattttcgaaaaacctaaaatgaatctgttgttgagcccacaaaacctgtctgtcgatcatacctgtcacactgtttttctgcgtcacccatccttcgttcctccctgcgccgccgatctgcttcatgtgttggcgcaagcttcagacgtgatctgctcctcgcctcaggttgcctccgttgacgtgtgggagcagctgcaggtgccaaggtggatgtaacccagccttcagtagttcaacagaatataaatcaagctgttggtcaacaatcatcatctggtacaggatacaaggaaaggaccatcacattccatttaatatgtctgcattttcttaattagaacaccacatcatcttggtgcgatgaagaagtgcatgccagtgccatatgcggaacttgtcatggacttgcaaatcttggaaggccattacctcgaaatcatcagccgccgtagatgaattttgtgtcactgtcgccaaagaagcttttgtcggcgattcaccatttgcgggatccatcgatgttgagcgtttgcgggaagagagcaccagccgcctcaacagggcgtcgtcctccacaacccacacaaaatcaagtcagcaggttctggcggaggcgcgaaacggaaaatagtgtggcaataagaaaaccggcaggtgattgggagctcagtgcgcggcgaaggtttgcgctgcggatgagcggagctcggaaaccacggtgagccgcccgcagtatgcacctctctcggataacagggcaaggaatgaccactcggagccacattatgcatctggagtgaacctttcacaaagtgctccttccactaatcaagtttctcaggctgccagtggaaaccaaatgtcgacagaagcatatcgtgctaagcatgagattaccatcatcggcaacgagtcacctgcaccattcatgacatttcagtccacatgcttcccatcagatattctaagggaggttctgcaagcaggattctctgcaccaactcctatccaagctcagtcatggccaattgctatgaagggtagggatatagtagctgtggcaaagacaggttcaggaaaaacactgggctatctcctcccagggtttattcttctgaagcgcctgcatcataattcaagggaaggtccaacagtattagttttgtccccaaccagggaattggcaacacaaattcaagatgaagcaatcaagtttggcagatcttcaagaatatcttctacttgcttatatggaggtgctccaaaaggtcctcagctaagggagttggagcgtggtgccgatgttgttgttgcaactcctgggagattgaacgacattttggaaatgaataaagtgagcctgcgccaagtatcatatcttgtccttgatgaagctgaccgtatgcttgatatgggatttgagccacaaataagaaaaattgtgaaacaaataccacctagacggcaaactcttatgtacactgccacatggccaaaagaggttagaaaaatagcgtcggatttactgaataacccagttcaagttaacattggaaacactgatcagctggttgcaaataaatcaattactcagcatgtggaagttatcccacatatggagaaatcaagacgacttgatcagatcttgcgttcacaagatcctggatcaaaaatcataatattttgctccaccaagaggatgtgtgatcagttggctagaaacctatcacggcagtatggtgcttctgctattcatggtgataaatcacaggctgagagggattctgtgttgaatgacttccgaagcggcaggtgtccagtactcgtagccactgatgtggccgctcgaggcttggacataaaggacatcaggatcgtggttaattatgatttcccaactggtgtggaggactatgtccatcgaattgggagaacaggtagggctggcgcaacaggatctgcctacacattctttggtgaccaggattcaaagtacgcttcagaacttgtgaagattttggagggtgcaaaccagtctgtgccaccacaattaaaagaaatggcccttcgtggaggatatggtggaagatcacgtcgatgggcatcttctgatgactcttatggtagtcagggatatggtgctaaaagatcaactgatagtttcaagaacagcagcttcggcaaccaggccgggggtggttcaagctttcactcgagcttccataacagctctagtggcaatcagttcggtgatactacaagctttcatgccagctatggtaacagcagccagaacaatcagacgggtgacaatccgagcttcccacccagctccagcaacaatcagtccggggatggtctcagttttcatgaaaggttctatggatcacgcggaagggacgagagcagatcaaacaatgatggattccgtgctaggagcagaagtcctggcaagcctgtggaagtttccaactggtgattgcatccactaggtgcaatccaatttttgcgatggtgacgaaaccaagtaaaagatggtacctcgacaagttatattttcctcttatcctgcttaaatctaaggatgtcctggaacatcactaacttaggatatgggtgatggtctgatcccaatggacaatggtctcctactttcttgatttgacgcctgagagacgcctgattccataccatatgcctgtggttgtagtttgtaaaatgttaaaaacttgactttgctagtatatttcctaatgctataacccaatcctgggtaaacagacgcatggggatgaattttggacggaaccatggacatttgatgtatgtgtttaatgttgtgtacaatctatgtcgaattctgttgtaagtgccgtccgcatcgttttatatctttgtgcccgttattacaggtcttaaagaatcatgctgcccgtatgtgactcttctcatg

SEQ ID NO: 23325 - DNA, 2547 bp, Zea Mays
ccgatacccacacccgtcttgactctggccgtctctattctccaagtcccaatccaccgacgaattccaaaccctgcctaggacctcggcgccactcgccgcacgtcgtccacgtccgcctccaccccaatccgatggggtatgaagagagcaaaaaacatctcctcagtctcagctaccctgagctgcaatgtttgtgcaaaaggtataaccttcctgctaagaagacccactctcagttagcaagttcgctcgcctcgctgcttgaggcatctccatctcctgctcctcctcctgtccaattagcaaatatgaaagaagcatccacatgcaatcatgctaacaacaaaagaggcccatacaatggcagggatgatggtaaaccacttgtgcatgcgaaacatcaaaaaggagatcagacacctgttgatgaaacatctaaaaagcaggggattgacactggtacgagtatacctccagtttctatgaaccatggaagaccagaatatcatggccatctatcttctgacctgagaactgctcataatttacagtcccaatgtgacgtgggaattgcaactaatacaacaaatctagaatttgttggcaaacatgattgttcacctgctaacgtaattgatcaaatctgtccccctattattcaaaaatatccttctaatggtaatggtcaggcttccactaagttcggccgtatgaatgataacacagaaaagggttgtcggctgtctgataagatatcagcaaatgctgctgctgttcaattttctgtaatgtcagatgagggcattgatcttcttgttgatctgaactccagttcagcaacatgggccaagaacttcatggcagaaatgcacattacccctccgtctgaacatgggaatttctctagcttcattagcagtttgtcaactaaggatgatcatagcactgcgtcaccatctggaaatatcattgttgacattcagaacaagggagctgagaacattgttccttccactgattcatcacttgcttcagatgttggtgagagctcccgttcagtgctctatccagttgatacgactactgtgaactcagtgtcatccacgtctacagtggctggtaccccagttgaactttctgggtatcaggagggtgctccagtggtatgttcttcatgtttaacagctgatgttcagaacaatgtgacatctgatatgccaggtgcttcggataacgaggtgcttcctccagaacctgctgatgtctttttgcagtctgaaagaatcactgcaccagctgtatgtggttcagtgcaaccaattggcaataaatgcacaatgagttctggggatgaggttagaagtggctccaatgaagactcctgtccaaaatcttcaggaaaacaaactggagatgaaaccctaatggaaaatgaacctgtgaaggcagtagcagtggaagaaaatataggtcgtgatgacagtttgtccatttcttatcaactagcctgtaagacagtagcagaactgcctgttacagatgcccagtcgcctgctagttcttctggtcattttattgctggaaattttgacaacacacatccaacatcttccgccacttcggacaatgctattaattctctgacttcaaagttcggtgcagagctagcacaaagtcatgattctacggacaaaaagggacagaatgatgctgaggaggttgaggagttagagagtatgacaccagcagcctatagtgaacctcccagaaatatacaacttagcttacgaagtgcttccgctaaggtcaagccttctacactaccaagacgatcagcgaggcttcttcctaagtaaccgccgtaaatgatacagatgagatccagtgtgagaatagcctcactaccggcttagtcagattccatgaggatgaagggatagaaaacagttaacaagcttagattctaattttgtatgttcttgttaattcttttttgttccagcaactgagtagaacttggtttctgaagcttaggctgcgtgactttttatctcctcgtgtccatcaacatctgttacagttacagtcgtactgtcgagctttcatacactattgtacaaacgactcctacttttacagcatctgtttcctctggtctgcgacttgttggatgatgtcttctgtgttttatatcaatgcaatataactattggtgcaggagcaatgatatttccgattccacaagttaaccggaaatcttcatgggtgatagctgtgtcagattctttcgcgcatagtgatagctgtgtcagtttacccccattttcttgggcatcacttgtctcaaatgaagttcattggaggttcgcaatttatgttccgtggcatcacaccggcacctacctatttgctggttatctaattttacatacggaggacctggattgccacctgctaattgctatcgcggccttgaccaaaaaggtaagagcatcccttctcaatcagagccgtggaaccatagccaaatttgccaagtgttaa

SEQ ID NO: 23326 - DNA, 1162 bp, Zea Mays
ccgcgctaaccgccacggtaccacccgccgctaacctctatcgcgttcaccatcagggcaccaccgcctccattacccccgccccctgctgccacgtccaccaccacggcaccaccgccgcccccagcgcgcgcggcccaccactaacagccagcttgggtggccgctccttccctcccttgcctcaaaggacttcttcccacgcgatgttaggagcagacatgaggcggcgagagtccagcatcggagatctccgccgccatgtaggcactgcccagcaccttgcggcccgaaaaccgtcgatctaatgccctgccctccttctccgatgccttcgccctcgcctcaggcagggtccctctcccgccttgcctggctctacgtggtcggtcggttgtggcgggatgtgcagacaggacgatcgtgtccggcctcctcgagaagagctccagcaacatctagaaggtgctcttgatggaggacaagcttaggaaccttggatgcaaggtgattggaaagaaaactattgaggtggagatggacctgaccaaggccaagagcgagaggtacctatgggggaacaacactgcagctatgaactccgacaagaagcagcagtttacactgggtttggctccagtctcaaaagaaacgtctgtttcaaatttgtaggtgcctcgaagaagccaatcaaagtactaattactaaaggtcacttgcaggatagcaaactcatacagtaatactgttgtttgtcgatcttaacaaatttcattcaagaatcaggccatgatgatgttcaaaagagttgtcagcagttcatgacatctggtagcacgacaactagcaatgtatggatgaattgaaggaaataaagaaggcagacaatcttatagaaactctgcatcttgaaactaccatggtttagaaagaagctggatgcatcctttatgttggtgtcttcttatcaccaagcagtaatgtgaagcaaggtcatttgttgactaagaacggttgaacacaaattagtgaagagttcattgcactagagatggaggatggaaaggtggtagatttcaatatggctttgatactatttcccccccttacaatcttgtacggaacaaacaatgtatgtggatactattgtaattcaagaatt

SEQ ID NO: 23327 - DNA, 5309 bp, Zea Mays
caaaaaggataaaaatggctattcgagggaagtaaaataagtgagccggtggaataatcccttcctcggcatccttcggtcccggaatatgcccccggcgtctccctcctcgcgttcctctcgtcggtgagctcctgccgcctggctcgcacagccgatttgcctcagtccagatcgtgcctccttcttcctagatcgggtccgaattcggctaccctcgccaccgccctacgccaggtgccgaggcctccgccgatctcttcgccggcgaagagcggccaccagaattctggtggttcctgtagcttgtggatggaggaggaggcgctgggtcgtggtggtggtgaaaagctttgatttcgtagccgtggtggacgccgctgctaatgcccttgccgtgcctcgttggtggcgtgcaagatgtatgccgtggggaaggtgggcagcctcatctcccgcagcgtgtacaccgtctccggcccgttccacccgttcggcggcgcggtcgacatagtcgttgtgcagcagcaggacggcagcttcaagagctcgccgtggtacgtgcggttcggcaagttccagggggttctcaagtcgagggagaaggttgtcgacatctccgtcaatggcgtcgacgcagggttccacatgtacctggacagcaacggcgaggcttacttcctcaggaacgcggacccgaatggtgaggaaggggagttcattgtctcccccgcctcgtcgggagatgagcgagaggtgccgatccaggaagctcagctgaggaagtcgaagagcacttcgtgtgatagctcgacgatggaagccgacgtcggtgagggcaagattcttgcgaggacaacctcgaggcggataaccatacttgaaaggatgtttggccggaaatcgattaagaacaatgcccatgctgtggatagggtgagttcattggagcgtgcagaggtcgctgcagaactcctagataccaagtggtcaacaaatctcccacgtagttcaaaacctaatggttcaaatgatgagccttccaagagcaacaatgatcagatggaaacctcaaaacctgtattttcggaacatagtttggatcatgggaaagagatggactctaactgtgacaatgctcactgcaattcatgcagccctcgtggaggaagaaacagttcagcagatgaaaccgatccgtgtttacaagccactattgtgaagaaagaggtggttgagatacacgcgcgtgagagcagcgacttcactgataatatcacttcaatcacacatcaacaagggtcagaatcttcgtcaaatgatctgggaacagataaacttatgcagcagtctgtcgatactcaagatgagttgctgcatgatgttgaagatgtaactgaaagggagacacatgcagaggaggttatttccaatgacatttttgaaatccatgttgttgagacagacattacaagtggtaagagcgaggtggattctgagattgttactgtggatccagaaccagatcgagctaaccagaattttacagatacaaattaccaaaattatggcaccacagatatttcatctgaaagacatgaggtttcattgatcccttctgcacaggatgcagttcaagagaaaatagttatcctcagcagttctgaggctgtggagggctcactagatgcagttccagagaaagtagtcattctcagcagttctgagactgtggatagctcatatgctgtgtcctgtattttggatgacacagttcatgatgcttctgatatctcacaggctgacggtgtacaacatgaggagcactctagtatctctgatgggagtacagaaaagctaatttctgaggaaagttcattagtatgctatggtgttcccagcaacaaaaaagacttggttaatatagctgttcaagaaagtaaagcctttatcttaaaaaatcctgcctcccaaatcttggaagagagtggtccaggtttggatgtatctacagacagtgtttccctttcacatgcagactcagctcctgatttagcttgtcagcatgtttctcctaatgttgaagatacaacaagttatgagcctggcattggtcctgaagatgtaacaaaaaactcagttgtggaaaatggagcatgcagcggggaacttgttgtttctgttattcagacctcagcgggagatggactgacaaaatgcattgctcatccagctgttttttctaataaaatagaagtagaaggctcaccaacttctgctggattttccagtttgatcagtgttgaagtgcaaaacacaaaactagaagatgacacaaacaaatctagttctgtgattggagatgaagctggttttgtgcctgaggctacagctgagcttgatgaagaagcagaaccagttatatcattatctgaatatacagaagaaattcagtttcaatttagtgatgctgaaaattttgcagatagaaaggccacggatgacatggtggctaacaaaacaacaggtgaagtagaacatgatgaatctgattgtgacacagagaaacaggaagaaggtgatgtaggtcttgtaaatgacttggagaactgttctgcgtcattaaagcctgtgagtagccctgtttctattcctgcaattgacttccagtcaggaaatagtaacagagaggctaaatctctaccaaatctccgttctcatatacatgatcttgaaaggtcttatagttttcagctaagccgctcactgcaatcaactgctgaaaataatggaattgatctagtcaagagcatgaattatgcttttcttgagcagaaatcagaagctattggtgatttttcagaagaaaataacagccctcctgaggttaccaacactgtagcacttgatggcaaccatgctgatgatctgaaagttgatgcgttcattccttttgcagaattatcactatgcagacacctgttatctgaaggcatgggggaggatgctgcttgcagtgcatttgattctgagaaggtaaccttagaggagttccgtaacatgaagcaatcactgatgcgaaacaacaaactagttgttaggattgctggccgctactttccctgggatgctgctgcacctatagtactcggtatgatttctttcagtgaggaacaagtttttgaacccaaaggaatgataaatgtggagcgagttgagcaaagtgcagctccaggtggcagctggagcatctggccatttagtttcagacgaacaaggactattactgctatccagccagtttgtgaaagtattgttgagacttctgtatccactcctaaagaattgacacattttaaagaactagatagagaaaggaataaatccagggtaaagaggattgagaggaaggtgcgatcactcactccaacatctgacgagcttgcatctcttgatctcagagagggcaggaacgtggtaacatttacgttctcaactgcaattgttgggaaacagcaggttgattgccacatatatttatggagatggaatacacgcattgtaatatctgatgtggatggaactatcaccaagtctgatgttcttgggcagttcatgccactagttggagttgattggtcccaaaacggagttgctcatttattttctgcaataaaggaaaatggataccagcttctatttctgagtgcacgcgctatttcacaagcccacatcacaagacagtttcttttcaacctaaagcaggacggcaaagcacttcctgatggccctgttgttatatctccagatggtctcttcccgtcactttacagagaaggtgagcacatcctgatatgtttttgctattttctattcagttaattgtcagtcagcaaaaagagtagaagacacaaaataacttatctccactgaaaaatgttgcattcattacctctaatattgacttgggttcacatgagtaaactgggtgttgctagccttctaataaactctgtttggtaagcataacagcaccactctttttggttttggaccccctcaaccattgttggataagaggcccatttctttttagcaggtctatgataagtgcacataatacgattatgttgacataaaaagcattccctccttttcaaaatataaggcatgttagagtttaaaaaaccaaaaaaaaagtctaaactttggccatcaatttgtcaaagcatatgtacatttagcgtacataagatgcattgacatatttgtacatttgcttgtcttttattaagatgttgctttgtagtagttgctagtacaagaaattaatggtcaaattatgtattgaaagacttccataaatcctaatacgccttataagaagaaacagagggagtatctctggtaacgactttatgttagctacatgtttgagtgatgctaatgtttcatgacattggtttgtagtcatcagaagagctccgcatgaattcaagatttcgtgtctagaggccatcaaagatttatttccacacgactcaaatccgttttatgctggatttggaaatagagacacagacgagcttagctacctcaaggttggtattcctatgggcaagatcttcataataaaccccaagggtgaagtcgcagtgaaccgacgggtcgatacaaagtcgtacacatccttgcatgctcttgtccacgggatgttccctccaatattgtcgtcatctgagcaggaggactacaatgcttggaattactggaagatgccattgcctgatgttgatttgtgaggtacaagtcgagtctgcacaacagcactgcactaattttatgatgtgccgtagtgatcatgagaaggccattacttggttggctacatgtggatgctcctgctcctgatataagttcctgcaagatggaattttgtatatataggatcataatagatgtagtagctatttcttgtgtctcctgttgttgttgttgttgtcgtcgtaggactggaaatcatacctccgtgtgtcctgtaactgaaggtacaaaatttactggatggagggatctgatagtatgttgcagccccccctttttcgtttcatccttgatgtaattgtggtaccgatgtattttgtacaagaacaaatcaataataatgcaatcgaaagcgagctgttcatacgcagacacaacatgttgcattgaccctaggtgcattcggtaactgaaaatcggagctgtgtatactgtggacatgtcatctttggtatgcctgcgacttttagctgcagctaatgtgc

SEQ ID NO: 23328 - DNA, 1905 bp, Zea Mays
caacctccacgcctctgttctaaagttgtcctcagggagataattgtacaaacttttggcatctcacatcaatttactccatccatgatgaatctgagcatgaatggtggtgccaaaaaacttgatgggaaatctatgacaatgctgtggagaaacagctacaatggcatgcaagccaagtttgctgcaaggcagatgccagatgattggcaggaaacaagtacacttttggctacattagagaagattgagtcttggatattttctcgcattgttgagacaatatggtggcaggcactaactcctcacatgcaaaaacgagtagaaggatcatcaactccaaaggctggtagagtgctatgtcctactttgggtgatcagcagtagggcaccttttctgttaacctgtggaaggctgcgtttcacgacgcattcaacagaatgtgccccctcagtgctggcggacatgagtgtggctgtttaccaatattagcaaaactggtgatggagcagtgtgtagcccgtttgaatgttgccatgtttaatgccatccttcgtgaatcatcaagtgagataccaacagactctatatctgacccaattgttgacccaaaagtcctaccaattccagttggtgatctaagctttgggtcaggcgcgcagctgaagaactctattggaaacgggtctagatggctgacagataatcttggcatagatcatgatgactttgaggacataggagatgttgaagacgaaagaagagttgcagctgaaacgaaatcgtttcaacttctcaatgagctaagtgatcatctattttttagtttttcataattttcctttcatggcctccttacatgtttgatttcctatgatccatgagctgccaatcatgataacgcggtttcactatgcaggagatgaacaaggatgcagtcacaactgatgctatcggcagtatcagaacttgatggtgcttgtagactgttcatggtgcttgtagggatgatgtatgtctatggcttactgagctccaaccaactatggcaggagcgttagctaggacagcagtcagtctaacaattgtggacaaagttcagtctaccatacactgaagcgcacccttgttgctaaagctgcaggtgtgaacaactttgctcagcagaatggaggatcattgtcactagcagcaagacctcgagcccaggcagttaaccatcagtttctttccttctttctttgggccgagagagcaaagaaggatgatgcactttccaacctgtgtagcacgttgggacaactcaagaaatggcagtggatatggacatagaaattgacaggcaaaacaaagcgctggttcctttcagcgacgacatcactgaactgaattttagactgaaaggcgtgaatcagtgtggacaccagttgctgggcaagtgatatggagccagaattcgggcagttcggagactatcgccttgattgcagaatttaagaacattgttgttttacatgtttttttgcagtgaatcaggccacacatgttgtattagtgagagaatgatgatttattttatattattatggatttcatagattattttagttttccctgaactgcaattgtttcaataacataggaggggactaccttcaatgacatttaggtgaatttttaaggtatgtccattattccattatagagcacaaagcctacttcttacaactcactgtatgttttataattgtatcaaaagcactgaacaaacatagttagctatcacgttcactgttgtctaaatagattgaaataatgtggtgaagccgtcatggactcttaagtagcttagccactgcaaaggatacaattaattataaaacaccaatgaatcaataaaaaaa

SEQ ID NO: 23329 - DNA, 848 bp, Zea Mays
tcggccaatggctagttgacacgtcagccggagccaacggtcaacaggtgcactgaagttgttgagctcttcctgcatagccaatactcagtccggatcctgcaaggcttcttctatcctgaaaggctcaatagaagaaataaacgagtaatgctcacaaaaattagctaaacgtgagcgagtggttactcccttgctgatatcacccagaatctgatctactggatgatttctttgaatcgttgatcggacttgagttggaggaacttgtaacacatattcctccttatcctgttcttcatgtgctcccccttgatccagcccttaatcttgaggtagatgttcctcatcttgagttgggggatgcaccaatgtagtggaagaaggttgatcttgctcttgttgttcctgcggtcgcacatcacctattgccattgttcacattgcggccgtcggaacctcatcttcatctacatcatcaagatcaacttgctctcttggagagccattagtttcatcaaatacaacgtggctagagacttcaactaattctgatgatttgttgaagaccctatatgcttttgtatttgagacataactagtaaaaacctttctacagctttgggagcaaacttcgaatgcctacctttctttaccaagatgtagcatttgctcccaaatacatgaaaatagaaaacattgagtttgttaccggttaggagttcgtatgatgtcttctagagaaggtgatgcagatagagccaatttatggcatggcaagctatattcatagcttcagaccaaaacagctcaggcgtcttgtattctcaaagcatagtcctcgccat

SEQ ID NO: 23330 - DNA, 1985 bp, Zea Mays
atggggggcgggagacgcgcgacttggcccttgtgcggggtggcgaggatggagctcgtcccggacctggcgagcacgtcgcagagcgggcggggactgcggagggcgggcgggcggatcatggcgttcgcggctgtcgcggcgggcaggcaagaagggagcgcgctggcgtccgtcatcggcgagggctctggggctgcgacggcaagcgggagcccgccgatggatcgctgccggaagaggcccgactccgaccccgaaggctgcagcgaacccgaaccccccgccgataagcgcccgtgcacagcggaaccctcgacctccgcggccgcggtcgccgccgctcctccgcccggcgcgcgccaggctgagcagggcggctcggatatggacacctcgtcgtccggccaccacggcgatgctgatgtcgacgcggatgatggggacggtgatggcgatggcgatggcgatggcgatggggggtcgtcgtgcgagtcggatggggacgggagcccggggccgcgcggcagcgggggcgggaggttccagcggatggtggacgcggtggcagacgatggcgcggggcaggacgcgctgttggcggcgctcacggagctctgcgaggcgctatcgttctgtacggaggacgtcggtgggtacttccccacagaggcagccgcgcgagcgctggtgcgccgggccggcggcggcgatggcgcgggtactaccccggacgtgattctgctgtccgtacgcgccatcacgtacctctgcgacgccatgccgcgtgccgctgacgccgtcgtccgccacggcctcctccccgtgctctgctcccggctgctaaccatcgagtacgtcgatgttgctgagcagtgcttgcaagcatttgagaagatatcacggaggcagcctacccagtgcttgcaggctggcatgatcaacgctgtgctggcattcattgacttcttcgctgcaagtattcaggtatttccgctaaaaaaactccaggttttttcagaggacgagctagagagattactttgtggtgaacaagatacatgggattttgcgaaacttgtggatcacatcaaatttgatcatggctacacttccagcagccctcctgtcattaatttgctggaaatcatacaagagtttggatccattcaacgtagagctttcttgcaatttataacgggttcacctcggcttccaccaggcggcttggctgcactaaatccaaagttcacagttgttcgaaagaataacagcaatgatgttgatcatgacctgccgagcgtgatgacttgtgccaactatcttaagttacctccatactcttcaaagatgagagagaaactcctctatgcaattacagagggccagggatccttccacctatcttaaccaataagcgataatgatacttcgcatgcaacaggagtttctctttgtaagtatctcgtaggaaaggaaaacacggtgtaaatgtgggtggttcactgcttattttagctgacagcacgatctggtggagctgattttaggagagaaaaaaacggctaccgctctttgtacatactaggtttcaggtgtgatcaagcagatcactagtgtgcctagttcgctactcttttgttcaaactttcggtgtacatatgcgtgcctgcctgatagaagtgccagtgctatctttcattgttcgttggtgtttgccttcttaagcgtcgttgtgtgacttatggcgaaatatgtgcaaattatttgtggatttcatatgaacaatgtctgatccgagcgtgaggaatttgtgcttttggaataggacagtgccttttccttcggttcctatagtggcctgtcccttatcgtccctcatcgatcagacatttttcgtggcgattgctctgctatgttcctgttgttatctttggttctcaaaagtttcttgtgtgtgcgagaggtggcacacgaaggcacca

SEQ ID NO: 23331 - DNA, 1963 bp, Zea Mays
agtcagagagcgggccccatgcacgcagccctctttacccccatccgcagcccgcgcttgtgtccttctccgcgagccagtacacgcaccacttccccccttcgatctagccatcccaactccgccgactcgctggaaccctagccagccgccgccatgccgccgcgccgcggtagaaggaaggggaagggcagggcaaagccaagagcgaaggccaccgagcccgagcctgagctagaggaagccgccgattccgagatcgaggcgggggacgcgaaggcggaggagtccggcgaagcgaaagaagatgaatcggcaagcgacgccgagtccatggatgcagatgccaacgaggaagccgtcgagaacggagcggatgagatggatgcggagcctgaagccaaagccgagccggaagcggtagccaccgaggcggaagcgaaacctgacgtctcggatgccgaggatgaagaagccggtgaaacgtgctccgaccgcgaagcagatgccaaggatgttgattcgaaggccaaagcggaggagtccgacggcgaggatgaggagggagccaccgccgagaccgacggcgaggatgaggagggagccaccgccgagaccgacggcgagagtgaagaggaagccgctgagacgggcggcgagaacgaagaagatggtggggactccgacaccgaaggtgatgctgaggaatcccctccaccccctccttcccgcagccgccgccgtaagcgagcggccactcccgatgatgaagcagaggagacccctacaccgtcgcgtcgccggcgccgtcggaagtcgaggcagcgtggtgactctccgccgccacttccggaccacctccgttgccgtcgtagcgacgggaagaagtggcgctgctcgggccgtgcactcccaactgttagcttctgcgaataccactacgcgagggccaacaagggcaagaagctaccagcggatggagagctccttgctgtcgctcttcagaggcagaagaacaagaggaagggcaggaggagaatcaatccgtcgacgtcccctcaggcagccacgagtgaccgccagaccagggatctcccaaacggactgatgacgatcttgccaggtagcagtggacctgcagcactgtcaactcctgttactacaaaagttggtgtagaaatttctgcaccgatgcagcggtgctatcgatccaagaatgctgagccattgcctgttggtcctgtgaaggttgttcctcgtgctatgagtatgacgaaagcagcaccaagaatgtgtcactgctgcggggtaaagaaggcagcgcgtgttgccaattgcaagaactgtgatacgaatttctgtaacagctgcattaataaatggtattctaagttgtccaggaaggatataaaggctcgttgtccagcttgccgtggtctctgcaattgtaaactgtgcagccttggtcataccaagggtgctactcataaggaaccgccaagtggtgaaaggaagatactcagcataaaaatttccaaccatcaattttacaagcttttacctgtaaaacttgaccgggagcaacttgacgagttggaattagaagctaaaatacaaggaacaaaaacatctaatgtccgtgtccaggttgctgaaaatggtcagagtgagtcactctactgagtaaagtgtaacctgggtccttgaactttaggttctatttttaaatggttcactctagagcaaccaatttaaatgtataaggacccagatcctcactgagactggacctagatgagaacctgagaaaaaaattaaggactgtgagtgcattttactcttatttgtggtgagcatgaaataaatcaatcttgtaattgcacggacagttagatatttctttggtcaggcaaatgttgtcttgtcgcaactcgccagcttagtattattatgttccgatttt

SEQ ID NO: 23332 - DNA, 657 bp, Zea Mays
cctgcccatcccggtcctccaccgcgtccgacgtgaaacgtggagtgagttgtggacttgtggttgttccggagacatcctctccagtctccacccccactccacgaacacgattgctgcttgcctgctgcttctgcggctcgcggccatcagatccagcgccaccgatgccgccgcagccgaacgggggcaaggtgaccccgaacctggcgatggacgcggaggccacgcgcctgctcaacctcacggtgctccagcgcttggaccccgccgtcgaggacatccttatcaccgccgcgcacgtcacactctacgatttcaacatcgacctcaaccagtggagccggaaggacgtcgaggggtcgctgtttgtcgtcaagaggaactctcagccccgattccagttcatcgtcatgaaccggcgcaacactgataatctggtggaggatctcttaagtgattttgaatacgagcttcaacctccatatttgttgtaccggaacgcttcacaagaagtcaatggaatttggttttacaaccaacaggactgtgaagctgttgcaagtctatttggaagccagctacagtccgcagagagccgcccgtaagttctaggcggccacccatgctgctgcaatgccgctgctgcccacaaga

SEQ ID NO: 23333 - DNA, 1490 bp, Zea Mays
cctaactgtggtcccatattccttttggagaactaaaagctattgaataagatgacatgattaataaaaggaatgggaagaattcgaccagacttgttataagtgcagtggcaacagtgggagctctcctattggtggctttaatgtgtttctggggttgctttctttacaaaaattttggaaaaaaagatatgcgtggtttcagagtggagctctgtggaggctcttctgtcgtgatgttccatggggacctcccttactcctcaaaagacatcctcaagaagctagagactatagatgaagaaaatatcattggagcaggaggcttcggaactgtttataaacttgcaatggatgatggcaatgtctttgctttgaaaaggatagtgaaaacaaatgaagggctagatcggttctttgatagagaacttgagatattgggaagtgttaaacatcgctatttggtcaatctccgtggttattgcaactccccttcatcaaaacttttgatatatgattatcttcaaggtggaagcctggatgaagtgcttcatgaaaaatctgaacagttggattgggatgcacgtattaacattatacttggagctgcaaaaggcttgtcttacttgcatcatgactgttcgcctcgaataatacatcgtgatattaagtctagcaacatcttgcttgatggcagtttcgaggcccgtgtatcagactttggacttgcaaagcttttagaggatgaagaatcacatattactacaatagttgcaggaacatttggctaccttgcaccagagtatatgcaatttggcagagccaccgagaagactgatgtctacagttttggggttttggtactcgaaatactcagtggaaagcggcctactgatgcatccttcattgagaagggactaaacattgttggatggttaaattttcttgctagtgagaaccgggagagggaaattgtcgacctgaactgtgaaggagtgcagactgagaccttagatgccctgctctctcttgccaagcaatgtgttagctcctcgccagaggagaggccgacaatgcacagggtggtacatatgctggagtcggatgtaattacaccgtgccctagcgacttctatgattcagagtagtctcctggacaagccacgctgctgctagtttcccgtgggggcgcattcctttattctttgcgtatattgtgtaaatgcattgccgcggtgtttggtctccaatcggctggctcaacgggtgacttttttttgcgtctgtatacctatgtatgtatctgtcatggtacaagttggctatatgctgatttaataataagagagaacttactagtagactattgtatgtttaactatagtctttagatactcgtagatgttgtgggatctacaaaagaaatggggaaataatgaatatcgcttggaacaaacaagaatagataaaactcttttggcttggaggat

SEQ ID NO: 23334 - DNA, 4942 bp, Zea Mays
cttggcgctcctccacccgtccaagtccagcacctcctcccacctccctcaccgtccccgagctgcgagcgcgaaaaaaaaagcgagagcaccacgtacctcgccgccgtcgtctccgcctctcccctcgccacgtcgctgccgagctgccgggtacaccgccaggcgcagccagatccgcgcggtccgaacccgggagcgcgccgccgtgcgtttcggatccgcgtaaggcgcgccgccggatccgccgcgccgacagggagggcgctgccgacgtccagctcggcattggtttggctcgatccggaggcgcggcgactgtgggtgggagtaatctgtatttgtggagctttgcttggtgctgaaaattgtgcaaacatgagatggcttcagcatatagcgtgctggaagtgggcaccgtgcaactgagcccatccttcttgtagccagattccttattccaatgatgcagtggttggtaggttgcagtagatgactaccggtgatcccttgctcctgtcatcatcgggaagtgcagattcaccttcaaagccagctcggccttcggtaggctcattaggctgcctctgcgcaactgattcattctcttcttcactgtacgaggattgtgaaacggcttctgtcacactcacggatgaaagggaggctcaaccaagacatttacgcgagttgtctgatgtgagcagggtggcagagcgcttccagtctgctgattcacaattcttccatcgtctctcagtggaatgctctcagaaggagaggcagcggaaggtttcttggggtggcgcaatggagaggcagcattctccatcatccctagagattggaatggtatcttcttcacatgagaagccaaatcgctcccagagaatcaggaacaagagctcacagtttgaagatccatccgagcaagagccaagaaaaatatacattaatgatcctaacaagacaaatgatcgatatgaatttacagggaatgagatcaggacaagcaagtacactttgattacgttcttgcctaagaacctcttcatacagtttcatcggttggcatatgtatacttcctggttatagctgctcttaaccagctccctcctttagctgtatttggaagaactgcttctcttttcccactactctttgtgttgtttgtgactgctataaaagatggatatgaagactggcggcgtcacagatctgacagaaatgaaaataaccgagaggcactagtacttcaacatggtgattttcggtcgaaaaagtggaaaaacatttgtgcaggggaggttgtcaaaattcatgccaatgagaccatgccgtgtgacatggttcttttgggtacgagcgatccaaatggtatagcttatatccaaaccatgaatttagatggtgagtcaaacctaaaaacaaggtatgctcgccaggaaactacttccatgatatatgatgacacatattcaggcttgatcgaatgtgagctgcccaacagaaatatctacgaatttacagctaccatgaagttggacagtcagagggttccgcttggacaatcgaacattgtactacgtggatgccagcttaaaaacactgaatgggttattggggttgttgtttatgccggtcaggagacaaaagctatgttgaacagcacgatatctccttcaaagagcagcaacctagagagttatatgaacagggaaaccctttggttatcagccttcctcttgatcacatgctcagttgtggctactgggatgggggtttggctgtttaaaaattctaaaaacctggatgccctgccatactacagaagaaagtacttcacctttgggcgtgaaaatcgaaaagatttcaagttttatggcattgctttagagatatttttctccttcctcagttctgtgataatctttcagataatgataccaatatctctgtacatcacaatggagctagtcagggtggggcaatcatacttcatgattggagatacacgaatgtatgacagtaattcaggttcaagatttcagtgtcgatccttgaatatcaacgaggacctaggacaaatcagatacatattttctgacaaaacaggcactttgacacaaaacaagatggagtttcagcaagctagcatctacgggaagaactatggcagttccttgcaagtcaccagtgacttttcacatgaaataagcactgcagagtcattgagacaaagtgtcaggaagcctaaagtcaatgttgatctggcactcacggaacttctgaatcaaccattaattggggaggaaagactttctgctcatgattttttccttactctggctgcctgcaacacagtaattccagtgaacacagagggttctcacgatttgacaaatgaagtggatgagataggtgcaattgattaccagggtgaatcacctgatgagcaggctttagtaattgcagcgtctgcttatgggtatacccttgttgaaagaacaactggacacattgttatagatgttctaggcgagaggttaaggttggatgttcttggtctccatgaattcgatagtgtgagaaaaagaatgtctgttattgtaaggtttccggacaacaatgtgaaggttcttgtgaaaggtgctgacacatcaatgttaaacattttgaaagtagaaattgatgatgaactttatgattcgttgcatgttaaaattagagaagctacagaaaatcatttgtcagcctattcatcagagggtttacggaccttagtcattggttcaaaaaatctgacagatgcagaatttagtgaatggcaggaaatgtacgaagaagctagtacctccatgcatgagagatcagcaaagctccgtcaagcagcaggtctggtagaatgcaatctaacccttcttggtgcaactggaattgaagataaattgcaggatggtgttcctgaggccattgactctctgagacaggctggaatcaaggtgtgggttctcacaggagataagcaagaaactgctatatctattggtttgtcatgtcgattgttgactcaaaccatgcatttgatcatcataaatggttcctctgaggttgagtgcaggcgtcttctagctgaggctaaagccaaatttggaataaagtcagctgattttgggcgggatttgcaaggtacagaagacatgtaccatggtgatatttctaaattgaggccctcaaatggtcacctgtctgaaactggagcacaaagcctcgaactaaccggtgttattggtggtgacaagtcagagtacagtgagaacgtgacaaattttgatggcactgagttagcactgataattgatggaagctcccttgtgtatattctagagaaacctcttgaatcagagttatttgacttggcaacatcatgtaaagtcgtcatttgttgccgtgttgctcctctgcaaaaggctggtattgttgatttgattaaaagcagaacgagtgacatgaccctggcaattggtgacggggcaaatgatgtttcaatgatacagatggctgatgttggtgttggcatatgtggtcaagaaggtcgtcaggcagtgatggcttcagactttgctatgggtcaattccgctttctgaagagattacttcttgtgcatgggcactggaattatcagcggatcgcatacatgatcctgtacaacttctaccggaatgctgtcttcgttctaatgcttttctgattggagcagtgttttctattcccttatatacacatcagttccaacggtagtagttggcattctcgacaagaacttaagtcataatacccttctttgttacccgagactatatgaggcagggcttcgaaatgagggctacaacttgacactcttctggatcacaatgctcgatacattgtggcaaagccttgttcttttctatgtcccttttttcacatacaatatcagtacaatggacatatggagtctgggaagtttgtggacaattgctgtggttataattgtcaatatccatttagccatggacattcaacgttgggtgcttataacccatcttgctgtatggggttctatagctgctacgtttttgtgcatggtgttaattgactctataccaattttccctaactatgggacaatttacaacatggctgcttcaaggacttactggcttagcgtttgtcttataatagtccttgggttgcttcctcgtctcctttgtaaagtggtatatcagaccttttggccatctgatattcaaatagcaagagaagctgagctttttaaaaagctgccccaacagttgggttcaaggcctgcaagtgacatcagctaacaacagcttcacacagttattttgtcaattctaaatttgaggctgtgttgattcatttgttgagctgatttttgtcgaattttgattatacgctgaggacaaacttcggtaaggtgtacaaatttggctcgtggaagaggcttcagaatgcaatggagcggctgacaaagggaactgactactggtggtgatgaaaacggcttgggtcttcgggggctagtaatgacaattgtacagatatgggacacaacgatacatacacttgtattttacggtagagtttgttagcttgtgtttagggaataaaaacataaatagatacagattcttttcgcactgcggtatttttttaatccctgactatatgttaaccgtcttcatttacttccagctgcctgagggtttagctgtagcggtttgcgctgtcagaatttttacattttacagcaatacgaggcccagttccctaatgtagtggttccaaaccacatcgaattttgttgaacatttattttcggatgtcagttttaattgtgagatgtaggtctgtttggttggatgtttaacttgcca

SEQ ID NO: 23335 - DNA, 2132 bp, Zea Mays
tcgtccggcactccggccacaccttcgctttcctgcctgccacagccactgccatgcatgcatgcggcgcccggcaggggccagcccataaacatttctgccatccctggctggccccccttttctccgcgtccccttgttcgcgggtgtaccatcgtcctcctcccgatcctagcatgtcattacgatggcaagccgcatcgcatcgttcccctccttcctcgcctttgtcgtcgtcaccgtcgccacgttattcccctcctcttcctcccagcagcagcccgccgccgccgtgccacagcccagagggttctatataagctgcgggtcggacaaggacgtgcaggtagggagcatcaagtgggccaaggatgagggcttcaccgccgtcgggaacgcctccgccatcaacaagccccacctcctccccctgctcgccgcgctgcgctacttcccggacgccaccgcgcggaagtactgctaccagttgcccgtcgtcaagggcacgcgctaccttgtccgcaccacctacttctacggcggcttcgacgggggcaaggaaccgcccgtgttcgaccagatcgtggacggcaccctgtggagcgccgtcaacaccacggacaactaccggcgcggcatgtccacctacttcgagatggtggcgcaggggcagggcaagaccatgagcgtgtgcctagcgcgccgccccgacacggcgtccagccccttcatctccgcgctcgaggtcatcgacctcgccgactccatgtacaacaccacggacttcagcaggttcaccatgaccaccgtggtgcgcagccgcttcggcagcaagggcgatatcgtcagctatccagatgacccgtacaaccggtactgggcgccgttcgcggacgccaaccccatggtggagagccactcctccatctcgcccgacgacttctggaaccagccgccggccaaggcgctcaaggccggaatcacaaccagccggggcaagaagctcgccgtgcagtggccgaccacggagctccccgcggcgacctactacgtggcgctctacttccaggacccgcgcacggcgagccccttcagctggcgcgtcttcgacgtcgcggtcaacggcaacgacttcttccgggggctcaacgcctccgcggccggcgtcatggtctactccagcatgatgcagctgtccgggaagacggagatcttgctcacgcccaacgagacgtcccccgtcggcccgctcatcaacgccggagagatctaccagatcgtcccgctcggcggcaggaccgccacaagagacgttagcagttgtcggtcgcgtccggtttcttgtgcagtggttgcaatggaagacctggcaagcagcctcaagaacctgcctccggactgggctggagacccttgtctaccacagcaacattcctggactggggttgaatgctcccagggatcacccgtgcgcgtcttgtcactggatctaaaaaaccatggtctttcaggatcgctacccgacagcattgtacacttgacagggatgaaaaccatctatctcagtggtaacaatctctcaggccccatacctgacttgagcagcatgcacgccctgactgcagtgcgccttgatagcaatcagttcagtggaacgatcaacccatcaatggaaaaactagccaatctcaaggagctacacctgaacaacaacaatctcacgggcaaaataccagatggtctgaaaaacaaagctggacttgatttgagaactgaggggaacaaatttgaatgaggctgacaaggaggaaatcatgagtacgatgctgcacccatgcacacagttcaatgatgaagggagaggactgaagacttcaaaatttgtacgatgacatacattaatggctgatgtataagagctgaagagtgatttcatatctagcatgcatttgccatttccatcctcttcttagagttttgttgtacatgttggcgcatgctgcatcaagaagcatcaatttaggggtaggtaattaagtattaggtgaaagaatcgttccttaatcttcaaaaagtcacaagacatgcattttatgaaacttccattaggacatgaacatgcagtggccaga

SEQ ID NO: 23336 - DNA, 1341 bp, Zea Mays
aaatgggttaaaatactattttaaaggatatgttcacttgtaagtactattatagagaagataaaattgtaagtactaaaagagagcagcctgataaaaggaatactataatagcaaaaagctcctcccagcagtgcacgcgtgaagctcggcggcggccggcacggtgcatcctccgctcttgcctcacctcccggtccatcctcgctgctcacgcgtgcctcacctcgacagcagccttccctcgcgacagggataaggacttaaggaggcgtcgctcggtgcaaagaatccatggcatggggaggtctgttcttgtgcatgggccgccccacgcaggagcaacagaagtcctgccttgcagccgctggtggcttcaactacgacacagctctccaaggcgccacacgcccaaagtcagtgtctaccttgacctctgacgaagctggtggcgaaataggtgacaaggatcttaccgagcgtggattctttgtgaaccgatcgcgtgttctggtcggctcaggttctgacgcctttgtccatgccaaatctgccctcctctcatggaggcacttggctttagggtgggcgaacgtggaaccggacaccccggtgaaggtaggtacaaggttctgcatctgctacaaggagttgatcccctgggtgacgctgccgcttcagatagcgtatgtgaccgacgtcgattcagacacgtccaaagggtgctcccggtccaagatgtttgccttcggcagcggcactctacagggccatctgctggccggagaggagcggttctcggtacaggtggacgaggaggagagggtgtggtacgaggtgctttctttctcgaagccggcgcacgtcctggcgacgctgtgctacccgtatgtgcagctgaggcagaagcatttcgcgcagcagtcgggacaggcgctcgtcaggcatgtgtccacctgctcttccaagcagaagcagtagtagagctttgtggagatgcactgcacagagaatgctgtatgtattccccctttgaattctattccgacatggcctggtttggcggcgctggggcctgggtgggatgatatatgttcgggcattccgagtggagtttgcccatcccatattttaatttcttcatgatggtggtggatctgttgcagctgaatgaattaagacaggaagatatataaaattcatgcgcacacagaatgaacacgagatgagaatcgagaaggtgcagtgaatgatttatccattatttatgaagtgattaatttagtaattaatttaatcttcaaagtgcgtagttatctaacaaattattagaaaacatgg

SEQ ID NO: 23337 - DNA, 561 bp, Zea Mays
ccgacatctccgcggctccgcccgtgcagcctctcgtcatcgcgctagccacctcctaactaactgcactgacgccctagcagccaagcagcgcctctcccttcgcgcttccccagtcgtcggcgtcaaccccctgcctggcccggcacaggaccttcccagctggaaccgccccgtcgctctcccccttcatcgtcgccttcgttggatctgtcgctgactcgctgcagcggccttcccagtcggattcaccgttgttgcgaccttcccggctagatctgtcgtcccttcggccagatcgtcgtcttcatggctagatccgccgctgtcatggccttccgggccggatccgccgttaccccttctactctgccacgggtgcggccaccccaaccggcgcagacgtgtgcgctgccgtcagcctccctggcgggtctcctcgacgttcggacgatggaagccgttggtgctcttttgttgtgttgccctgccgaccgttcacgctcgaacgtcgacccctcacgaggaacaggctactgttgcatgtcccccgaccacggc

SEQ ID NO: 23338 - DNA, 822 bp, Zea Mays
attacagaaaatgttctaaccaagaaacttagcaggccagaacgatcaggcgggaattctgaggctcgaccaatcggaagaagcgcgtgtacctgcggttgaccgcgccctagctggctgcctcggcgttgtctcctcctgtcttgcggcctcgtctgaggaagactgtactggaagtcgggaaggtttggaccccgtttgaactttgaatccctgtggattctgaaaatcgcgattaaaaaatcacgatgtcttccaaacggtagggataaagagagagattacaagaaaaaattaagagccagattcttgaaatctccgaatccctctcctaccggataaacaaggactcgataaaaaacattcgtatccccaacttctcttctaccgtttcttctcggaagcccttcttgcacaggccagtgcctcccaactcccgaagccaccggcccgagagtgccgcaacgctggctcaagcccgccgccgcgagctgcttcagtgcctcctccgccccgcccgcgtacactgacgcctccgccgccccgctgcctccgggctccggccgtcgacacgagccgctgccgccaccgtctcccttgcactcctgcaccggcgccaggcgtcactactgccactctcccttaggcgcctcaccactgcgcccgtgcgcagtgcgctgctgcctaccgtgaacaccacccccagctgtgctcggagagagagagagcagcgaaagaagtcccgagatgcagagaaggaacgagggataaaccgggagagataagtacgataaggactatagatggccatttgccactaac

SEQ ID NO: 23339 - DNA, 1349 bp, Zea Mays
gggttttcagatccagagcactaaaccaactactacccggccgccgccgccgccggtacatgtaaaaaaaggcttcgacctgcgagatgaacgcaacggagagcattcaacaaaccaaaaccgcataaccaaaatgttcagactagcgcgtggaacggcaaggaagctcatcctagcgctgcttacatgtctgtcgtcggcgctgctgtacaggcagattcagccgctaccgcccaagatccccggcacgccgggcggcccgccggtgacggcgaccaggacgaggctcagcgacggcaggtacctggcctatctggaaaccggcgtcccgagggagaaggccaagcacaggctcgtctttgtccatgggagcttgcgcaagagctgggcgtttacatgttgtccttcgatcgccccgggtacgccgagagcgacccgcacccggccaggaccgaggagagcatcgccctcgacatcgccgagctcgccgacaacctgcagctgggtcgcaagttctaccttgctggcttctccatgggcggcgagatcatgtggagctgcctcaagtacatcccacacaggcaactactggtggcccggcttgccgtcgaacgtgtcgcgggacgcctggtaccagcagctccctcgggaccagtgggcggtctgggtcgcgcatcacctgccgtggctcacctactggtggaacacccagaagctcttcccggcctccagcgtcatcgcctacaaccctgccctcctgtcccaagaggacgagatgctcatggccaagtttggctatagagcctacatgccgcagatcaggcaacagggggagcacgagtgcctgcaccgggacatgatggtcgggttcggcaagtggagctggagcccgctgcagctggagaacccgttcgccgacgccgacgccgacgatggccagggggcggggaaggtgcacctgtggcacggcgccgaggacctcatcgtgccggtcagcctgtccaggtacatcagccagaagctgccgtgggtcgtctaccacgagctccccaagtcgggacatctcttcccgatcgccgaggggatggctgacatcattgtcaagtccctgctgctcggagacgatcatctgtcgtcgtcggcctcacagcctcctcattctccatgaatccaggtcgtcacgtgtagtccgttcgcatttcgttgcccgtctctcactgtttctgtaaagggaccgatgctgcaggattctctagcgttgtagctaggatgctctgtttttttaaataatggaactaagttttagcctatatatatatatcatctgagaatgttacataatgttggtc

SEQ ID NO: 23340 - DNA, 2980 bp, Zea Mays
agaccaaggcgtgtgaattgttgacaaaaataataaaagtacaattacagtaataacgagtgaacagccatgtcttcactgcatcatctgttcgaaaccagagctatcaacctttgagtgcaggttaacggttttcttttgggtgattccctgtttatccttgcaggatataatgcacatgggcccatggatccggctgcttttgcgagggaaagaaatatgccttctgattcagataggatcttaaatgaagacaagtgtttcatgtcttgtagtatgccacgggagcatcagaagttctttgatgttcctgcggctagtgttagagaacttcatttgcaaagtgatgcaccttcaacgagtgaagccaattgttcacgtggaagaatgatatctggagatctttttgctccaagaacaaggagtctctctcctatcccaaaaggccatgcattcgctgtgagcaatggaaattctagagaatttggtttcagcccgaggtcaccagtaagaaagatggatggtttgaggagcccaccacatcccttgcctcttcctccagcttctggtgcatgctcgcctcttcatccagcttctggtgcatgctcgcctcttcatccagcttctggtgcttgctcacctcttcttccaacccacagtttttgctcgcctcttccttcgtctcccagttcctgcccacctcttcctgcatctcccactaactgctcacagtcccagtcacaatggaagaaagggaaattgctagggagtggtacatttggtcaggtttaccttggatttaacagtgaaaatgggcagttttgtgcgattaaggaggttcaagttattatggatgatccacattcgaaggaacgactcaaacaattaaaccaggaaatagatatgcttagacaactctcccacccaaacatagtgcagtaccatggaagtgagctgagtgatgaatcactttccatttgtcttgagtatgtttcggggggttcaatccacaaattattaagagaatatggctcttttaaggaacctgtgattcgtaattacactgggcaaattcttgctggccttgcctacttacatgggcggaacactgtccacagagatatcaaaggagcaaacatactcgtgggtcctaatggtgaagtcaagctggctgactttggcatggctaagcatgtatgcagtgtttactttctgaccctctctgtctatctgcctgtgtttaacgctttcagttatcataatatttaatatttgttggacttttaaagtcaactactgtgtttttgtctgagtgctctccactttgtatgacacacggcagtcatttttgcttgtagaccctggaaattcgctgaggaatacttatatgtatctgagtactatacagtttcaaatctcagttgaagtagttcgaaaaattgcagttgaaataaatacttctcaattgtattagtatccatggttctaatagaaaaggaattaaagtaggtgcaaactctgatttcttatgaacccaagtatgaagtatccagttatctgctagtgcctactaacataataaatgtggaaaagttttggaagggtgctcttctgtgtttgcccagctaaaagactcttgacgatggacaagtttttagctcttggatggtcagcaaaacaaggatacacactgattgtgcttgcttttgtttttttctctgtaaacccattcattttttgaaatttgttgagcagatatcatcttttgctgaaatacgttctttcaaaggaagtccttactggatggctcctgaggttataatgaactgtaaaggctacagtttatcagtggacatatggagtctgggctgtaccattattgaaatggcgacggcaagacctccttggcaccaatacgagggggtagcagcaatatttaagatcgcaaacagtaaagatatacctgaaatcccagacagtttctcagaggaagggaaaagtttcttgcagctttgcttgaaacgtaaccctgcatctcgtgcttctgcagtccagctgatggatcatccttttgttcaggatcaccctgcagtgagagctgcaaaatccagtgtattgagaaacacaccatcttctccagcagatggcagacacacaatgtccaacagggagttgccatctcggaaaattataactcctctgaaggatattggactgggcatgagagattttactggattttccactactgttccttcaccacacagtcctattcctggaagagcaaacatgtctacgccagtttcaccatgctcaagcccgctgcggcagtttaagcaatccaatgtgaggggcatgcgttctccacctcatccaatgctctcccctggtcttggcaacacagtaagttacacccaaaatcagacaagacgcaatccagctcctgccatttcagatccttggatggatgttggccagatgaaactccaaagccccaatatttcccccagaaggttctgagaacgatttaaatataaaaaaagagaatcatgggcgcaatatatccatgacaagttagttattaagagatgttcagtaaggaacttgtttgtgtagttactacaatacgacactcaccagagattcagtacagcgaaatggggctcttgagaatttgtaacaggaagttctgtatatccttaggttttaaggtttgttgtcgcccttgctatatgtagttatacgtgtacacgtcctgatgtaaaggttcacaaaaaatcttacagatgaccacgggatgtaaattcgaaagtttgtgcaaactggtatttctgtgtagtagttaggacttccatggcagaagtaactatgcacttccgattgaatcgagtacaatgtccagtttcatttccatttcatcactggaatcaagcatgtaactaaaaagagagtaagagagcggggtgcagattatattttg

SEQ ID NO: 23341 - DNA, 940 bp, Zea Mays
gttggtatagtttggtgttgaacagagaaagtcaagagcaagggatgctgctcttaacgccatccagtcgccgctgcttgatattggaattgaaagagccacaggcattgtgtggaatatcactgggggaactgacctgactttgtttgaggtgaatgctgcggccgaaattatctacgaccttgtcgatccaaacgctaatctgatatttggcgccgtcatagacccgtcactgagtgggcaggtgagcataaccttgatagctactggcttcaaacggcaggatgaaccagaaggccgcgtgtcgaaggtacctcttgtcaagcaatttactactactagggcccctattcttacagttttttgcttgcattgcaaccaaagggtgggcaacaaggtgagaatggccgacgcccatccccagcagagggcagcagcacggtggagatcccagagttcctgcgacgaagaggaccttctcgcttcccacgagtttgactgtcctgtcctgcacctgtatgatatgctccacccacccttaggtcagaattagatgatcttgtatggcacctagtcttctctaggcatcgatcgtctctagcggtttgttctttctagttttctttttttccccgccaccaattcttatggttatggtcatcaataatgtgtagctgctgtgagctctctagcgctatatgtaatgtagtccgtggagaatgtgttttccctgttacactggatctgattagaatggtagctgaagaagtgatggttgcctgcattagtatggtagctgaccaaggccatgtttgttttcctcccagattaaatattccagcaaattgattatataagcactaagggggtgtttgtttgggattataatctgttcagattatttatataattcaacaactactttaaaaattgttggatt

SEQ ID NO: 23342 - DNA, 2888 bp, Zea Mays
aaataaaaagaaagaggacagaaaaaatcgtagcatcgcaaacgcctacgcggccgcatgcatgcccccgacgcggccgattgggcatttggggcgaacggttgtttcggcaaggaagccgcgcctacgcccgcccgcgctcgcgcctctccaccgccgccggcgtgaacctcaaccaagcaccgcgcccgcgccggcgactgtccataaggccgtgtcctgccgtcgcgcacccctgcgtcgtacgatcgtccacgataccaagtcaggtatcagcacagactgcagcatcagacttatttggctggagaaatcagggatcatcagagtcaaaggcaacaagattctgctaccatatcagtgcaagcgaatggctgactgtttaaagacatgcctggatcttctattgtgaattcgcagttctttcatgggtggattgtcaggatcccaaactggtagaggtgggggatggaattctctgctcttctgacttcagcggggataaacatcgctgtctgcgtgctcttcttgtccctctattcgatcctcaggaagcagcctcacaacttcagcgtctactttgggaggcggcttgctgaagagaggttccagaggcaggacgattacttctcgtttgagaggctactgcctactgctggttggattgtaaaggcgtactggtgcaccgaagaagagattcgacaagttgctggcttggactctgttgtgttccttcgcctcttcattttcagagatgaatcacaatcatattccggaagagtcactgaatgtttttactatagccaatatcgtcgaagaatctcgaaagctttgggtgcactgctctgctttatatgtcataacaatctcagcctgcattcttcttttccacgaatacaagtatatttcgaggaagagactagcacatgttactggatatcctccaaatcctgggctttttaccgtgcttgtccgttcgattccgaggtttgacaatgagctgcttgatgacacaatcagaaatttctttgttaactatcacggatcaagttatctgtcgcatcaaatgatctttcgcaagggacattttcagaagtttgtggatagagcagagagggcttacaggagatttgtaagggtaagactctccgtatctgagcggaatgggagatctagcatgtccaggtgtggtgtctgtggtgtaagagcttcctcatttcagctttaccgcaacaagttcatcgaggccaagaagtcagacctcactaatccggaagtagtggaagctcaaaagaactgtcccggtgccttagtgttcttcaagactcgctacgcagccgtcgtcgcctcacgggtattccagtcatcaaaccctatgctatgggtgacagatctggctcctgagccacgcgatgtgtattggtcaaacctctggatcccctacagacagatctggctccggaagctagcgacactcgcagctagtatcgttttcatgttcgtgttcatcgtccccgtcgcgtttgtccagagcatgatgcagctggagcagctcaaaaggatgttcccgagcttgacaggtctcctaaataagtccttcttcgccagagtgataacgggataccttcctagcgtcaccttgctgctgtccctgtacaccgttcccccgctgatgatgctcttctcctctatagaagggtccatctctcgcagcgggaggaagaggagcgggtgcttgaaaatcctcttcttcaacatctggaacgtcttctttgtgaacgtcctgtcgggatccgtgctcaaccagctcaacgtcttctccagacccaaggacatgccgacgatgctagctgaactagtgccgaagcaggcaacctttttcatcacgtacgtgctcacctcaggctgggcgagtctgtgctcggagatactgcaggttttcaacttggtctacaacttcttcagcaggttcgtctgctgctgccatcgccagaataaggaatacgtttactctttcccgtaccacaccgaagtgcccaaagtcctcctgttcaacctgctcggcttcacgttctcgatcatggcgcccctcatactcccctttctgctcgtgtacttctgcctcggctacttggtgtatcggaaccagattctgaacgtgtactacccaaagtacgaaatggggggcaagctgtggccggtcatgcacaacgccatcgtgttctcgctggtcctgacgcaggtgatcgcgctcggcgtcttcaccatcaagcgctcccccgtgacggcgggcttcaccatcctgctgctcgtcggcacggtcctcttcaacgagtactgccggcaccgcttctcccgcatcttcgaggcctactccgcccaggacgtgatcgagctggacagggacgacgagcagtccgggaggatgcaggagatccaccagcatctgctggacgcctacagccagaccccgccgggggagggatcctccaggggcggcagccaggtgcccatcgagctcatcatggaggaccccgcgcaggaggcgtcggagtccagccaggagctctgcgacaccgtgcaggaggtgtccggggccatccacgaccacgaccacgtcgtcgaggacaaggcgcattccgtgtagactagatggtctggactctctgcgggtgcgtacgcatgtagatgctgtacagcgcgcatagcagactcgaaacccggaagcaaatacttacatttataaatctacgtgtatagaaacaacagtctaatctattggcaatcgggtactttggcccggcccaacacttcactctctgtccattggattggcacatcggaccgcccatcttaattctgatcttttatatttagttatgaaaacg

SEQ ID NO: 23343 - DNA, 3389 bp, Zea Mays
cccgagaagatttgtccaagggtgtctgttttggtgggttacagtaatccacaagatttagttgagaaacaaagagcccctggggaatcttctgcagagttgattagtgccttgaaagaaatcgatttcccagaaattactgcaaagtttccatgcataaaagttggtgatgcatcacctgttgaactgtatgaggattctactaacatgaagtttaaagaagctgcactttctgaaaagctcacaaatttcatccaaggctcagctcgaaatttggagtcagcttatgaattccataatgactgtcatccattgaatcaaacacccacaactgcaggtgatctttcaatcagtgaagagatccctctcattgaaccaatagttgatacgaagtcccccgagtcattgtcagatgctataacctctgacaatagtatactggataaaagtataaggtgcttgcctggaacaactagtaggcaatatcgccagctagaggatggtggtttccatacggtccgcaaattattgcagcattttcctcggacttatgcagatctgcaaaaccctcaaggccccatagaatatgggcagtatattatgttatctggtactgttatatcttccaggggaatcaaggttaagtccactttaggtcttcttgaggtggttgttggttgttccataatcgagtctgaattgagctcttcagttgagagtagtcactctggagcagagcaaaagagaattcacttgcacctcaacagatttttcagtggcgcacgtttttcttcccaacattttcttaacttaatgtcagcaaagcacaaagaaggggatcttgtttatgttagtggtaagataaaaaaggtgcttgctaatggccattatgagttgaaggagtacacaattgacgctattgaaggagaaggggaacacagcactatgcttgctaggaaaccacaccctatatacccgtcgaaagcgggattaaaacctagtctgcttggcctttcaatctctagggccttgaagatattgagcccagatgttgatccagtgcctcccgatgttctcgttgaattcaacttgcctaatctctttgatgcttacatgggaattcacaaacctaaggatcgatctgaagctgattttgctcgaagaaggcttatatttgatgatttcttttacctccagttaggaagactatttcaaatgcttgaagcagttggtacgcgggttgagaaggaggaattgttatacaagtgcaaaagtcatgagctgaatactgttggtgtagatgattggtctcctcttacaaagaaattgttgagggctcttccttattggcttactcctagtcagttggatgctgttcaagagattatatgggatctcaggagaccagttcccatgaacagactcttgcagggggatgttggttgtggaaagaccattgttgctttcctggcatgtatggaggttgttaattcaggatttcaggctgctttcatggttccaacagaggtgcttgctgtccagcattatgaacacctaacttcattgctagagaagtttgatggagatgagaaaccaaatattgccttgctaactggttcaacgtccacaagggagtcaaggataattcgagatggtctgaaaactggagagataggcatggtcattggaacacactgcttaatagctgataaaactgaattttcagctttacgtatctctgttatagatgaacagcagcgctttggagttgtacagagaggcaggtttaacagtaagctatatacttcttcctcaaagttgagtggtgaaaatacaagttcagacgaggcttctgattctgaaacatttatggctccacacgttcttgcgatgtcagctacccctattccaagaacattggcacttgctttatatggtgatatgtctcttactcagatcacggacctgcctcctggaaggcaacctattaaaacccttgctcttgaaggaaatgatgtagggtttgaagctgtcttccagatgatgagggatgaactgatagacgggggcaaggtctaccttgtgtatcctatcatagatgagtctgagcacttgccacaactccgtgctgcaacagctggatttgattccataaagcaaaaattcgaaggctatccctgtgggctattacacggccgcatgaggagcgatgagaaggaagaaactctcaacagttttagaagcggagaaacacgcattctcctgtcgacacaggtgatcgagatcggggtcgatgttcctgatgcttccatgatggttgtcatgaacgctgagcgatttggaatctctcagctgcatcagctgcgagggagagtaggtcgcggtgagaggaaatccagatgcatattcctggcttcaacttcgagcacgctgccaaggctgaaggtgctcgagaagtcctccgatgggttttacctggctaatgcagacctgctgctccgtggccctggcaatctactaggtaaaaagcaatctggtcatcttccagaatttccaatagctagattggaggtcgatggtggtattttacaagaggcccatcttgccgctctgaaagtgctggtcgcaagcaacgacctagcgttgtatccacggctgaaggtggagctcagcatgaggcagccattgtgcattcttggagattgacatgtcaacagtactgctcgtaggctcgtagcattgggcgacgcgtgtactgtggataactattggtcgtaggctcgtagcgtcggcaaagttgacatgccgtctggtgagcgaggcgtgtaccatgaataactgttagactgattgtgtgagtgtgtgtgggctggtaccattgttaggctgccggttcattagggttagagttgagtctatatattgtaaccccttctctatgcaatacaatgatccacttcactattctacatgttattagactaggttagggttttctgaaacccacagtagccaccggtcgcctcccaccccacagcagccgccaccacctgagccgtcgtcgccctccaggaggctcctccctctcggggcggcacttgcccctggcgcggctgtgcatgggcgcggcccctcgtagctcggcgcgggagtggcagcccctggcctcgacggcgcgaggcgcgaccccctggcagtgtggacgcgacggtccgtccatggcggcgcggccacgccggccccggcgcgggaaacggctcggcggcgcacgacacggagcctcatcacgaggcaatggtggccacggcgccgccctggcggctggctcctccggcgaggtacagcctcggcgcgacctaggcgcgagcgtaggctcgtgggcctcctct

SEQ ID NO: 23344 - DNA, 867 bp, Zea Mays
gtttgcatgttgatattggagggcatggaattgaactgggttgaataccgaatcagccatgtatataccttctgtagaagataccgttcttggtattgtggtcgacaccaaaccagacaactttttggtagacataaagggtcctaatttggcctttctaccagtactttcatttgaaggcggtacaaggagaaacatacccaagttcgagattggtacattaatatatgctcgagtggtgaaagcaaatagtatcatgaatcccgagctctcatgcatggatgctactgggaaagctgccgaatttggacagctcaaagatggttatatgttcgacacatcaactggcatgtcacgaatgttgttaagttccccaacgtgtccagttctggaggtccttgggaaaaaactgtcgtttgagattgctgttggactcaatggtcgagtctgggtgaatgctcctgcagcaagtactgtcattcttgtatcaaatgcaataatgaggtcagaatctttgagcggcataaaacaaagagctatggtagaaaatctattggagagattgtcatgatgataagtcagcaagcattagtctaaagtaaaatggaggagtttccattgtgtcagttcaaagtaaaagtaggaaagtttgagatcaaagtgactatccccatcaaaagattattatgtatcacgtgtcgtagtatacagtacactatactcttttttatattaaattatcaatgtatttatcaaagtcttgcgtcccttgtttaatattcgaagggcgggtctagtgcaatcgtgagacctgtctcactaaatcaccaggtcacggctttgaagcagtcttatcatgtttgtggg

SEQ ID NO: 23345 - DNA, 1625 bp, Zea Mays
cccgatccagagcattccccagtcctcaccccacgtccccacccttgtcgccctttcgcttccgtctcgtttggacctccatccgcggccgccgccgccgcgctgagtttgggccgggctctgttaatctgggcgactttgattttctctgctcccgctgccacggccgtcaggagtgaagcgatgctggagaaagaccggatatcctacttctacgacggagatgttggcaatgtctactttgggccaaatcaccccatgaagccacatcgtctctgtatgacacatcaccttgttctttcatatggacttcatcaaaagatggagatatatagaccacacaaagcatatccaatagagcttgcccaattccattctgctgattatgtggaattcttgcaccggataactcctgattcccagcacctatatgcaagtgaactaactagatacaatcttggagaagactgtccggtctttgataatttgtttgagttctgccaaatctatgcgggaggaactttagggtaatgactgtgagtttccacaagtatggtgacctgttctttcctggaacaggtgatattaaagatataggagaaagggaaggaaaatattatgccatcaacattccacttaaagatgggatagatgacactagctttactcggctttttaaaacaattattgccaaagttgttgagacatatctgcctggtgctattgttcttcaatgtggggctgattcattggcgagggatcgtttaggctgcttcaatctctctattgaaggtcatgctgaatgtgtaaagtttgtcaagaaattcaatattccccttctggtaactggaggtggtggatacaccaaggagaatgtagcacggtgttgggctgttgaaactggggtccttttagacacagaactcccaaatgagattccaaaaaatgaatatattgagtactttgctccagattatacattgaaagttccaaatttgaacatggacaatttgaacagtaagacctatctcagttcaatcaaagtgcaagtgatggagagtttgcggtacatacagcatgctcctggtgttcaaatgcaagaggttcctcccgatttttatatcccggactttgatgaagatgaattggatcctgatgaacgtgttgaccagcacactcaagacaagcagattcaccgtgatgatgagtactatgaaggtgacaatgacaacgatcacgacgacggcacacgctaatctgcttcttctgaggccctggtgtaaatggaaacctgagattcttcactgttgtgtgtagttcagcagccttgagatgtaatagtttgtcagttgacagcagggatctaatttagcaggtcaaagtggtttagacttttataagggattctgacccctcctgaattacacattgtagtacaagtctgcatatttttaagcatgcaaaaattcaaatttctcagtggtattagtatctcaagaaaatacaaattcctcgctcagtaacattgctgatatgtggtgaatttgattatatctagaaccccaaggcctagtttgagtattctagtattgaccttaatctacatgtattgaactggattggat

SEQ ID NO: 23346 - DNA, 2712 bp, Zea Mays
atggctccattcggcgacggcggtgtcggctgtggcgatggaggggaggcgctgcgtgggtgggaccctctgcgcagtggcagcgcgccgccaacgatggagggcgcggcggcggcagcggcggcggcggagaggagggtatttggcggcggcggtgacggcgcgtcgttcttctccgggatcgacgggctcatgtttggcgcgaggatggacgaggtcagcaggtgccgcggtgccgccggagctcaggaacattttggcaattctacatctttatctgttggaccatctggccaactgtttaatggtgcaggagactgggatgaatggcagtttggaccgagcacagttcatagtggtggtgctatggcaaactatgcatttgatatgaatctcctttggacagatatgaatccagacaatgctgaatatcacagaaatatccagaatcacttcatgtcaaacattgaaaacatgaatgcttatggtaatagggatcttgatgcttcctccatgtttgattctgatatttcagatgctttatctgggttgaggctgtctaataattcagtaatggatcaaaggaataatagggaagagctagcagatgaaatactcgagcgtcaaagagatttctctaaaactgttgatgaaacccgatcatctttggttggtaatgtttttcatgcacctaggtcagatgtgcatccatcacgaatatatggagatggtattttacggaggcagaccagtgcatgtgcattagatggttccaatgtttcaaggatcaatcgccatcacataaagggtgttgatcgcccatctttggctgaccagctagctataatgcaatcaggcaactttcctagagggaccaatctttctcgcaatgtgtctgtgactaacatgtccaaccccatgagcaacagatacaacagcaatacagacctggatttggctaggagtcgaatgacattttttaaggagatacttgcacaacagtatctgcaggaggataatctgtcatataacgatagtaggatctatcatgatgagccttgttttccctgttcaagaatgcaaagatctggatctcatttttattcaaactcgcggtgcattctatcccatggtgatcggcaatcacggctcttgtccctcaataggaaggcaatgggtagaaatattggatcacatgcctatcatgataatacattatcaaactacctggatgtgctttctttggataatgcagatagaaacggtgctgattcagtggaactgattgatttagtgggtcacgttaaggaaattagtatggatcaatatggaagccggtttattcaacaaaaactcgaaattgcatcactggatgaccgggaaaaaatatttccagagatattatccaatgccattgctctaacaactgatgtttttggcaattatgttatccagaagtttttcgagttcgctacagaaaggcagttaatccaattggcagatcaactcaaaggtcacattttggaactcagcctccagatgtatggttgcagggtagttcagaaggttttggaggtagttgataaggatcgaaagattgacattgttcatgagctcaggaatcatattctgaaatgtattggtgatcaaaatggtaaccatgtgatccagaaatgcatcgagtgtgttcctgaagaccgcattccatttgttattgatcctatactttcacaaattcttgttttatgtacccatcaatatggctgcagagttattcagagagttttagagcattgccatgatcctgtgactcaaagtgctaccatgaatgaaattgtgcagcaaaccttccatctgacagatgataaatttgggaactatgttgttcagcatgtgttgaaacatgggaaaccagaagagcgttcggccatcattcaaaagctctctgggcaagtggtcatcttgagcaagctaaagtatgcttctaatgtcatcgagaaatgtttggagtttggaactcttgaagaacgtgatagccttattggggagatcatttcttctggtcaaacatttcaggaattgatgaaggatcagtttggtaactatgttgtacagaaagtccttaagacatgtgatgaaagatacctagagatgatcctctcgagcatcaagttacacttgaatgaactgaagaattacacgtacggaaagcacattgtgacacgcgtcgagaagctaatcgttacaggagaggaacgagcaaggatggcctccctgagcggccagcgtcagcagcagccaccaaactgtacagctgtcgacgcacactaatccttttttttatgcattggcgtcaaatgcgacggcacattggttccttttaacgcattgtggcgtcaaatacgagtagctagatgagagctaggtttttgggcactgtaaattcttttggccatgtgcaagttcatttacagtggataatagatgtacattgtgctggagcgttcgttagctttggtatggtaggtgatcgagagcagtgctgtgtaatataaatatactcttgttgttcaccgtacgacgtacagttgctcttttgtagcactgatctcgtttttcattcatatgtaatctctaattcattcgtaaggctgctttcaagttccaacccttgtcttaatcagcgccacattagtgatcaattgtgctgtc

SEQ ID NO: 23347 - DNA, 993 bp, Zea Mays
aaaccctagagacttcacgcaggcagtcttcaccgcgcggcggcctcatacccgcaggcagttttcaccgcgcggtggcctcatccccgccggcgagcctccactctcctccgccgtgagaattcgaaaaggaggaagcaatgacggaggtggcgctcctccggggcccgaccaacctcgcttccaccaagcggcagccccgagcgcactgcgggatctgctaggagccggcgactccttgaacagcatgggcaagaggccgtggaggaggaagaggagcggtggtcgttcttggcactgctcttcgagctgttgcagaagtcgctgctcgggtgcaggacggtgggcggcggcggtgaaggcgaacacggcggcggcgggatggagattgggctgcccacggacgtgcaacatgtcgcgcacgtcacgtttgacaggttccatggattcctggggctgcccgttgaattcaagcccgaagtgcccctccgtgctcccagcgtgaggattttcgaaccagtgcaggatggggcacaggttggctcctgtcaagtgccaataacttccgtactaaattctaaatgctggtgaatagaagttcaccaagaagacaatgaaaaaaaactagaccaacaaggaggaactaggcagcttttatatcaagaaaataggcacccaatttgcctggacaagtacttgaatgtgggtggtataggaacaccacaaagcacaaacaactgagcctgttcagctgccttagccaggaacccactgagagaacaataccaatattgggccaaaaaaatgttgtcaaatcatgtctggcaatttggaagttgcgaagttagttaaaaaaactgtgtgaaagatatgtttatggacatgaatgaactcagttacaagaaaattcatcaataaatttgcaaaattgtaataactgacctaatgatcagctactacttctaaaagtttactactattgtttaccagcaa

SEQ ID NO: 23348 - DNA, 692 bp, Zea Mays
tgtcaacagcccaatcaccagactcaaaatatgcctgcacagaagtacccaaatcttttctctgaagagtccatatttggaaggaaacgctacactttcatggtgatgacaaagtagaagctattgaagaactggaggcacaagttcgtggctccgaatctacaaaagatctgcataagaattggcaattgatgtcagcaataatcctctactgtgtcttttctatgcatgacacagcttatcttgaggtattttcactgtgggctgtgagcagtagaaaatttcgggggcttagtttgacatcccaggatgttggtactgtgctagccatctcaggttttggtgtacttgtataccaactcgctatttatccttttcttgcgaagtattttggaccaatcaagacatttcggcctgccgcgatcctgtcgatcattctcctcactacgtaccccttcatggccaatttacatggcctggagcttaaaatactcatcaacattgcatctgttttgaagaacatgtttgcggctaccatcactattgcctgcaacatcctacagaacactgcagtgacgcaagagcagagaggcgttgctaatggcatctctgttaccctgatgtccgtgttcaattctgttcctccagcagcagcaggaattcttaaatatcttccatattcccttcattag

SEQ ID NO: 23349 - DNA, 1710 bp, Zea Mays
aatggttgaaaccatatgcggcattttgctttttgcgggactttttcgagacatctgatcacagtcaatggggtcgtttttctcagttttccaaggataagcttgacaaacttatttgtgaaggtactttacaccatgacattatacgttttcattactatgttcagtaccatctatatatacaattatctgaggcagcaacatatgcaagaaagaaaaatgttatcctgaaaggtgatttacctattggtgttgataggaatagtgtcgatacatgggtatacccaaccttgtttcgcatgaataccgctactggagcgcctcctgattattttgacaagaatggacaaaattggggttttcctacatataactgggaggagatgtcaaaggataattatgggtggtggcgagctcgtctgacacagatggcaaagtacttcacagcatacaggatagaccacatcttgggtttctttaggatatgggagcttccagatcatgctgcaacaggtttagttgggaaatttagaccttccatccctcttagtcaggaggagcttctaagtgaaggtctatgggattttaatcggatgagccaaccatacattcgtcaggaaatactggaggagaagtttggatccttttggacagtcattgcagccaattttctaaatgagtaccagaagcagtgttatgagtttaaagaagattgcaacacagagaaaaagattattgtaaagattaaaacaagtgctgaaaagtcactgtgggtagagaaagaggacaatatccgccgtggccttttcgatttactacagaatattgtccttatcagagatccagaggactccacaaaattctatccccgttcaacctggaagacacatcaagttttagggaccttgatgaacacaggttatgcaagaactggggttgattggattgcgtatccaaagaatgcctagtgaaccaaacttggaatttggtattccttctcagtatagctatatgacggtttgtgctccctcatgtcatgactgctctacattacgtgcttggtgggaagaagatgaaggaagaagaagtcgtttctacaagactgtagttggcagtgatgaggagcccccatctcgttgcaccccggaagtagtgcacttcattgttcagcagcattttgacgctccatcaatgtgggcaatctttccacttcaggacctccttgcactgaaagacaagtacaccacaagaccagcgccagaggaaacaatcaatgaccccactaacccaaagcactattggagattccgtgtccacgtgacattggagtccctgctgaacgacaaggacatccaggcaaccatcaaggacctggtcacaagcagtgggaggtccttccccggaaagaaggcggaaggtgccgacgagagcggggagaagctgtccaaggtgcagctgaatggtaaagcttaggaaaggattgcgagagctgctggaagtgaccacggttacaagtaaataaatagaataaggcgacagattgcatcaccgtgttgatccaggtgatgctgtttctggtaggaaattcttacccatgtgatgttctttcaactctggaaataagaagcaccctctaccaagtcagaaagtgaaataatccatccagtgtcggttttcattaatagaattttcgttgaccgcccagttatt

SEQ ID NO: 23350 - DNA, 4171 bp, Zea Mays
ccggtcactgcccgatgggcgtcacccccggcgctccaccccgcgtcgcggacccccgacccgccccccgcctcgtcctgttcgcgtccccctttccccgcgtgtgcgttggccggctggttccggatgagggggttgctgtcggtggaggccgctggcgcggcgtcgtcgtcggcctcggcctcggtgctcaacggcgccgtggactggtggcgcgacgtcaacgagtcgccgctgtggcaggaccgcatcttccacgcgctcgccgtgctctacggcatcgtctccgccgtcgcgctggtccaattgatcagaatcgagtgcagggtgccagagtatgggtggacgacgcagaaagtgttccatttcctaaacttcctcgtgaacggcgtgaggtctgccgtgttcgtgctgcggcggaatgtgcaactcgtagagcctgagataatacagcatgtgcttctagatatgcctgggcttgcattcttcacaacatatgcacttctagtgctcttctgggcagagatttattatcaggcacgtgcaatgtccactgatgggcttagaccaactttctattggatcaatagcgtggtttatgcaattcaggtgataaacttgtcatttaactaataagtcaggttggacttcagaacgatatatgctgcggtaatttaatactgtatatatcaatgtgcactttatagtgttgagctgtgtacattgatcacatctaaagttttaatagtctatgaaagagacaggcaggcaccaggctagtcctaggattcccgagcatccttccaggcttccacatgcttgtctatcatggttattagcctgcagaactaccaaatccttttggacgccaaggaccgtgataccttcctattaccaatgaggaaaaatgtcatggaaacatatttagtgcatattaactgtcattagggtacgcacaattgataaattctaggccacaaagctaagtagtacatgccatacttgtcaactctgatttcttggtgaaaattggaaaaagccacttttttctctgaatacacaggagagctacatatcattatattaagaagaaattagggaagggtaaagaccctattacatagaggacacacacaactgtcacctgatacaatcaaacactaccacgaccaacacactaaaagcctaaccaccgacctggagagaggagagagctttagcgtcggccatagaccagtacacaagcccctccttagccattctaacagcagaaataacactaggacgacacttatcaaacacacacttattcctatgcttccaaatgatccaaacgcccaagatgaccatggagttgagacagttcttcaggtggactgcaactctagaacaactattcttccaccaggtttcgaaggagagatcaacttgttggggagacagttcctgcagatttgctagcgtgaggaactcaaaccaaatttttttggcaaagacaaaccaccagcaagtgattgatggtttccgaagcttgatcacaaagaggatatcgctctggatgagacagacctctcatagctagcctatctgcagtccaacatctgttatgctcaacaagccaaatgaagaatctacattttccaggagcccaagtattccacaccctcctagccggttcaaaatccactgacccaaagaacatagcacgataggccgagctagcataagatccggaggtgttaaacctccatgtgtgcttatcttgtaccccatgatgaagaactatattagagagtgattcgcattgatccaagaattctgccaacactgttacaatgagagcaccttttaaatcagcgacccactgaaaattgggtagggcctcactaaccaaccttttactaactagtcgggtaggcaccaactgaaacaatgaagggccacatctttaacacacttgccttacagaaaccgatctttccaaaatagggtgttagaaccatccccaatttgagtaaggactgccacactaaacagatttcgaacctccttacaagcctgaataggataatcagtccatggcttgctcaagtcgctttttggagccacaaccagcaaactctcaaagcctagccatgaaatcgaaggtcaatcaagcctaaactgcataggttttttggccgagtcaccttaggtcaagctagaaggcaatgtcctcctctggcatttttttcttcctttccacaagaaccctcttcgaagcttgtcaatagctttgatggcccacgtaggaaggtctagagcggtagctgcataaatcagttttgatgtgatcacaaactgaacatgaatagacctcccaacccttgacataagctccgctttccagccaggcaagagagaggctacccggtcaacaatagcttgaacttggtctctgggtagcttcttaattgagaggcaaaccaagatatttgcaaggaaaactcaaaacggaacatggcaacaactcttggacacatgccagattaatagattatcatcattacagcggatagggagcacattactttttttgcacgttggtcttaaggcccgaggccacgccaaagagagtaagaatgtccaaggctaagttgatatccgaggcaactggctttagaaacaacactgcatcatctgcatagagggagagccgatgttgcatactcctggaagacaaaggctgcaagcctgcaacagcctctctgctgacttgctgaggcatgcatgatcagcctgttgaggacattcacaaccaagataaaaagcatgaaaatagtcacactgggcttgttgtgaatgcatttttatttgatacacgtaaaataggaacattctggtttctggactcatttgacaccaatgaatttcagataatcctatggttggttttgtggtggaaaccagttcgaattatggtcatcttgtcaaagatgttctttgcaggtgtatcactatttgcagccctcgggtttgttctctatggaggaagtgggtcttactatacactgtcctgatagagcatatcaaatgccttcttttgcttagatggtagtagagttctgacccaatttccactaaaagatccagagcaagacttgcattctgtaaccgccattttacaagcagaatcaggatacgtagaagtggttttctacacttatcatgactcataaatatccattgctatactaggatgcgagtgagatctccccagcgcataacttatacccttgcttcttggtttgtaggcatattttatcatcctagctatgcatgtagtacagtttaaccctttcatttattgagatgacttttgatgttctgtctgtttctgtaggttgttcatgatgttgcagcgttttcctgtagaatcaaaaggaagacgaaagaaattgcaggaggttgggtatgtgactaccatatgcttttcttgtttcttgatcagatgcgtcatgatgtgccttaatgcgtttgataaagcagcagatcttgatgttctgaaccatccaatcctgaacttcttctattacctgctggttgagatagtgccttcagctctggtgctcttcattctacggaaactgcctccaaagcgtgggatcacacaataccacccgatccattagagagcaggccttgggaacaggcaaaggttttctggtggatagtgttacacaacgtggtaaatacagaagggagagtgaaaagtaccactcgagctttgcccagctttttatacggaagtctttagaatcccaggttgaaattgtgtgtaaaattgcgatctctttcactaagatttagaaaatgtaacttatataactttgttattctcagtgcgtatcatctgttcacattgcattaattgtttgcatgtttcttttgggtctctgcctcaactttgctgaacaagagcagctaatgctcctggagtgcatggatgatgtgattcgctcaccatccgtatgtttggttgttaggacgagtagagcctggttcaagaccatatgcaggttgagtatatgcagactgagttgatgtaattatacagtagcatgcgtgtttggttggctgattctaattagccaggatcaacacaacctatgtttggtttacaaaaatatgc

SEQ ID NO: 23351 - DNA, 1552 bp, Zea Mays
actgtgagatacaggtctttgttaagagagtctgtacatgctgaaatggggtctattagcgatgctgagcgtgaattgcagcttgttgaagaaaaaatacatgatgctgagcaggagaaggctcactatgaacgtgttatggaaacaaaggttttaggtcctattacagcgactgaatcagagttgacacgtcttcaacaacttcatcaggagtattttgaaaaggcttcaacaatttgtgccgagagtgaagtggaagctcttgggggtgttgaaggatcaaccctagaacaattaagtgctcgtattaagaaattaaaacagaaatttcagcaagaaagcagaagatatactgaaaccattgatgatctgagagcactgcatgacaagaagggacagaagatcctgagaaaacaacaaatgtattcaggttttagggacaaattaaatgcatgtcaaaaggcactggacttgagatggaagaagtttcagagaaatgcgggtcttttgaagcgtcagcttacgtggctgttcaacgagcacctgggaaagaaaggtatcagtgggcacatcaatgtagattataagaatgaagttctgtctgttgagctgacaatgcctcaagatgcgtctcgtgataccattagagacactagaggactttcaggtggagaacgatctttctcaaccctttgcttcaccttgtctcttcatggaatggccgaagcaccatttagggccatggatgagtttgatgtattcatggtgagctaaccttttgtgaccttgtcattatctttgtccatttaataacagaacagacttggtaactagcgccatatgcatttggcaggatgcggtgagccgcaaaataagcttagacaccctagtagattttgctgtcgcacaagggtctcaatggatatttataacccctcatgatatcagcatggtgaaggctggggataggatcaagaagcagcaaatggctgctcctcgcggttgacagtgttgagacccctgacccttgtaaatgaagcctgagagccttgggcatgggagtgaatctgcttggaactactacttttatattttgtttgtagtttgtacatagcacattttgaggcaatgggcgtgtccctggtcaagagtttgttcctgggcagcatcagcagttctgtagttgcattgctgtttggacagggtcccactgtgctatgttaaagagtggttgatgcatgtcttttgaaataattgggccttgaacatactgcggatgtaaatgaaagaattgcggctgcagatgtcgatgaaggtagccccgacttggactctgctgattgcaggaacctgagttgatgaaggttctgaagttatgctatttttttcatgaaaaaatatgtgggtcccactcaaaactttgacctaactaaatatatccaaacaattgattgggtctgtcttaattgctagtttcttttgtacgagatgcggcagattctatacatgcatggctgatatcatgttctacagtttgacttgtttcccaaat

SEQ ID NO: 23352 - DNA, 1326 bp, Zea Mays
ccaccatccattctctgccaagctttccgactcccagccaacacgaaatggcggcggcggccgcacccgtgtccctggtcttcttgtgcacgcgtgggcagcagcagctggtacttgtcgacgccaccaagccccctctgcccctgcgcagccgcgctttctccgtccgcgccgctcagcagcagcagcagcagcagcaccgcgcccgcccacggccccctcgcaggaacaagccccccggacccgcgcgccgtccgcccagggtccctctggaccaagatgaatacgacggcggctatgatgaccgggaggaggggaggttcgctgggggcacccgggccgccgccatgcccaagccaccggccggcttcgtgctggatgaccagggcaggtgcatcgccgcagcatccaagcgcatcgtcaccatcatcgacgacaccaacaaccgccccttggagtgcataatcaggagagtattccggagctcgcaggaccacgactgcatgcttctctgcccagttgacatgcctgtgcaggtcctcaagagcacaaatttcagtggctgggtcgatgacgaccaactcaagcaaatcattccatctgttgcctatgcccttgccagagtacatatgcactttgtagaaagcggattctgttatacagcaaggggtggcttctgctttcctgaagaggccattcaagagtttcatgattccggtgaaggtgtgccttttgaaggtgtagagatttgctgcttcaatttggatggtgcacactatatgatttatacaccagttgatcctcttctttttgtcgcaatcaaggataaggatggtgtgctacgcatcgctgaggatgatctgatggaagaccctgcagttctggatgcggtagatgaagagacagaatttacagctctagtggaggaggaggaggcccttcttgaaacggtacttggtgaaaggtgatggatgccagggagtacttgtacaggaagaggaagagagactcgtctgattgtagtagaatagaatggaatggaatggaatggagtgcatttgcaactgtaagcagctgcaacctgcaatacttggagtggagtgatggacaacgcagttgataagcaactgctgctgctaatctttgtctagtgtaggatagatagctcaatgggacgatcaaagctatttatgatgtgctcatgtgtttgaattaattaataaaattaccccaatctgaatagaatacctggtggatggaagaaatgaagcaaaatacccccactgcaaccgttttttcttttgaattttcaagcgtattgagtcc

SEQ ID NO: 23353 - DNA, 2439 bp, Zea Mays
gacgagccgagcggaaagcgacgaggggcagccacaatatcttccgcccaccaatggcctcgcgctccctcgctcctcgctgcccgcaccctatcctctcctctcctccttcaccggctccgaacgctcacccgcacctccatgccgcgcgcgcgcggtaacacacctccgtgaagcggacgccatgaccgcgacgccggcagtgatcgggctgagcgctgggcaccgcctcctcgccacctcgttcggctcccccgacctcgcgtccccggacgcgcactcgtcgctgcagttcgcggccgccgcaccgaagctcaccgtcgtcgcgcaccgcgcccccgcctcctcttcctcctcctctccgcccaacgtcgggcgcggctcttccgccgccggccacgcgcgcgcgcgcgccatccgggcgctcaggaaccactccgcgcccgcgctcgccacgccaccgccgcctcctctaccggcggacccgactccggacctagactcggagttcgagtcctcgctcgaggccatcgtgctgctgcagcgctccatgctcgagaagcagtgggagctccccttcgaggacgacatcatttccactgacgacgagcaggacgacagggttagcaaggccacggtggtggcggcgcggtcgggcgtctcggcgcggcagcggcggatgagcggccggcggcggggagctggtcggaagagcgttgccatcagcccggagctgatgcagagccggaaccgcatctacctcaggggcaccgtcagcaaggacctcctcacgcacaagcaggtcatccagctctccaggaagatcaaggacggcatctggcttcagcaccaaagatcaaagctgaaggagaaactggggaacgagccatcatacaagcagctggcacagtcactgcggatatcagctcctgaactgcgcgcaaggatgcgcgagtcgtttctcgcgagggagatgctgacaatgagcaacatccgtctggtcatatccattgcccacaagtatgataacctcggtgtcgacttggcagaccttattcagggtggtctgatagggctactccgagggatcgaaaaatttgatgcatcgaggggattcaggatttccacctatgtgtattggtggattcgtcagggtgtttcaagagcattggctgataactcaaaaacgttcaggctccctacgtatttgcacgagaggttgatagcaattcgtggtgcaaagtacgcgttagaggatcaaggaattgctccgacaatagagaacatagcagagtcgctcaatatatcggaaaagaaagtgcacaatgctacagaggctgtgaacaaggttctttcactggatcaacaggcgttcccctccttaaacggtctacctggggacacactccatagttacatagaggatcaaaacgtcgcaaatgatccatggcatggatttgaggaaatgtatctcaaggaggaagttaacaatcttataaattcaaacctcaacgagcgtgagagggacattattcgattataccatggcataggaaaacagtgccatacatgggaggatattagcagacaatttgggttgtcgagggagcgtgtgaggcaagtaggactcgttgcgatggagaagctgaagcatgctgcgaggaggaagcatttggatgcattgcttgaggattattgagtgagatgtttttcgtttacacaaatgcagtggctgtatatactcggaaacatagggttcatcatccttgaaaggctttaccgctactcactcggcagataactatacatgtacatttgtgacaatcaataggcacgattcagatatctatgtctgcagctgcacagtcatcaaaacgacccaacaaaaagagaagctgtttttttccttgggaagcttcgtaaattttctgtaatgtatcatttagcaccttaatcagcagaagagcaacatttatgtaccggatctgtattattatctagttacaattacatggaagcaaaatgcttacaggaatatggtgcctacaaaatttatcttacatgtgcctaaaatgtgcgatcaaataaatttcaggagaaatttctgaatatcttggaaaacttttgttgacatatgggcatatggccagagtttggtcagggtaattccgcaagaatatgtacgtgacgtctcatttaggcctgcatattccatcaataattctagttgcatcaaatcaaccagaagatttttgcatgtctgaaatagcaacaatatggtggtattctgcaaatgattttgggaaacttgaaatgatagacctcaagaaaaatctctgaacattcccgagaactcctgattgacgtgtagcatgagctctaatcaaggcaactctacaaaaatgtatgtgtgatgaagcaattaaggaaatgcttgaa

SEQ ID NO: 23354 - DNA, 210 bp, Zea Mays
cgcggagcggtcggcccgccttccgctccccgggcagcggttacaccttaatcgacacgactctcggcaacggatatctcggctctcgcatcggtgaagaacgtagcaaaatgcgatacctggtgtgaattgcagaatcccgtgaaccatcgagtttttgaacgcaagttgcgcccgaagccttctggcggagggcacgtctgcctgggc

SEQ ID NO: 23355 - DNA, 1060 bp, Zea Mays
accagagaaattcctggcgtgaaccacgggtgttgttcacagcacctgaccagccggaacaaatcatgatggcactatctctatcaccagcagcatgggaaggaatagacaaaggaaccactatgcgatttgctggtcgcatgcagcaacacgacatcctcatattagttgactcagggtcttctcacacttttgtcagtgaccgcttacggccacagttgtctggtgttcaagagttgcctagaaccatatctgtgcaagtagccaacagtcaagtgcttccatgccgttatcatctcccagcagctgagtggacaatacagtccgatgaaggtggattgggcgaacaagtgggcagtcattccatataatggatcgccagcatacttgcaaggtgtgcaggtgacattaccagccggcgctgtcaccgaacttttgctcttgtcagtggaatcacaggctacacccgctggacaatcggtcgatccaaaagtccaagcagttctggatcagttcgtggaggtatttgaggatccagtcggcttaccaccaagcagaacatgcgaccacactataccattggttccagggacaaatgtgtgtgtactaccactgtccagtaagctgtcgcagtgccagaccatgctgaagatgacaacaccatcaggggctgctctataggttcgggcacaacttcagactcgtcatctgttccctgactgaacatctcacggaaaagctcttccggattgtgagtactagagcagatgaaaatgaagtgagcagagtggaatatgtaataaaaaatagattgcagccacaaccagtttgccctcggttgcttgatgcatatgtgtgaccagaccaatctgatatccaaaaacttcttgccataataaatgaggctatcctagaaaaaagacaacaaacctttatcctgcacaacgctctaaacattagacctggtgaacataaatggccaatcaaccattctgtatttatcttgtaacacatcgaaccttactgacaggaaaccacgttgtgtttgttcagagacggc

SEQ ID NO: 23356 - DNA, 3655 bp, Zea Mays
gccgatccgaggccaaagggagggaggagacccctttccctctcgccgccgcacgatggtcgacaccaggcggagctccgcggccaagcgccggggcccgtccgaggactcctccccgtcgccgccgacgacgcaggcggacccgacgacggcgggcttgccggtggagcccgcgtcgcccccgccgtcgtccgggagccgatcgggcaagcgcgccaaggtcgcggttgcgcgggcggaggaccccggtgcgccgcgcggcaaggcggtggaccccgccgcggtcgacgtgctcgacagctccgtggcgaacctgcagggcgtggcgaggccgccggccgccaacgtggccgcgtcctccgccgtgtccaattccgtagggaggaggaagaggaatcagtctgtgagggcgatcccgacgggcgaggggacgctctggaagccgaggcccgccggtggccgcgctgaggcctggggcagattgatttcccagtcttccgagtatccctcaattccaatttatactactcatttcactattggcaatggcggaaagtgtgacttgaaactcactgagacatctcctgggccacttatttgcaaactgaagcatgttaagaggggtgctgcccttgagatctacatgaacaaagttgtccatgtcaatgggaaggccttggacaaagctgctaaagtcaccttgatcggtggtgatgaagtcatgtttgtttctcttgggacacatgcttatatatttcagcaacttctagaggaaaaagcaagcacaccatctttgtgttcaaaatgtgtcattcaacaagaacaatatccagttgtcaaagataaggagatagtcagcagtttatgtaagactgtgggggagcaaagctaccacccttctgaggaaaatatgacatttggtcgacaccaacttttgaaggatgatttgaagaaagcagctataagtgcaagtgatatatcagaatcatttgataattttccatattatcttagtgaaaataccaaaaatgttcttttgtcatcatcgtatgtaaatctatgctgcaaggaatccactaagtggacaaaggatatatcttctctttgtaaaagggtactattatctggcccaccagggtctgagatctaccaagaattactggttaaggcacttaccaaatcctttggtgctaagctgcttgtcatagattattcgctgctgtctggtccttcaaagtcaaaggaatcaaaaccatacaaaaaaggtgatagggtgaggtacattggtcctattcaatcatcagggtttatgtttgagggacagagagctcctgattatggttcacagggtgaagtgaggcttacttttgcggaaaatggatcctcaaaagttggagtcagatttgataaacagatccccgggggcattgatcttggaggcagttgtgagcttgatcatggcctattctgttcagttgattctctatgcctcgatggtccaggatgggaagatagagccaaacattcatttgatgttgtgtttgagaaagtcaacaggtgcctgtaatcctatttctgaaggatgttgagaaaatatgtggaaataattacacctaccatggtctaaagaataagcttgaaagtttcccagctggagtttttattgttgggtcccagattcagacagatgctcggaaagataagtcaaacaatgggtctccttggctcaagttctcatatagccaagcagcaatacttgaccttgcatttcaggatagctttggtcgggcgggtgaaaaaaataaagaagcactcaagatgtcaaagcatataactaaacttttcccaaataaagtgacaattgaatcacctgaggatgaaacggaactctcccagtggaaacagctattgggtcgtgacattgaaattcttaaggcaaaggctaattttttgaaaatacaatcttttctaacccgccatggtatggaatgtactgatttagaatcagtggtttgtgttaaagatcgtaatctgacaagcgaatgtgtcgataaaatagttggttatgctttgagttatcaactcaaggatcaccctattcaaactcctggaaaggatgcgagagttgtcctttccggtgtaagccttaagtatggaattgatttgttggaaagtatccaaagtggccctaagaagaagagcacaaagaagtcactcaaggatgttgtcacagagaatgaatttgaaaaacgtcttcttccagatgtcatccctccagatgagattggtgttacctttgaggatattggagcattagaaaatgtcaaggaaactttgcaggagttagttatgcttcctttgcaaaggcctgagttgttctccaaaggacaacttatgaagccatgtaaagggatattgctttttggtccacctggcaccggtaagaccatgcttgccaaagctgttgcaacagaggctggtgctaattttatcaacatatcaatgtcaagcattgcttcaaagtggtttggagagggagaaaaatatgtgaaagctgttttttcacttgcaagcaaaatttctcctagtgttattttcgtggatgaggttgatggcatgctgggtagacgtgagaatccaggggaacatgaggccatgcgcaagatgaaaaatgagtttatggtgaactgggatggtcttaggacaaaagacaaagaacgtgttctggtacttgctgccactaataggccatttgatcttgacgaggctgttgtcaggaggctccccaggaggttgatggttaacttgccagatgcacccaacagaaagaagattcttagcgtgatactagcaaaagaagatttggcagatgatgtagatctggaggcgttagcaaacctgacagatgggtattcaggcagtgatctgaagaacctgtgtataactgcagcacatcgtcccataagggaaattcttgaaagagagaagaaggagagaaccttagctgaagcagaaaataggccagccccacctcagtgctgtagcggcgacgttcgctccctaaagtttagtgatttcaagcacgcacatgagcaggtttgtgcgagtatatcatcggattcaaaaaatatgaatgagctcgttcaatggaacgacctctacggagaaggcgggtcgaggcacaagacaccgttgagctactttatgtagcctaacgtttttttagatgatttgtacatacagaagcagcctttgtataggtgtgtttccagttaattttgctggaaacatttattcatgtcgggtttcgtttctataatcatatcagcttgtgtctgcatctagtgtagcctgagcttctgattagttattaatttatttcagtccgttggatcttgcgtcctggtatagtctgtgaaaggtctcgacggagattcatttggatttatttaatagtctggatgatatggtaatgtttgtgtgggtgtgtgcgtgacagagaaggttttacccttccctctgcactaggtatggcaaagaggaaattctccacaggtcctacgaacgcttgtggtggccatttcttttccatcttcgttattcgtggggataaatcctatcggaattccaattataattagatagtacttgattt

SEQ ID NO: 23357 - DNA, 1423 bp, Zea Mays
aaggcccaatacggcccaaacttctgccactggcaaagccctaccaacccaagcacctatattatgtccacccacgccgcctccctccgaaaccctagaagcctccaccctccagcgcctccaccttcctcgccgcctcactccctctgcagaggtcgcagatccgtccggttagacgaagccgcccgcacccatggcctccggtgagctcgcctgcacctacgccgccctcatcctcagcgacgacggcatcgccatcaccgccgagaagatcgccaccatcgtgaaggcggccaacatcaaggtcgagtcctactggccggcgctcttcgctaagctcctggagaagcgcagcgttgaggatctaatcctctccgtgggatctggtatgcaccctgtcttgctatcaagatactttcgtgtgtttatatgccggtggatggtggttattcttgtagatttaccttattcggttatgtccctagttttttttacaatcttaattcttaacgtctttaaatattgttcgtattacccaaccctgtgatagggtcagttctgtcctacttgaccgattagtagtacattataagatctcacattcattgtaaccgaaccttactgtgtatttgtactcactaaactgagtattaagtatctttctgtttacttgaattgaaccttagtttttttttcaatgctaaatttgacatgtatgtgactccaatcttcattgtgctagtgaaatggagaggcattgccatgagtacattcaggatgcatttggccccttattttgttccagaattaccttacatccactaatgagttccctgtgcatgtttatactggtttatactggaacttcatgctagattgtgttaatttgtcgccctttgtgttgttagtcttgaatttgtgcataagatttttccagttctattctgaaaggactaacaatttgctgtattgaaattcgtttgtaggtggtggcgctgctccagttgctgcttccgccccagctgggggtgctgcagctgctgctgcccctgctgcagaggagaagaaggaagagcccaaggaggagtctgatgacgacatgggcttcagcctgttcgactgagaccctcgctacccagccattagcaaattcgcttatgctgtccaagacttatcttacgttatgtctgtaggcttttgttattacaagtactcaagttttgagtttttgagatgtggctatgacaatgtgatgaagaaccctaaaccatcgtattagagtgaaacttgtttctatatagagttccaagtttcttgaacctcaaacttgctctggttgatgctctgatgttttcagtcggtgctttttaatcgaagtcaaccgattttcgaattgtttgctgaattgcacggtgatcttttt

SEQ ID NO: 23358 - DNA, 1667 bp, Zea Mays
gcttggcaccgggccggtccaggtccaccccacccgagacagagaccaaccgccgctgccccatctccggagtcccgctcctaaaaccccgccagccagcggtgccgccgccggtgacatggacgacggcgacactcccagacgcaaatccgtcccagattggctgaacagcccgatctgccacggcgggatccgactcccatccctcctcccaacgccccacgcgacgccgatgtttcagacgacgaaggcaagggcgcgggcgccccgtcgtgcgcccacctcgtcgctgagttcaaagtcgcgctggataggaaggtggtggatctggcagagctccggaggctcgcatgccagggcgtgcccgacgccgctggtattcggcccatcgtctggaagcttctcttgggatatgtgccaactgatcgtgctctatggccgtatgaactggagaaaaagaggtcccaatactgtgatttcaaagatgaacttctggttaatcctaagttactcgaagaatggaggaaatgacagcttctgaaagagaggaacataatgctgaaggcaccggtgtgctaccaagggcggaaatcgttcgtgatgagcatcctctaagccttgggaaaactagtgtttggaaccaatacttccaggagtctgagattgtagagcagattgatagagatgttaagcgcactcatccggagatggaatttttcaatggggactcttcagattcgctgtctaatcaggagtcactaaagcgtatacttacaatatttgcaaaattgaatccgggtataagatatgtacaaggaatgaatgaggttttggcacctctctattatgttttcaagaatgaccctgaccaaagtcaagctgctttagcagagccagatgccttcttctgttttgtcgagctgcttagcgggttccgagacaacttttgcaagcaacttgacaacagcgtggttggcatacgctccacaattactacactatcacagcttctgagaagacacgacgaggaactctggcggcatttagaagttgtaaccaaggtcaatccacagttctacgcattcagatggatcaccttgctgctaacgcaggagttccagttccgtgactgcctcagcctgtgggacacactgttgggcgacccagaggggcctcaggctacgttgttgcgggtctgctgcgcgatgctaattcttgtccggagaaggctcttggctggcgatttcactgcgaatctcaagcttctccagaactacccacccacaaacatcgaccacatcctacacattgctaacaagctgcgaggaccgcttcctttctgaccagttggatcccttgcgtactttgttaccgtatacggttttgtgctagactatgtttatccagggaaagaaagctgcgttaagaactcttttaaaatgaacctacaaagcaacagttggttctcgtgtagtttccgttccggctttatgccggaatctggatgcccgtgcggctttgctgtttgtgaatgtcgactgaacgagtgccctgcacctctcaacttcagtcgaagtccgtggccacagggcaacatcaacacaagcatgtagcagcgcagtgttttgtgcaccaaactaaccctctctatactcactttccggtgc

SEQ ID NO: 23359 - DNA, 2510 bp, Zea Mays
tcatccaaacatttttgtgattttgtctggaaatgcttctgattttaaagattttcttgcatcagagacccaacatcaatttaatgctcgtgagagtgattggggtttcacatcttttatgcctttgagtgagctctatgatgcaagtagaggttacctcgtgaatgatactgttgttgtggaggccgaggttgctgtccgcagaattgttgactattggacatatgactcaaaaaaggaaactggttatgtgggcctgaaaaaccaaggagctacctgttatatgaactcccttctacagacactataccatataccctacttcaggaaggctgtatatcatatgccaaccactgaaaatgacataccatcaggaagcattcccttggcgctgcagagccttttctacaagctccagtacagtgacagtagtgtagctacaaaagagctgacaaaatcttttggttgggacacatatgattctttcatgcagcatgatgtacaagagctcaacagagttctgtctgagaaacttgaggacaaaatgaagggaactgtcgtagaaggaacaattgagcaattatttgaaggtcaccacatcaattacattgagtgtataaacgttgagcataaatctaaccgcaaggaatccttttatgatcttcagcttgacgtcaaaggctgtcgtgacatttattcgtcgtttgataaatatgttgaagttgaacgtctagagggtgataacaagtatcacgcagagaatcatggtctacaggatgcaaaaaagggcgttcttttccttgatttcccccctgttttgcaactccagctgaagcgctttgagtatgattatatgagagatagcatggttaagattaatgatcgctatgagttccctctgcaacttgatctggatagagatggtggcaaatacattgctccaaatgcagatcgaagtacacgaaacctttacactcttcacaggtataaatttgatgatgaacgtgtaacaaaagaagatgctaagaaggctcttgaagaacaatatgggggtgatgaagagttaccccaaataaaccctggtttcaacaacgctccatttaaattcacgaagtattcaaacgcgtatatgcttgtttatattcgtgaaagtgccaaggagaaaattatgtgtactgttgatgaaaaagacattgctgagcatttaagggtaaggttgaaaaaagaacaagaagagaaagaacacaaaaagaaagaaaaagctgaagctcatctttataccataattaaggtagctcgagatgaggatttgaaggaacaaattggaaagggtatatattttgatttggtggaccatgaaaaggtccataatttccgtatacagaaacaaatgccttttagttgtttcaaggaggaagtagccaaggaatatggcatccctgttcagtttcagcgcttctggttgtgggcaaagaggcaaaaccatacataccgccctaatcgtccattgaccgttcatgaggaaacacaatctgtggggcaactgagagaaatatcaaataaggcacacaatgttgagttgaagctgtttttggaagtagaacttgggctggatttgcggcctctccctcctcctgagaagggcaaggaagatattcttcttttcttcaaattctacaacccagaaaaggaagaactctgtttcatggggaggctctttgtgaaggccttgggaaaaccttcagaaatcctggcaaaactaaacgaaatggctggatttccccctgatcaagaaattgagctttttgaggaaattaagtttgagccaaacgtgatgtgtgaaactatagacaagaaactcacttttcattatagtcagcttgaagatggggacattatttgtttccaaaaatcaccaggagcagaatatgatgcacccgtgcgatatccggatgttccttcatttttggagtatgtccataataggcaggttgtacatttccggtctttggagaaaccaaaggatgatgatttttctttggaattgtcaaagcttcatacctatgatgatgttgttgagagagttgctcgccaacttgaattggacgatccagcgaaaattcggcttacaccccacaattgctactctcagcaacctaaaccacagcccgtcaaatatcgaggagtggtgcatctgtcggacatgctcatccactacaatcagacgtctgacatcttgtattatgaagtgttggatataccactgccagaattgcagttcctaaaaaccctgaaagttgcatttcaccatcctacgaaggatgaggttgttattcatagcatcaggcttccaaaaaatagcaccattgctgatgtaatatatgacttgaaaactaagcacaggaagatgatgctggctgtccaagtaatttaagtgccaactttttcaattctggagcagaatggccatgaattcccaccaccacagttttggttccatataacctcta

SEQ ID NO: 23360 - DNA, 495 bp, Zea Mays
agggaataaaattttccagggttcaagaagcaagctgcaccatacaaagaggtggaaatttattgttccaacgcccatctatggtttttaagatgccatcaccttttccaccatctatgcgtgggtttgcatgcagtcgaagtcccaatgcagagctcattctgaaagcctaggacgttaatttctgttctttcgtccaaagtgtactgatcattcagtttgaaccgaattatccagataaacgcggagttggagacctcgctggtgaagacacgtcgccggaacctatcacagaaacccatgaagagcatctgaactaggggatctggtacgatgatccgtgaaccgagataaattacgggaggtcgagcttttatctctttccattttgtagcatcttttacttacctaaacttgtcttattatggtggtagttaatgtaagattcactgcaaacattactgagttcaccatggcgtaaatccaaaaaaaaaa

SEQ ID NO: 23361 - DNA, 1655 bp, Zea Mays
tgccattaactcgataacctagtttagcccttctggaaagttgcaaacaactcatacgggaaaggacgaggagttgttggcattctggaggccaactttatcaaacctacccatgacaagcaggattttgagaagtcagtcctttatcaaagacttgagttccgcttgaaagaaatgacttacgaatactggagaactgtgcatcattatattaaggagaataagaatggtctaaggtagaccaaagtacaagctgccctagaaggcaggaagaggggggacacaaggaaacaccaaaactaaatagaagagagagacggggggcaccagttccaacaacattcaaattaaggccacagctgcctaagatcctttgcacccgccattctccaaagcttaacatcatcttgaattgttcttgttatgaggaatgcattaatgccataaacgaattcattcctgaactaattctttttgcagggaccttcattgccatcgtgttggatatgacaacaaaaaattacctaaagcaacccgtgctattaatcgtgccaatcatatgaacggtggcagttccccaacaagtgctccacctcggttgcttgcagttgatattccaacaagcagctctagtatacctagattatcagcctctgcagcaagagaaaagatcagtagtctcgattctcttcccaagagcagtgagtaatccactctttatgttcattttataaaatgtcactgtgtttatttatgcattgacctttagcagtgattggattgaagaggaagtttaatcctttcggtgctgtggcggccagtgctgatcaggatggactacatcatatggataaaatagatgtttctcaacgaagacggtttaatgaatacaaaactttgaccctggagaatgacaagttgcgaaatgaatgcttacaatacgagggatcagagaaacaacttgtcctgaaggaacaaaagctccgatctgaaattgctgaggtggaaaagaagtatcaggaattgttgggagagctcagatcattggatgtgaagaaagagaaacaatgaactctccacttcagcgcctgttgtacaattaattgctcttttttctttcctgacctgtgaagatgatgactggattacttcccgagacgtgcagggaactggtcccttggacaaatgttatctaccgattaccattcgcttggtagtttcgttggatagctgtagaggtgtaatttcgtttcactaatcttcctagggtcctgtgatggtggaagaaagtgagcatgtagtctgttgtaaaattatgcaacttgtatctgaatgtacagcagcggtttcaatgttaatggccctctgtttccagcagcacatctcggtcccgtgtcaaaagaggtggattttgatccggcactctggagtctggactctggagtggatacttagaattagacttcatatgttgtgcagtatgtaaaattacttttcgtactcgtgacagtcttaaactggtggttgtgttgtatttgagacgaggggggttagtcaagcctttgttcactccaacagtacattgtaactgtacatgagtgatggtgggtatcagctgtttggttgctgcattaatttattttccaaacctctta

SEQ ID NO: 23362 - DNA, 1172 bp, Zea Mays
ctaactggcacacaagctgcagtagcaaagcccaacagcgactcgacggctgtggctgcttgcgtcgccctccggcacgccttccggcggacggcgcgcgagcccgtgtctgtgaacgacaagccaggcaaccacaacttcgagctgctcaagaagctggtgctccccgacggctccgtgctccgcgcgcagctcccgggccgccccacccgcgactgcctcttcgccgacccggcgcgcgacggcacgagcctgctcaagatctggaacgtgaacaagtgcacgggcgtggtgggcgtgttcaactgccagggcgccgggtggtgccgcgtcaccaagaagacccgggtgcacgacgcggcgccggggacgctgacggggtcggtccgcgccgacgacgtggacgtgatcgccggcctcgccggggacggctggggcggcgaggccgtcgtgtacgcctacaggtcaggggagctagtcaggctgccccagggcgccacactgccggtgacgctcaaggtgctggagttcgaggtgttccacgtctcccccgtcagggcggtcgcgccgggcgtgtcgttcgcgcccatcggcctgctcgacatgttcaactccggcggggcggtggagcagtgcgaggtccgtggcggcgcgaacgcggccgccgccgtcgcgctcagggtccgcggctgcggccgcttcggcgcgtactgctcgcggcggcccgcgaggtgcatgctggacgcgacggaggtggagttcagccacgacgctgatacggggctcgtcacgctccacatccccgtgccggagcaggagttctacagatggagcctggagatcgaagtctagaggtgctcccggcctgtcggatctgtggcaattgcctcccattcttcagtggattcaccattacacgcgtgcctcagtgtgtggttggcgtgtgtgcgacgtagggaggcgtgtggaacgcatgaaacgggcacgtacgccattgacgcgcctctcttcgtccctagaagaataagctaagcctctgttctaccttgctgcatcgacctgcttgcaataaactgctactatactccatgtgtatgcaatgtgacacaaacaaaaacacatctccagttccatgatacactgtactgttgactaattagacaaattccaaa

SEQ ID NO: 23363 - DNA, 3630 bp, Zea Mays
tttctattccacgaccttatccacaccagcagattcgaaattcacggacaggcccatggacccggcgaaagccagcggtggttcagcccctgacgtgcgggtcccactctccagccgcaccgcctagagaggcagaggcatcccttcgcgtggaagcaaacgaggcgtgataaagtggggctcctcggtcccggcgttggccgcatcgacactcgccgcgcaccaccaccaccgctgcggctcacggctacgcagcccgctctcccgacccccccgtgccctcctctttttgctactagcacatagagtttcgcccgaatcgatcgccgactgactccgctagggttcggcccgatcgccgcttcgtcctcccggctcccgcggggaccccgccgagatgtctgactggagctcgccggctgcgccgacgttcttcccttttggcccgcaggccgaggggtgggacgtcaccttcaaggtcaaatatggtgatacacttaaaaggttttatggttgtgccaatgggagtcattttgacatgaatttatctgctctacgggcgaggattgatactgcctttaagtttggtcctgacgttgactttgttctgacttacaccgatgaggatggtgatattgtcatgctagatgatgatgatgacttgcgtgatgcagctctccgtcagagattaaaccctctcaggattactgttcaactgaagaaaaatcaaccaactgaaaaaaaagatacttctgcaccagtgaaatccgctgctcaggatccactatcccagttaatgtcagctattgaaggtttgaagcctgttcaggaagatagtctggcccatataaaatcagctattggtgaagcaatcaagtctatcccagagccaatacctgatgcccttgcaaaactttctcatgaaatacttgatgcagcaccaccaccattagctgagctgatgaaaccttttgcacaattgatggcaccaaacaataatggcaatgggccatctgatgtgcatgctgaggggtcatctagctcttccagtgcacaggtgccagctgaagctaaaaatgagcccaaagttaggccaagtttgggtcttaagaccgtgttgaaagaggctgctggacctgttcctaatgctggagcttctcaggttcaacagccattaatgtatccatctgttgaggagatgctgttcccctgtaattcagtcgacaaatctgtttgcaaagggaagattgatgctcaaagtaagggaaaatctgttacgtcctcaggcatccaacctgctcctcattctcttcgtactcatgccccacctccaccacatccgtgcatttcagaatggtcccgagcacaaagaagccaacaccgtcaattgaaatttgaagacaatgcaaaagccactaatgattctagatggcgcattccgatgtataaaatgccctatgcaccaccacctccagcagtgccacccccaggctatgtaccttctccacattttccttatccaggccgcctcttatcttctgggcatccatacggagatctcgctggtaacatggaaaactcagcaccacatagtctgcatagatggattcagtgtgatggctgtggagcgcaaccaattgttggtccacgttataaatctaatgtgaaggaagactatgatttatgtgattcctgtttccagcgcatgggaaatgaaatggagtacaccaaaatagacaagcctattttaccccacaggtttctaagagatccccatgtgtaccggaaggtgcaccatccacgggttctaatgaagtcaagacgggagaaacttgaaagtcgcttcattttggatgtgactgttcttgatggaacactgatgacaccttctaccccgttcactaagatttggcgcatgcataacaatgggtctgttgtgtggccacggggcacacagcttgtctgggttggtggagatcagtttgcattgcagacatctgttccattagagattcctgtggatggttttcctgtggacaaagagattgatgttcctgttgattttgtggcacctacaaggccagggaggtacatatcttactggaggttggcttccccttctggtcagaaatttggtcagcgagtttgggttcatatccaggtggaagacccttcttttgttaatgacaataacaggaatgctgctattaacctgaatctgcctccagagagctatagttcaaacacaaccaacttaattgatgtgaacattgagcctgctgactcagcccttagtgcacatgctaagcgcacaaaggagttccatttctgttcaactgattttcctgaacccagtaagtctgtgccttttacgttggccactacctctttgtctgcagcagctcctacaaaccaaactggtgatgttcccatgtccagtacacctgctgctgcttgtttgccctctgttaatgtgcctatgcatgaagtcgttactactcatacaccgtcacctattacgcctgtcttgcctacaactatacacttttcagccccagtatctgctcctgcaattgcccctgagcttgcatcaggggctgttggtgtgcctccacctgttagtgctgtggtacctgagctgtcagaactggatgttcacaatgaggagaagttgctgagggagctggaggaaatgggttttaggcaggtcgatctcaacaaggaaatcctcaggcagaacaattacaatctggagcagtctgtcgatgacctatgtggcgtcaatgaatgggatcctctccttgcagagctggaagagatgagatgaacaaggagctgcttgcgaagaatgagggaagcatcaagcgagctgtgatggagctcattgccagggagaagaaggacaagtgaagatcgtgtgctatctaagtatatattcgtaaataatgagacggctgtgccactgcggtgcagccctggtgcgtctcagagcttgcttatggtgaactcttcgtgttaggtttcttccttatatctgtcgtgtctgcggtgtcgatgaactatctagtatgtggagcgtgtgcgtctcagcagttaccctgccatgccacgtggactggctgtcgtgcctactgtctgttaccatgtatatatataaaaaatgatgcgtggaccaatgtttgatgctggcgctcttgccctcgtgataatgtattagcggttggcttgttgcttgcttgtcagccccaggtaaatcttgctgcttgctttgcttgcagaagcgagcgtctgcacgtacgtaatcaggataactgtatgcagcgatttggtgatatgcactgccagtggagtttgcttcacaaagaatggaatggaacctggcgaccctacgtggagtttgcgcaccgatgtaaggagctggaggccggctccgaggactattgcttccacttcctatatgtggcacgctgaagggcaatgccgtgttttagttgaaattttggccagtccacgagcaatgtggtgtttctactctctgtatctctactaatattaccaaaatcaaatcctctgattatctctacctgtctttatcagccattggtattttgggtgtgtgtgtgtttcatc

SEQ ID NO: 23364 - DNA, 2546 bp, Zea Mays
cttcctttcccaactcggtcgacgcgttcgccacggctgcgcagtcctcctcctcgcctccgatcccctcccttcgacgatgcgagcacacccgctcatcctcttcgtacctgcaccgccacctcatcctcttcctcgccgcgccgacacccaccgcgctctctccctcccgcggcgacgcccttcgccaacgagaaccgcacgccgtcgtctcccacgggcactgtcgcacgctgggccacgctgcagtcggtggcgccgccacaccttcttcctccatgtgccgtcgccgccctattcttcttcgagatgcagccgctagcgctgccctcctcccagctccccttcatggccgcgtgcagagtagtgtactctgtactcttccagaaaactttacatggtaccggaaccgggaccagcggcgacggtgtagtggtgaggaggcagaggagtgccttcggcctcgacggaagaaggccgccgatggagaagaagaccagctgggagcgtggcgcggcgtcgcggtcgtgcacgaggaggaggagcctgcacttgccggagggagaagaagcatgtagcacggtgcggtgctgcagtcgtgcgtgagtaggttcttattattgttttctatcctgctggatatgtagtcatgacagttaaattatgtacaactatgattacaaacgggaatacaagctaggagttgagaccacaatccttatgaaaagttacactgtaagtatgtcgtcctgcttgcatttcttccatgttccttttctcactgtaagcttagtttttgtgatcagcttccagatagaagagttattaaagtagacactaaacgattccaacctcctgaatctctttttactcctgtaacacttccatttatatttatacataatggtattgtcaacagtacacatagtttccatcagtttgttaatagtgcacctttagattgaatgagcttcttgcagagcaccaaggattaggcattgaaatgtgtggataaaaatattagaggaccacacatcattattatgcaacattgtctatgcacatgaacataattgtatcggtagtaagccgccagcatgtttgaaagttaaaaatgtgaattaagaacgaattatcgtatcctgctatacttatgcaacctaccaagaattagggcattgtagaaaccatataaagtattgagatcaatttgaatttgtctgcctcatgattttttgatacctgacctttatgaaggtagaggacaacattaaggatgatcatagactaccaacattcttcttcagattaaatgttaaattcagtaatttaatttgtttcagtaatacaagattagaccatccctgcacatctgcctatctgcctggcaaaatattatcgtcgcttccaagattgagaatatggctgcgtttggaaagccttagattctagcattgggtaacatgtctattatcccacattatctaagtttaactagatactcatattttatgaaaaaaactgcactgaaaaatcacgaggtgctagatgttgcgctagcagcagcatcatagcacatcttgtctattccagttacaaatgtgcatattgtagaatatttttgtaacatactgctgctcccttccattcgttttggttttggcaattttctatgcacgtgtcgctcatccatggtacctcttttgtactaagatcattgtgacatttaacatgtttacatcatctcttactcgacacatactcactggactaatgttcttgtccctccttttgctttccttagcagatggcggaggttctaataagtaaccttatgattggaaattgcagtgatcggttgtgtgtacgtgtctcccgtctgtgaaaaatttatgatcccgaggatgagtataagcttttccatgctcatatggtcctcatcgacgaggaggctggcagtgctcatgctcaaatataccctccactcactgacgttttcaaacctctgataaaggagggcaatgtctacaatgtctcctacattcagatcaagaaagctaataggatgtacaagcatgttgacaacgatatcatgatcggtttcacaaaatggatcctatgctgcctcaacaaacccgcggtttgaacacgtgacagatgacggcttagcttctgtggatggacatcttggtcgcttttgtagatggaatgtttggttggcttttgtagacagaattaggctgcacttgtgattgtgtaacgcttatgagcatggttgtgtggactgtgtcggccaaagtatacctcccaatgccttgtatatatcacatgcttagctgtctatccccaactaggtcgcctgataatagacttcgatcatgtcatgctattctataacaattttcgctgtaacttgcctaatcgtcatactatggtacacgcttaaatttggtgctgcaactttattgtggattataaaagagagaaaaatacagcataaagttataatgtcaaattgccacagctcactgttaagacttatttga

SEQ ID NO: 23365 - DNA, 2490 bp, Zea Mays
cttcgctttccattgccacaggacggctggatcccaatcccacgcgcaccaccagccaggcaacagcaacacccgcgcctaccgccacatgacatgcctgcctccacgtcgccccaccaccacaccaccccgcgcacgagccgagcccgccgcgacgtgccccacacccgccacttttcccttaccgccccaaacgggctagcgtgacgaggtcaccggccataaatccccaatctccgcgctttccttccgccccacactcgtccactcaccccctctttgctctgcctcgccgcgccgcagagcagagcatggcgcccccacgccctctcctcgccgccgtcttcctcgccgcggcggttctgctcctcctttctccgaggcggggacggtgggcgtgaactacggccgcgtggcgaacaacctgcccaacccagcggcggttgtgcagctgctcaagcagcagggcgtcgcgcaggtgaagctgtacgacgccgaccccaccgtgctgcgcgccctcgcgaacaccggcatcaaggtggtggtggcgctgcccaacgagcaggtcgcggcggcggcgtcgcgcgcgtcctacgcgctgctgtgggtgcgccggaacgtggcggcgtaccacccggccacgcagatccagggcatcgccgtgggcaacgaggtgttcgcgtcggccaagaacgtgacggcgcagctggtcccggccatggccaacgtgcacgccgcgctggccaggctgggcctcgacggggccgtcaaggtgtcgtcgcccatcgcgctcacggcgctcgcgtcgtcctacccgtcctcggcgggcgcgttccgggaggacctcgcgcaggccgtcatgaagcccatgctcgacttcctggcgcagaccgggtcgtacctcatggtgaacgcgtacccgttcttcgcttactccggcaatgcgggagacatctccctcgactacgccctgttccgccccaacgccggcgtgctcgacgccgggaacggcctcaagtactacagcctcctcgacgcgcagctggacgccgtgttcgccgcggtcagcaggctcggggagggctacaacggcgtgcgcgtcgtggtctccgagacggggtggccgtccaagggcgacgccaacgaggcgggcgcttcggcggccaacgccgcggcgtacaacggcaacctggcccgccgcgtgctctccggcaacgccggcaccccgcgccgccccgacgccgacatcgacgtgtacctcttcgcgctcttcaacgagaaccagaagcccgggccgacctccgagcgcaactacggcgtcttctacccgaaccagcagaaggtgtacgacgtcgagttcgtcctcggcggcggcggcgccagccagggcaacggcggcctcgggtggcaggagaacggcggcggggcgagcagcaccagcaccaacccgccgagcggggtgaaggtgacgaccggggaggcgtggtgcgtggcgaacgcgatggccggggagcatcggctccaggcggcgctggactacgcgtgcggccccggcggcgcggactgcaaggccatccagcccggcgcggcgtgcttcgagcccaacaccatggtcgcgcacgcatcctacgccttcaacgactactaccagcgcaagggccggtccatcggaacctgcgacttcgccggcgccgcctacgtcgtcaaccaggcaccgaagatgggcaagtgcgacctcccatcgacggtctgaactgaagcagcagcggcgaggaccgtaacgccagcggccatctcgaggaacaaaagaatcgatggcaggcaggaggcagcacagcagctcagctcatcagtcgccctagagactggactggactctgggggacgccggaatctttgcccaccctttcagactttctttaccgctgcagctttgactccagccccgcagcgacgccgtagaacgaacatcgctgtactaggctgtagctgtacgccttcctttttgcagctttggctaatggtgggtgtgtgtgtggatatgtttgtttagtcatgaccagcactactacttctactactagcatgctactattaaaatctgatgaccagtacgtatagattaattaatttaaatggtttagccttttgcgcccatgtgacccactacggtttgtctcgactcgagtgagcattttgactcttgttccgtcatcggctcaaatgtgcgtgccggaggcggaaatggtgcttagcgtggacgacaatgcacactactggcagcagcacccgcactcgagtagtgctactagtcaaatgtctgccctttggcgagcaattaaaaccttggaaatggaggatttgtgccgaattgctttggaacgtttcagatctcaaagcaaggctgttttttttcgattctgtaaataaacactgtctaaagcttcattattggacttctctactaatggggaagtcaaaaaaaaaaaa

SEQ ID NO: 23366 - DNA, 164 bp, Zea Mays
aacgaggccgccaggacatcttggatcttaggcttgagcattattatctgaattccgctcacaaatcacaacaattgaactacggtttggggcgtgagaaccgagaaagttactcgtttaaatcggatgaagagtttgagatgaggcacggaggaacagcaaac

SEQ ID NO: 23367 - DNA, 2490 bp, Zea Mays
ggttgtagcggcgccattactttcgttcacttgttctcactcagctcttcccgtttcccgccctcgctcctcctggactagggttcatggatcccgacaccgccgtggcctccgcagacggggggccattcctagagttcgtagactatgccatctccatgctctcctcgtccgctggcgacggcgatggctatgagtctccgggggacgggccggcgccggcgcggccgccctgggggtgggcggtggcgcagctgctcaagtcctgctgcgcctactccagcggcgtcaccgccgccatccttctctccgacctcttccaaaacagcggaaatccctgaccctgaagaggaaggtcaagctgcccaaacttataaacacgaagaataagaggaggaggcttccaaatactgtcacgatcgattctatccacgagaagaacttcctttctcccaatagtgtccttgaagttgttgtcattgccgtgtttgtccttcctggtacaaacatatacatgcttaccttgggagacatgtggagcgcatccacaatcgacatatatctacaccgaaggtactatgactgcataggacaaaatggtatattgaagaagggtcgagaagttatgctcacaggatgttgtcttcgtacagccatggagggatctggccatgctcgtattttgccaacagaatacatggtgatattactggatgaggaacaagatgaagatgccttgctacttgctgcacaattttgcaactattcattctcttctttgattctagaggaaagtagaaacaatgttccgtactcattttatgccaggattgaaaagattgagtccttggaaccatttagatgcgcagaaagaatgcagataattcttgaagacaatgacaatgcgaagatgaagttagttttatggggagagcagacttcacttgcaaatctgtgcagtgtagggagcatgcttgcactggacagacctttcatagcaaattttatagacaataatcatgaggattctcaggaactgtgccttgaatatggcagtgcaacacaggtttacatggtgccaatcgctcaacaagaggaacaggtgccttttacacctacccaagtaaagagccaaggacctcggctgtcatgtgttctgactgataatgtagcttcgcaagtaacattaccacgtgatttgtatggttcagttgatttcagcaaatacccgtttcgagcatatgtaagtgaccttcatgataaaatggtgggaatcagtctgtttggtaccgtaactagtgtttgcaaagtaagcacatcagggactacgttctatttggagttggaagacacaacaggagttgttctgatgaagcttatctttgttggaccctggtcattaggtagagtaggagttgggcatatggtgtacatctccggtttgacttgtgccttgagttcaacaaatatccttgaagtctcatggcgtgaaaaggagccagggtctctgtttgttaacttaagcttgctgccagcactcctaaactcatcgtgcctgcataatttatcacccttgtcagatcttccccgttcgacaaacagaacacatatatcccatgttcggttagatggcatcgattgtgacagtttaaaggtgtcgctgttccacaacatttgcggcagtgttgtgaatgaacattcaggtgtactccagtgttcattctgtaagtgtgcctgcgaaagtgtatgtgcgcgtggctttcagctgcacttgaccatcgcagacgacagtgcagatgtcttggcttggtgcgttgggcaaacggctgtcgagttccttcagatatctcctgacgaatacctagagctccccgaggatgaacgggcaatgtatctctacactctccagaacgaaagctttgtggtggctatcgcgaataccaggaagcgagtcgatggatgtgctgtgggtgatgaagccgtcccagcttgggagatcacgagagcccagaaatgcgaatgagttcgtatagcgctcgagaaagaaatgctgatgctgaaaagttactgtaacacgtgtttcaacctccgtttttcatcaaccaattcgtcgttcagcaatgcagccatatgcatgagttgtccattgactccaaatgatgcttaagcacgatggttaggatgggttcttcgttgacaaagtccgagagtaagacgtcgacgaaggcatagcgtttaactttaagatgggttcactactgaaaaatttcggttgttcttcattcatgttgacaataggttatttgcttggcaacgtagccagccgacttcagatttatctgaaactgtgccttttacatctagggacttgtacccagcaaacaaacgctgcccaccgcggttgagttacggagtgtttggttgtctgattaaaaggttattttgtgtcacattaaatatttaaattttaattatgagttttaaatataa

SEQ ID NO: 23368 - DNA, 2587 bp, Zea Mays
gagaaaaggcgggggagggggactggaggtgaaaggcggctgctttcgctgtctccccaccacccgcgcacagtggcggcgctgacggtggcaggaaaggaaagtggcgatcacaccaaactcacatacagatggagatggcagagaccttgcatgtattgcccgatgatggcaatggaagtgctgcagttcagactgagccttattgccatgaagacgccattgaggacatggaatctttcttggatgaagtaaacgacagggttcatgtttcaggaattgtgactggtgctatcatcaaggggatcctaagtgatgtgcggcaagaagctgctagccaaattgctctcaaggatgcagagatatcatcactgaaccagaagctgcagcagccagtaaatggcagcttgagtttatctgagggacgggataaaagacatgatgagttttatagtctccgccagcagcttgactccatttccaagtcactgttgaattctgaatgggggctatcgggatcacagcataactttgaagattcagaaaatgccagcaagcagcaggacaaagaaaattcctctagaaatggtgtagcaaagaccattcatcctggagactctaaagaagaagtttttggtgatccgaaactcttggatcacatggataaggttgctttgatagcccatttcaataaatcaatgaatgagatgaaaaggcagcatgattcagttctgtaccagaggacggaagagatattcaaactgaagcgtgaaatcctgaagaaggatggatcaaacccttttcatttacgaaataacaaagaacttgagcaaacaaggaagaaaattgaggaagtcatctcaaagttggatgtgctcctcctggagaataaaagagcctctgtccgtatcaagtcaaatgcaattcctggtcaacaagataagaacaatgtattaggttctgaaatcgagcaactagaaagcggtgcaagtaataatgaagactaccattgctctattccaactcactcatcacattttgcatccagagaggcagatcatgaactgaatattgtaaggcctcaatttgacgttgaagatgccagaattgcagccacctttagagaagaaatagaaaggattatcataaaagagttcattagtgaaataaacatagaattgcatggttatgagattgagggtggtatgaagcaggaagtttgctcaataattcacaatgaggctattgctagagcaatgtcaaacattgattctttgttgttgaagtacgaggagaaaaagggtcatgctgaagaggaatctctacataagcaaaagattgaaaaactgaaactaattgtggattccttcactgaagtattgagtgaaaaggagaaatttgtatcacagattggattggaagcgatgcagactcgcgtggagtcaatgtgttgtgaacttgatttgttaagggacaaagtggcaaagcaagattcctacctatctgaaaagaacagggaatttgatgccattatgtgcaggttggagcaagctcagcagcatgttcaacacaatgatgttaccttggttgagctgaatgatagacttagaaccatttcaaactctctaaaagacctagagaaacagaatcaagctctacattatgccatggaagaaaaagagaagatgctaacatctgctgtttccaaagacaatgatatgagagaattcatggaaaatcttgttaaatctatcaaagattttgaaattgtcatgatgaatcagcaggctgttgttgcaaataaagtcgatcatcatgaatcaaggtggatttgcttggtgatgaggttgaggccttaacggatcttcttgcaaaaatctatactgcacttgatcactattctccagtactgcaacactacaccggcgttatggagaccttgagcatgattaagaagcacattagcatggcgaagtaaaatgcttctggtcggcttgacactgtagaattgtaggtttgacagcaggcttccagtggtttgacataagtttgtagaattgtagatggcagcaagcttttgtttccgactcaaggactaggtgattacccccttttgcaggcagagtagtggtcttggtagcttttgagcactctgtaaatgacccaacccaaccgtagctattagttcttgtgcttggcttttgatgctatggcctatgggctttgccacctgctatgctgggttgcaaaggtgaactcttgtaacattggtagccgagaggatgttagagaagctgagttttcatgtggatctttattttttcctggcacaatggtagataaatctacactatagcctggcgttcaggctttgtagtgatcatgcgtgccaccaaagtaacatttacattgaaatgcaagtaggctgtaatgcagacgattcagaatctgcactatcctgattggatgaacggacgacctcggttaccaggattcatgtaatttcaaacaactatgtgcaagctcatcccttcaatgtaataatacattgaagagaatttggtcccttcaacgtttgatgcccacg

SEQ ID NO: 23369 - DNA, 1228 bp, Zea Mays
cttttttttcatccagcaacacctaaggtttattcacagagttgcatgtcatcgatgggtgtcctcagcttatctttgtcagatcaaattatacaattgagactgtagaggctgagaggatatctgtggaccatgttgcccatctcaaaccatctgatggtggttcagcagcaactcagttggctgctcatcttacaggaatacacagtgccatcaagatgctcaatagcagggtccgtgttatccatcagtatcttgttgccatgcaaaaaggtgacattccaatggacaattcgctgcttaggcaagtctcaagccttgtaagaaggctaccggctacggaatcacagaaattccaagatgactttttaatggaatacaacgacactctcctcatgacttacctggcaatgttcactaactgttcaagcacaatgaatgagttggtcgagaaaatcaacacaagctatgagagaccgactaccaggagaggaggccgaggtgctttcatgtagctcacctgccatgatcctgctgctgctttcatctgtgaggatttttcgggagtagcttatgtccctggtcatttttttgcatgcaatctatcatgcgcaatcggctatacggcagctcttgagtcacttcaaactttctaggcaaaactgatgatttgctggaattgtatcagatcccacctgtgctgaagttgatatgtaaagttcctcacccagttattctatttgactctaaggctagtttggaaacttcaatcctcttcgggattagggtgtattaaaggctagtttgggaatctccttttcttaagagaaattagtttattttctcttgagaaaataagaatcattcggaaaaatgtagttcccaaactagccttaaacgtggaaattagttcatttctctttaaatccccttcaatcctggaatggatttgagtttttaaactggtgtagtttggagactcaaatccccttcgggatcttcgggattgaaggggatttgaagagaaataaactaatttccccctcctctggctagtttagaaactctaatcccctccgggattagaggggattgagggagaaattagtttacttctcttcaaatcgctttcaatcccaaaaggaatttgagttttcaaactagccctaaaagggatattaatgctggtttcgtcacattcacggtcaacaaaacttaaatcatttgt

SEQ ID NO: 23370 - DNA, 777 bp, Zea Mays
tcttcaggcatctccacaagaacagtccttgaattatttttcaacttgggcagcaagatctggagatagttctgctagtcctttccactagggaaggaatatctagagtagctgaggaagccgtggcagcaggatatgacccaactgatgaatgtgaagcactttcttcaaggttcttgccttcaatggcacaccggttaaaaatttgaagcacctagcgaccatggtggaagagtgcaatgaagcattcttgaagtttgatctggacttcgatcaggtggttgtcctggagacgaaaactgcaaaggctgcaactcaagatattctgacaacacattgtataccttcggctgcctcagaagagctgaagagctgaggaaagctaggtgttgtctgtcggctggtgagattctgcatgtcgaagagtggaagctggaatgtaacctagttgtaccaaagagtgcctagcaagtatcacatacacacaaaatgcatactgatgactgaatgtcgcattgagccacccgggtcagttgtaggataggtaaaaaaacaaaacaaagttttgcccatattccattaatctagttgacatcaacgaaatcatcatgagtaactttgcgtatccctatttgccatgattggtctgatgacacttctgctttagacatctgtggtccggttgccaagagcatgccactactttgttgtggagtactctagttcatcgaagaaaacaatcgtatctggatggcttttgcatcagttttctgtgtc

SEQ ID NO: 23371 - DNA, 2495 bp, Zea Mays
tcgtccctccccaccgtacaacttgcagcgtgctgtcgtgcgtcagtctccgcgacggcccgtgatctgccgaggatgcgccacacgcgcagttcggacgagggacgggtgacgaggtgtgcggtgcgcgtgagtgaggaggcaaggcttctccatctggcaaccggggaccggacgatcaactcatccgcgcgactccgcttcgtcacgcggcgtcgccggcctcctcccgtgcccgtggatgcctgttcttgcgagttgttaatctaccgtatcgagggggggggggggggggggtccattgcggcgcctacttacttggtggtctggcactggctggagagctctagtgtcagccagtgttcctgctgtctcctgcctcatctaggtcccctcccttcgttcagctgttcttgcgagttgttaatctaccgtatcgaggaggggaagatggacgacgaggactactcgtgggtgcggcgcaccaggttctcgcagtctgtcgtcaggtccagctccggcagggagcggtatggcgcgttcatcatcgacccgttcggtcgtggcgccaagctgaggcaggacgggttgggcacgggccccggggtctctagctcggcaaggcggctgccgatccccaaggcgagaccggcagttgcccggtcggaacggaagctgaagcacgcgtcttcagagggccaattgaacagggcgaggaacggtgatcgctcgtcgcaaggatcaccggcgaagcagagccgggagggggtcggcctgagcttggacattccacagctgcatgatgtggctgttcgaccacccaaggagagcccagacgctgcgctggatttctctttccactcggacgagcacagccagaggctccagcgagtgtgttccagcccgtctcctttctttctgcaggatgcaacagtgacagctgatgatggttccagagtgcgcagtgcatctacgaaggtgtccaagccgccgccgaaaccgaagcgaagagccaagtcccctatccccaagcgcgtcatctcggacgtgttcaaggaggcgaaagctgccaccaagaggttctccagcccgcagcggcagaggaagcccatgtccccgcggtcaccagacgacagccctccactcggcttcgcctcgctaagagcaccgagcaagctgaagatcaataccagagcatcctcatggccacgaacaaaccttgacagtggaccggcaagagttgctgcgccggagatccttgagaggtggacggtcgatcgctccgagttgctcatcggccatagatttgcatccggggcctatagccgattgttccacgggatctacaaggaccagcctgttgctgtgaagtttatcaggcagcccgacgatggcgaggacgacgaactgtctgctaagcttgacaagcagttcacttcagaggttacaattctggcaaggctccaacatcgtaatgtcattaagcttgttggggcctgtaattgcccgacggtcttctgtgtcatcaccgagtttctgtccggcggttctctgagggctttcttgcgaaagctggagcgtgaaactcttcctttggagaaggtcatttccatcgctctggatatcgcacgcggcctggaatatattcacctccaagggattgtgcaccgtgacatcaaacccgagaacatcttatttgatggagaattctgcgctaaagtcgtcgattttggagtggcgtgtgaagaaaaatactgcaatttgttaggcgatgatccaggtacttatagatggatggcaccagagatgtacaagcacaagccatatggccggaaggtcgatgtgtatagctttggacttgtcttgtgggaattggtcactggttcactcccttatcaagatatgactccgcttcaggcagcttttgcggttgttaataagaacttgaggccggctattccattgagctgcccagcagcgctgaagcttctgatcgagcaatgttggtcctggcaaccagaaaggaggcctgagttccagcaaatagtttcagtccttgaaaacctcaagacagttcttgaaagagatggaacactcgacaagatcccaggctcgatctgccaggccctggaacccaatgaccagaacaagaagaaggctggcaactggatccagaggctgtcatacgctcaacctgctttctccggacctccacccccaaagttactctagttacacgtcttcttgttcttagcagcttggtatctggtactccagatagcaagtgtgtaaattgaatatttctttgtttcgctgggagaccagagatttcttcatggtatatactcggatacagtactgataatcgcctagaggggggtgaatagggcgaaactgaaatttacaaatataaacacaactacaagccgggttagcgttagaaatataaacgagtccgcgagagagggcgcaaaacaaatctcaagcaaatgaag

SEQ ID NO: 23372 - DNA, 5596 bp, Zea Mays
ccggactaccaggggcgaatcgcggacgccgcccacctcccccatctccttccccagcacgtcgcaaacccttcgtcgccacccccgcctcccgccgcggctcccgtcgtcgcgtggccgtcgcgagccaccgctggcgtctctcgtccggttctctgagtctcggcgacctgttcctccgccgagttctcggggccctgctgtcgccaccgccgaatcctgctgtcctcgccgcagccggggaacgcggtgtgttgcgggagctggcaccgcctccttcgagaactaagtcaacagtctttatgggcttcatgctagtagatgatagttcctggcttcctgcactgcttttggaagacctgccttttcaatcatagaggattggtagaccagatcctggcaaagcaatgctgatggaccctcctgttatgcaaatggactgcaagttgaaaaatgctatggataaaacaccacaaatcgcctatgataggaagctgaccgtctcacatgatgattatgggtgggcaggctctgatgtccacctaaaagatgatacaatagtatgtagccctgtcgatcttagcgatgcttgtcaatcaggcatggatcgggtattagattctgcttccaaaaattcatctcttaatttgggcgatttatctcaggggacagaactaagagagaagaatagcgacagttcttactccgatgtaaaacttcagttaaatttaagtgctggaaattataatggcttgcaaactgatgattatagctttaataaacagagttttggtaagaaggatatgcatcatcctcaggaagagatacattcttctcccaatacaatgtcattaccaagtccatgcagactcaatggagacgtcacaccttgtgaagcggagaaaatagcagaggatcgtggcaaagtagatgggattgtagatgctgtaagtaaggaagtcaaaactgacttggtaggatgccatgcacggcaggaagaattgcaatgcacgctccaagatctatcagaaatagcctgcagtattgatttagtacgtaataaatcttctccacaagaagagaagaagtctgtttcccctttgaatgacatgggccataatgtggataacaatagttgtaatggtgataccaattataaagggcaggagctcaatatggggaatgttggagatgaggatcatgctgtagcactttgggtgaagtggagaggaaaatggcaaactggaatccgatgctgtagagcagattgtcctttacctactctaagggcaaaaccaacacatgacaggaagacctatatagttgttttcttcccacgaacaaaaacttactcttgggtagacatgctacttgttcttccaatagaggaatgtcctttgccacttgtgaatggaactcatcgtaaatggagaaagctggtaaaggatttgaacattcctcgacgattcaacatacagaatcttgccattttaatgataaatttaattgatgagcttcatattgaggctgtagttgataatgcacggaaggctacaacatggaaagaatttgccctggaagcatcttgctgtagagattacactgatcttgggaagatgctcctcaaatttcaaaatatgattcttcctgactgcataagctgtgaatgggtacaaaattctattgagacgtggaatcaaaagtgtatgaacgcacatgatgccgagactattgaaatgctttgtgaggaacttcgacagtccattcttgggaacaagcttaaggaattgcgggatgcatcagtgcagcctgaattagtccctgagtggaagacgtggaaacaagaattgctgaaacagtacttttcattacatcctgctggtaatgttggcaacttcgagaaaactaattgttacgacgatccagctttagatcaacaaggtagtagaaagcgtccaaaacttgaggttcgaagaggagagatccaaattttacacatgggtgaagctgactacaggactccaactgaggacccaaaccaaaataagcttcctagtaactctgtcatgcatgaaaatataggggcattaggagcaacaagtcaaaaaaatgctgtcatgttccctggaagttctggcaccaatgagaatacaatatctggtagttccaatgcagctttacagaatgctagacttgatttagattcattcaagagctctcggcagtgttctgcgtacattgaagcaaaggggaggcagtgtggtaggtgggcaaatgatggtgatatttactgttgtgtgcatcaaagtatgcattttcttgatcattcttcaagggaggataagacacttaccattgaagctccattgtgtagtggtatgactaacatgggtagaaaatgcaagcatcgagctcagcatggttctactttttgtaaaaagcaccgcctacagacaaacttggatgtaatgcacccaggaaatttgttggatccatctgaggtactccatatgggcgaagaacctccgaataagtgggtggaaggaatttctaagtcgcaagcattgtatagcatagacttagaaacagacaaaaatgtccaggctgttgtacaagtgaaactgatgcccactgtggctatagagaactctggtgaaaaaggttgtgcaatggagaaaactgatatgtgtgctgcgtcaacgtccatgacaaatactgatgatacttctctttgtattggaattcgctctcatgacagtattgttgaatgccaggattatgccaaacgacatactctttattgtgagaagcaccttccaaagttccttaaacgtgccaggaatggaaagagtcgactcgtttctaaagatgtctttgtcaatctgttgaagggctgctcatcaagaaaagataagatatgtttacaccaggcttgcgaatttctttattggttcttgagaaacaacctttctcatcaacgcaccggtcttgctagtgaacatatgccccagatactggctgaagtgtcgaaaaatccagattttggagaatttttgttaaagttgatatctactgagagagagaaactagcaaatatctggggatttggtacagatagatctaagcaaatatattctgaaaacaaagaaggatctgtagcgttgcaggaagagaaaactaatctttcatctggtcctaagtgcaaaatctgtggtcaccagttctctgatgatcaagctcttggattacattggacaactgtccacaaaaaggaagcccggtggctgtttagaggttactcttgtgctgcatgcatggaatcatttaccaacaaaaaagtccttgaaagacatgtacaggatgtacatggggctcaatacctccagtattcaattctcattcgatgtatgtcatgtaacagcaattttttgaacactgatctgctataccctcacattgtttccgaccatgcccaacagttcaggcttcttgatgtccctcagcgaccaagtggtcaatctgctcaacaaacagaagggatgagtggtctgcccctttatgatagccacaacgttgaggatgaaaatggctcacagaagtttgtctgcagattatgtgggctcaaatttgatcttctgccagatcttggccgccaccataaagtcgctcatatggtctcaggtgctgttggccacattccactgggccgtgggaagtaccagcttaaccgcggccgacactactattccgctttcaagaaaagtttgcgaccaacaagtacattaaagaagagcagtagctctggaatcgataaaaatttgaagtttcagatctctggcttaacatctcaaatagttgaatctgaaacatccagccttggtaagttacaggatttccaatgcttagatgttgcacaaactttattttccaagattcaaaagacaagaccccatccaagcaactttgatgttttatcggttgcccgctctgtatgctgtaagacaagtcttcttgctgcgttggaagttaaatacggacctttacctgagaacatatttgtgaaagctgcaaagctttgcagtgacaatggcatccaaattgattggcatcaagagggattcatatgccctaaagggtgcaagtctagatataattcaaatgctctgcttcctatgcaactcacggcagttgattttcttgaagctcctgttgattcccgtaatgatgatgaaatgtggggaatggaagaataccattatgttcttgattcaaagcacttcggatggaagcctaaaaatgagagtgttgttctctgtgaagacataagctttggcagggagaaagttccaattgtctgtgtcattgatgtggatgcaaaagattctttaggtatgaagcctgaagaacttttgccacatggcagttctttgccttgggaaggatttcactatatcacaaaccgtgtgatggattcatctcttattgattcagagaactctatgcctgggtgtgcatgttctcatcctgaatgttctcctgagaactgtggtcacgtgagtctctttgatggtgtctacaatagcctggtggatatcaatggaacaccaatgcatggcagatttgcatatgatgaagatagtaaaattattttacaggaagggtatccaatatatgagtgcaattcatcatgtatttgtgactcgtcctgccagaataaagtattgcagaaagggctgcttgttaagttggaactctttagaagtgagaataagggttgggctattagggctgctgaacctattctacagggtacctttgtctgcgagtatattggtgaagttgtgaaggctgacaaggctatgaaaaatgcagaaagtgtgtcatcaaagggtgggtgcagttacttgtttagcattgcttcccagattgatagggaaagagttcggactgtaggggctattgaatactttattgatgccacaaggtctggaaatgtttcccgttatattagtcacagttgttccccgaatctcagtacccggttggttttggtagagagcaaagattgccagcttgctcacattggattgtttgctaatcaagatattgccgtaggagaagaactcgcctatgattaccgacaaaagcttgtagcaggcgatggctgcccatgccattgtggaactaccaattgccgaggccgtgtctattgattttgcaggaatacactaactgttcaatgctcggttgcagaactccagagatttcaacagttgtgtaggcttgctgagcgatttagcattgcaattttcctacagcttgagtgcagggctaggatctcattgttaatgctacaaatagtgattgtgatataggactcaggcaagcattaggcaataacatagtgtcgattttagtcatggtaccatcatgtttaactgattatttgttagaagcagcctgaaatgaaactgattcaggctgctctgttcgtaggcgagaattctctctgtaaaattccttcattcatattttatggttcatgagcaccatcattgacgtgaagtaataaactagttatcccagtggcctattg

SEQ ID NO: 23373 - DNA, 6209 bp, Zea Mays
cagtctgtacccgcttgagctcgggccaagagcgccgatacacgatacggcagccgagcacactcttccccttcctgacctccacttcctagctcggccccggctccgcatctatctatctctcgccctgccgtctccggagaccggagctgctctcacatccccacgcgcgcgccctcgaccccgaccacgtcccccgcccgctcggcgctcgcacagattccctcgtccggggagcggcgctgaggtctcgcaccgatgagctcgggggccatcggggcctcggatcctgggggtggcgagacgaagccggtggcgggcggtgacgtcacgacgtcggaagctgcgggcgaggtgcctgctttcgccgccgatgtgaaagtggaggggaaagctacgttggcgacggatgtggatcgtgaagggggagatacggcggtgagcgacccgctctacgcgaacgagtcagctggtatggttggtgccgaaggccacggagatgagcccgcggagggcctggaggcggtgaatggtgaggaggagatgctagaagcaggagctcgtgatctgctcactgagacggagaagaatccggttcttgtggtacatgtgcctgctgctgctgctggtggtggttctgccattcctgaacatgctgaagccgaatctaacaaagttgaagatcatgtaaacgtggagcctgggacaaagaataatgaaagtgataatggcatagctcattttgataaggaaatacagaacaatgtgcctgatgacatagaggaaagctccaaggaacatgaaggtgatggagcacctgtagttgaccagacaaataatgcatctgaaatgctcccacaaaccggagagcagtttcctgatgttgaaaatagcacggacagcaacctagaggctgctagtctgggtagtgtggatcagggtgctagatactgcctgcctcctcatgataaaggcgggtttcaagttgctgatcttgtctggggtaaagtgaaaagtcatccttggtggcctggtgaaatttttgatccatcagatgcatctgaattggctctgaaacatcagaaaaagggcagccacttggtagcttattttggtgacaacacttttgcgtggtgcgatgaatcccagttgaagccttttgtgacaaattattcacaaatggagaaacagagcagttcagatgcctttgttgggtcagttaataatgcacttgaagaactgtcaaggcggatactgtcaggtatgagctgctcttgtttgccagaagagcttgctgataatggcatgtcctatacagttgataatgctgggctcaaggatggagttacttgctctgcagttaatcggcctgaaatcttaaactgtttcagtccagaaaaccttcttcattatattaaggagttagctctatttcctggccaaggaggtgatctgttggagttagttatagcatgttctcaacttacttctttctatcgatctaagggatgtcctgaacttgcatcatttcaaactggcgatgcgtgggttgaggatggtctggattgtacagacactttgtccacccagaatgtaatggttgaggaacctgtgattaatgaagtgcatcctactcaagataagcccaaaaggggcagggggagacctcggaaacaaaaacctggtggtgaccaggtggtgatggagaaaaggagcatatctaatcaggtcaatgatactagctacaatgagaaacaagtgggtatggactttgataactatggcaacctacagaacaagaacaaaagaaactttgaatcatttgaagattcagagaagtcatcagctccaactggtggtagttctttcaagattggtgagtgtattcggcgagctgcaagccagctgacaggatctccgtccattatgaaggctcagaatgctgctgaaggagagaatggggaatttgatatctttagtgatgatgctggtgatgaacttactgtagagaaacgagcaaaaaggagaagtctgcacaggaatcacactgcagatcccaaggaattactatcacagctatgcttggttgcaacagagccaatgaatggatataatttctcagtaatgataatcagttacttcagtgattacagaaactatattgtttctactactactgaagcaaacatcgttgataaaggtacatctaggagagggaggaagagaaaagaagttttaccttctcctgatgtagagacaacagatcatatgcaggactcgtattggtccggattgagcttgcataatcacccaatccatgacctcagaaaagagagtcccactacaaggccaagacgtaggcggagatcctcaagtcatgcatatgtacctttgtcagaacttggggagccagtacctaaaaaacagatacaagtgatggaaagatctatcatccatgttgacgagaagatgattgatgagttgaagcccactgcacttgttttgagctttgccaggtcagcttctattccttcagaattggatcttgttaagatgttcagtcgctttggtccactgaaagaaagggaggcagaagtacacagggaaacaaatactgttaaagttgtcttcaagaaacgtgccgatgctgaaagggcttttagcgctgctggcaagtatggcacttttggaccttcgcttcgaagttaccgtcttgtcagtatgccattttctctagagacacagtcagcaaacaatcctgtgaaacatcctgaaaatcatggcatggagattccaggttcaaatcagtccgaagctcctaaggattccatggaagttgacctggtacagaaaacagatgaagtagaagttgcaggagaaccgtcgtctgaagaagttgagactgtgaggcaaatatctcaagtgcaagctgcagacagtacatttgtcagtcaagacaggtttgatgaagctggaaatattgacgctgagctaattgaccatgttaatcaaattgggaaagctgcacaagctgcatctgtatctgaagagtcacgagatgttgagcaagtttacactcaaaaggaagtgtcagccaatgatctacccacagagacagaaatcttaaattctgatgctataacaaaagagttgcctcagaatgctccagataatgtggaaactgatatagtcgaagatccaaaacagagtcacaattcaagagataatgccgtatttgaagcagtcattgaagcaccgagtactgcacaagatcatacagaggaggatactgggaatgcagttccagaagagcccatggtatctcctgagttacaaagtcaaacccctggtgatctacccacagagacagaaaccttacattctgatgctatattaaaaaagttgcctcagaatgctccagataatatgcaaactgatatagccgaggatccaaaacagagtcacaattcaggagataatgccgtatttgaagcagtcactgaagcaccgagtactgcacaagatcatactgaggatgatactgggaatgaagttccagaagagcacatggtatctcttgagttacaaagtcaaacccctggtgatctacccacagagacagaaaccttacattctgatgctatagtaaaagagttgcctcataatgctccagataatatgcaaactgatatagccgaagatccaaaacagagtcacaatccaggaggtaatgccgtatttgatgcagtcactgaagcaagaagtactacacaagatcatactgaggatgatactgggaatgaagttccagaagaggacatggtatctcttgagttacaaagtcaaacccctggtgatctacccacagagacagaaaccttatattctgatgctatagtaaaagagttgcctcataatgctccagataatctgcaaactgatatagccagagatccaaaacagagtcacaatctaggagataatgctgtatttgaagcagtcactgaagcaccaagtactgcacaagatcatactgaggatgatactgggaatgaagttccagaagagcacatggtatctcctgagttacaaagtcaaacccctggtgatctacccacagagacagaaaccttacattctgatgctatgataaaagagttgcctcagaatgctccaaatagtatgcaaactgacatagctgaagatccaaaacagagtcacaatccaggagataatgccgtatttgaagcagtcactgaagcaccaagtactgcacaagatcatactgaggatgatactggtaataaagttccagaagagcacatggtatctcttgagttacaaagtcaaacccctggtgatccacccacagagacagaaaccttacattctgatgctatagtaaaagagttgcctcataatgctccagataatatgcaaactgatatagcggaagatccaaaacagagtcacaatccaggagatgctgtatttgaagcagtcactgaagcaccaagtactgcacaagatcatactgaggatgatactgggaatgaagttccagaagagcacatggtatctcctgagttacaaagtcaaacccctggtgatctacccacagagacagaaaccttacattctgatgctataatgaaagagttgcctcagattgctccagataatatgcaagttgatatagctgaacatccaaatcagagtcacaattcaggagataatgccgtatttgaagcagtcgctgaagcaccaagtactgcacacgatcatactgaggatgatactgggaatgaagttccagaagaggacatggtatcttctgagttacaaggtcaaacccctggtgagaaactagtggggcaatctgcaactgaacagatggtgggatctgaagatccaaagccgcaagccgaaaattttgttgctgaacctgttgtgctgggtgcagtcgggcaagtagaaattgaactggaatccaaaactactgttgaagtgtcaggcgaacaaggctatagtattgagcagactgttcaagtggaagctctaattgaagcgtcaggtggacaacttgaggtgggaaggcaaattccagaagatgaatctattgcttgtgcaactactgagcactctatggttgtcgatgaaactgtggaggcaaaagtggtactactcgatgagagtatagagaataatgctgctgtcataggagtagtcgaggagactgctgaaggtgaaactaaggaggaagcatcagacgagaagggaaaaatagaaaataatgaagatgctgacaaattagcaccagccgggaaggggaaaatagaaaataatgaaattataattgacgcaccagatgagaaaacagaaaataaagcagatgctgacacaccagctggggagaccaaagaaggtgaaattacagtagaggaaacagatgagaaaatagaatctaaagttactgctgaacctgtaatcggggagacaactgaaggtcaaactgcagctggagaaccagttgaagaagctagaacagctgaggacatggtagaagatgttaaggtgctagatgataaatctacagcagctgagaaacctgtagagaatgccacagttgtggcacatgagaattcgactacagttgagaatactctgaaggatgcgattgtcgcgccaccagatgcaaataccaccaacgccgaaaaaactgctattggtgccacaattgaaacacaaaatgaggacgctccagcggagaggactatagaggatacctcggttgaggcaccagatgtacaagcaggtgcaagtgagtaaaccagcttagcgatcctttgcattcctgtcagtttctgttgatatcgacgtagtttgctcaactgattctcttgtctagatgatgtgttctgtatagaaaacctggaaccactttagcatcataaggctgttaggttttaaataacttgggcatctatattttgccccttatttttcctatataaacttcatctagttgtattcgatgcgcacgtgtgagtttgtcataaacacaattttctcctatatgtcagttcagtgctcaggcgatcagtgactgagtggaagtctttgggctatctacttggatcaaatgattctggtaccatttgtcgtctgtaaccaactgtgttctcgaatccttctaccatattacctag

SEQ ID NO: 23374 - DNA, 2782 bp, Zea Mays
ctcgcagcctcgcctaccgacctgcgtgccgctcgtgtccgacccgaaatttcgggtaaacccgaacgccatcccagccattcaccagtcccgaaacaagagaacggagacgcagaagcggtggagcctccagcccgtgccgaaggggagaagccctactatgcgctcccatggccgcctgcgtgctgggcctagcacctactctcgttagcatgtggcccctccggtgcgctaccgcttgctccgccgctacagaggcctccaccacggccgctcatgcgtcgcgtcgcggcgtgggcgcggtcagctcggctctgtccggtcttcgaggaaggcactccttatcttcggcgcaattcatggatggtcttagaagcaatcttcaagtggaaaggaacctgacactttccccaaagtcaccaatgtctcgtagtgatgattcagccataacctgtaaaggattctgtacaatattatggaacctgaaagcagatttacaagatgggtgcttaatattcataacaggagacccgcttaccctgggctgttgggaatccaacatggctgttcagttggctccttctgttgaaagcaataatatatggacagctgaaataaaggtaccatatggagtgcatttcaaatatagttattttgttcgagaagaaatgagttcctcttctgatattatatggaggccaggtccagtatactccttatcaataccttcagatggccagaaaaagcaggttattattgtgaaagacctatggatgaaaaccagtctaccaggtcttcctactcctacatggggatcatggctgatggaagctgattctcttgaaggtgaactttttgatggtggaaataaccagaacattgtgaaagatcactctgtcagggatacacggaatcaaggcttatctgtaggtgatcatattatattgaagcttgggaatggcacaccattacatgcaaaactgttgtcggataatcaatctaccatcatgcacaactgtgtaactgaaataccaaatgccagttatataagccaatatggaaggcctcaagtcgtagaggagccatggattcttgaatcaattgtgtctgcaaagaaaccagttgcaaaagtcaaagataagaaagggcaaaagaagcttgtaaattataagcacactttgagtggagttagtaaaaacatgcatgaacagtatcagcctgttgaagagccatggttatttcaatctatattggaactaaatgaaactatagttcttgctgatggaaaagtagaagcaagggacattatcagaaaattaaggaaaatagaaaaacctttaacgcctttggatgagagtaaaccgactggtggtgaaccgtcatcaagagttatacttatgaattcctctgtctgcactatgcagagaattgcagtattagaagatggaaaactagttgaactcttgctggaacccatcaagaacaatgtacagtgtgatagtatttatctaggtgtagtaacaaagctcgttcctcatatgggaggagcatttgtagatattggaatttcaaggccttcacttatgagcataaagcaaaaccgagatccttttgtgtatcctcaagtttttaagaaccgaggaacagatcatgttggtgattattgtaatgaagagaaccttccagcttatgaaaacgatgatgatatgagtgacgacgaatttgcagatgaagaagctcatgatggttcatcatttccagttgagaatgttacagataacaatgtcgatgatgatgaagttgacagcatttctgtttatgacgtagacaaagatgaagaaaatgaccacatggaagatgaatatagtgagggcatactgcaaggatatcaatcagaaatttccaatgatctcaagactttatcttcaattcagcatgctttaagagaatctaatgatgacacaaatggaagcagatggtctcaagttcgcaagggcacaaaagtaatggttcaagttgtcaaagaaggattgggtacgaaaggtccaacacttagtccatttccatgcctgcgaagccgattttggatattggtttcccgtggcaacaaagttggggtatccaaaaagattactggaatagaacgcaccaggttaaagggcatcacaaaattactgcgacctcctggatttactttgacggctcgcacagtcgcagctggtcattcctgggaggaactgcagaaggaccttgatggcttgctatctacatggaaaggaataactgagcatgctcaatctgctgccttggctgctgatgagggtgtggaaggtgctgttcctgtaatgttgcacagagcgaagggtcaaactttatctgttgttcaagacgattttaatgaaaaggtcaagaggctggttgtggattctcctcgaacatatcatgaggttacaagctatcttgaagaagtcgcacctgagctctacagccgagttgagctttatgagaaaagaaaacctatatttgatgaatacaacatcgagaaggagatagacaacatcctttgtaaaaggtgctacttcattgtttctatattatttcatagttcctgttggtggattttttcattagtttttttctaaagcgcccaggagaactgcacatcaattatattaagaagatagaagaaaaatggtctaaaaatagaccaaaatacaagaacaaccacctttttttagaaacaaaaatacacaaaagaatccatctagaagtcagcctaaag

SEQ ID NO: 23375 - DNA, 7908 bp, Zea Mays
atgtccgtgcacaaccgcgcacagtagtcgccggctttgcagagatcgaccgtggtattggcaaccggtgtccggtgagggggatccacgcaactcctgctaccaccaccatcgccgctacagcggcgcatgcagcagccggcacgacgatgggggagcgagacgcgctcccgccgctgccgctcgccctcggtccgccgcatctaatcccgccggcgcccacccgcgacccgcgcgccatcgccttcctccctgacctcgtgggcttccactgggtcgcctacgctgccggctccttccttgtcgtatcccacctcccctccccttgccgggacgacaacaacaacgacagttgctccccgttcttccgccaggtcatcgacctccgcgcccccgtgtccgcagttgcttggtgccgccgcgggagcggagaggtcgccgccgctacagacaattctatacacatattccagcctgcgcccgcctcttctccaggttcgtttggatggctcctgagatggtctatcaccgagacgttcgccatcgttgctgtatcctggaccggctgcggcaatggcattgtggcagttggcgcaggtgtttccatgtgggcaagattggagtcctcctggcagctcgcttggaggtctacaccgcaggtgccgcaagcccttgtctccactacctgttccatgcaaggtcctgtcgcgacagtggcagctcttgctccagccgagggcagtgtgcctgttcttgtgtttctgaacgatgccaggagggggctggagcaagctgagcttgtgcatcctcagcctgtttgtatgatccagtggagatcctgttcgttatacccccatgatctgtctgagatcaggagagagatcctcatgacttgctgctttgatgggactgtccggctatggagtaaggatgaggtgtctaggtcgaagaagcagcgtggtttgctaatatcattcagtgtcattgcagtaatagaggtgaacaacactctgaatggagtcctcggagttgatattattgtgagatggtccatggaatctggcagcgttgtgtcaagggacgaacaaggtagattcaagttgttttcaggtgatttgagggagagccaggttggtaaatgtgagtggcttgtaagtcttggccccgggccttgcattagcttttgggctatccattgtttggatgatgtatttccgccaaggtacccacggattactttatggaaacagagcaaacttcagggctggggggattcctatgttaaatcaggtcctctaaaatctatggaacagtcaatttttgttgaggctgtcatctcaagaaggctatgctctggtccacctgcaacatgttttttgcttcatttgctggtggatgattcgtttgcttggtcaaccgtatccaccaaactgttagctgattctgggaaccatgctttaagtgattctgctaaaaatatcttgtgttgtttgactaaacctgtcaaacaagatggacataagggtagcatcagacaagtgtctgtccatccatatagctgcgaaatagagttagctgtctccatggattcaaacagaatgatatttttctggtctctgtcaactttctcaactctcataccgacaatgcatgcacctatgtatcctctatggaagctgttgtgcaaatttgatttgcgtaacatttctgaagatttcgagtactcatgtttgtgttgggcaccttctgttactcgtgataatagatttcttgttcttggatgggaaagtggagtcgattgtttcgtagttagaattcagaaagaagaggttctttcatgccagaagattttcacaatccccttccttgcagaaagcaatacagaagggccacctgacagcattcatacgataccattagcttctaaatgcagcagctctctttccaccacaaaccaaggggcacatgcatgcttcagcaatgaaatgttttcagcagtggtttatgaaggttcttcagtctttccttctggcctggagggagaatataccacgtgcatttctgtaatgccgctgaataatactgtactgcctatacaacaacatgacccttacagaactgttccaggctatcatattgctactggttgctctgatggcactgtaaaactttggaagatgacttgtgcagaggactctttgcagactaagaaagaaagacacatctgggagctagtaggcatgtttggtgctcatcaaggaccaattgacatagtttcattgtcaggctgtggtagagttattactgttggcagaaatttgaagaaaaatagcacctccattcatatctgggaagcaacaaaaatcaggggagacgggaattttctgctaggagatacactaatgttgcaagaccatattgttggtttagatggactatccttaggtgatggacgatttctacttgcagtttatctagctaatgagttacgtatatattctcataagcacccgtccttccagaatgtactacacactaagaattcaaaagaagagcatctttggagctgtattgtattatcccattctcatcatgatattgttggctttctttggggaccaaaggcaactgttgtgcttgttcatgagaaccatctttcactcttcagttcatggctagtaactggagataatgagtacatgacccagatacattcttgtcctgtagttcatgagatgttgccatgtactaacaattttaacgaagctacttttggtaaactcaagttaccagaaaatttcaacagtggaaacattgatagcaataatgtcctgctaacagaccaacatagccactattctcatggtttatggagcttgctgcacatagctcatagattgagtggaccgttggcatcatatcacccaagagcacttatccagtatctttattcaggtgaatggaaacgtgcggatgctgctctgcaccatcttgttcggtccatgaaagtgagtgaaacttcaaagggcgtgtcaaattacagtacatgccatagtattccagaacttcctttgtctgaatactttgcggcaacagtgtccaacaacatttctaccaaggggtttatgtggggtgagaatagaagtaacacaacttttaatttgttgtcaccttcaacttcatttctttacgaggatggcaatttaggtattaatactacaactagtgcatctgaaaaaccagacattgttgagctccttgacaagagtttcagcaaatatggtataagtgactcagagaaaaatcagatacttgcaatttctgatcttatggctggaatcactgatcagagccattcctctccctacaaaaatcttgacgaagcaggaagaaggttctgggttgctgtgcagttcgaacaattccatgctcttagaagatctgcagattcatccaagccaacctggccagagatgcgaaagcttggtataggattatggtatacaaatgtgtcccaactaaggacaaggatggagaagttggcaaggttgcaatatcttaaaagcaaggatcccaaggattgtgctttgctctacatagcattgaacagaataaaagtgttggttggtcttttcaagattagtagagatgaaaaggataaacgtctatatgagtttctgtccagaaacttccaggaagaaaggcacaaggctgctgctctaaaaaatgcttatgtactaatgggaaggcaccaatgggagcttgctatagcttttttcctccttggtgatgatacttcatcagcagtgaatgtttgtgcaaagaaccttcaagatgaacagcttgccattgtaatttgtcggcttattgaaggatctggagggcctctggagcgtaatctcatttctaatgtgctacttccagatgcagttgagagaggagataactggctgtcaagcctgcttgagtggatgttaggaaattattgccagtccgtcaatagaatatttggttgccatccaaagttgcttattgatcaaaatgtgcttgcagacccagaattgggtcattattgtgcaattctctcagcaaaaagtagtttcagaaactctgttggtgaagctgtatctgcaaagttatctaagctttcatttgcagtggctgcatgtgccttgaataagtgcggactacctcttgaagcactagaatgcttgtctactaactcgagcatagatggcaaggatagcataatcgcacatggtgatggagaccacaagattttttatggaatactgagccctgtctctgcttctaagaattggctgtcttcatctgtcattagtggcattgagtccaaccttaaactaactatggcttcaaaatatctatctagccttctgagaaagcactcactctgttcacaattgaacgcaccattatctgaagaaaaggtccttaatgagtacaacaatcatcaaattgaaaaactgacgtgtgatattacaacagtaatctcaatatttgataaaaggttctccctcaaatttgctgatatagctgagaagatcctaatcttttgtagccatgatggtttattgtttctagcgtatgttttgttatggggtactaggtcaccagatgttgcaactgataattatattcttgaatgtcaccctctctgcccaattgattatctgttattgttttcattcaaagagagctgcaagttttttagtcgatatgttgtcctctcctccatgtgttctgttctgaatatggaggacaccaattctactgcatgggcacttaaagagagacataagtacattgtaataagtttgtcaaattacctgaatgtcagcaggttacttcttaaacatgacaaaagtggaaattatattctggatgacaggtcagctatgctggcagttatggatctgtttgagtacattatagagttttctttttcttggttgtattatgacataaaatcattacttatcatgataaatccagtcctagctacttctgttaatggggattcctttcaagtactattagatcaactgatgcatgctatatgccacaaaaatcatgatatatcatcaagtacaggaggaatgccccatgctgcattgagtaaaacacaactgaaaaagagtgtgaattcaaatcttttagcagatgagaagtggcatttgataggcgcttctgtgtgggttcggttgatatctgtgcttgaacatcgtctaagggaattctttgagaaagagggacttgaacatgaagctggtgttagtggttcagaattcaggggtcttatcacttctgttgctgcaaagtttgttatggattccattcattttgtgtcatcttcattagtaccactgcatgcatcgttcttgaggaagaatttaccgatgaattcaagttcaagtttgctcttctggttagagtccaagttgcctcagcaactcccagtcagtgatagctatgatcacctctcgaggatttcacagctttcaaacagtgagaatatggaggcattgtttaatattttgtgggaaatatctgttaatcctgtggatgtttgtaatgcctttgtgagtgaaggagttaattgtttttccttaagcaacacgaatgtcactagatcttggaaggacataagatgtcctgtggttgagtgtgataaaattattactgaaagaagtggagaggaacatgaacacagacttggctccaagagattgggacagggattcgctgaaaaagcctcttataatggtgaagtgttgtatgaaactaaaaggagggagttgatcatacaaaaagagtttcagagcccaagggaaattctaaggagaagcggggagcttcttgaggcggtatgtcttaactctgtcaatgagaaacaagctgctattgctactaatcgaaagggccttgttttcttcaattggagtgacaagcagcataacaagagtttttcagagtacgtctggtcaggatctgattggccattagatggctgggctggctgtcagtctacacctactccaacttctatctctcctggtgttgatcttggtcggaaaaaagggtcacaacttggttcagttggagcaactacaggtttgagttctttagcaaagccaggaagagatctaactggtggtggagcatttggaattccaggctatgctggtattggggcctctgggtttgggtggggcgaacctgaagaatttgaggatttcattgatcctccagcaacacttgagaacatacattcaagagcattatcccgccatccctcattaccattgtttcttgttggttcaagcaatacacatgtgtatctgtgggagtttggtaaagctagtgctatggctacatatggtgttctacctgctgctaatattccaccgccttatgcactggcctccatatcatctgttcaatttgactgttatggacagcggtttgccactgctgcattagatggtaccatttgtacatggcaagttgaggtgggtggaagaagcaatgtctatcctacagagtcatctatatgctttgacagccacgcctcggatgttgcctatgtgtctgcaagtagatcagttattgcttctgctggatatagttcaaatggttcaaatgttgttatatgggacacactgtctccaccagctacatctcaaacatctatcatgtgtcatgaaggaggagctcggtctatttctgtgtttgatagtgatagaggctatgggtctatctcaccgcttgttgtaactggtgggaaaaatggagatatagctttgcatgattgccgcttcctttctactggaaagtccaagcatcatagagttaccactgagcatggtgtcgaggcatcttccatgcatgacatcaaatctagtacttttggtggtactgacagtgggatggtctggcatataccaaaggctcatctaggtagtgtcacaaaggtaacgaccatcccaaataccagcttgttcttaaccggaagcaaagatggagatgtgaaactttgggatgctaaaaactcccagctagtctttcactggacaaagatgcatgaacggcacaccttttttcaaccaacctccaggggctttggcggtgttgttagagctgctgtaacagatctccaggtgttgcctaatggtttcgtttcatgtggaggtgatggttctgtgaagcttgttcagataaaagatgatctcgctgcagcatatcagcgttaaaacaagcaaagagggaagaagacatgctagaaaatgcgatggatgcagttggtcacttgatatcattctattttgctttgctcattatacttttgagatgctttactcctttcaggggtggtatagcaaggaggaagctatgatttaagagcactagagcagacatctaggcaatttgacatcagcatttatacgtcgagtttttatacgagcctggtttgtggctagtcaaactgccctcagtggtttttttgaggcctgaattttcgcactttggacagggcaatgcggaccataattttttgtacatctgtacagtcaaatatcttgttttgttggccaggatgttgatggagggtgtaaagttgtaagctagaagtatggagataccaagctacaatacctttttgttacttaatacaaaagtgctgggtttagggttaatgtacaatggcagagcaaatggaccaaacaaatattgtatttggtacgggagtatgtatgcggtttgtcaaggggaccgcagtagttcatcattcaaaacaatattttgcattattttgtactgtagatttcactgtttctatagtgaagtttgaatatgagaatgtagatgagtaaattgctagagata

SEQ ID NO: 23376 - DNA, 3769 bp, Zea Mays
tctacgcatcacgttggtcgttgggctcggtctcgtccgctcctgctcttttctccgcacccagcgccgccgcgggcgattctagggtttcgtcgccggcggcaacaacctgcctgtagcgattcgacgtaggcatccctgttcctctcctccggaggcctgtctcctcgccatctcgtcggtgtagcctgagtgtgggtccacgccctgcagacccacgacgacggcctgcagatccagtccacctccgacgacctcgacctatctgcaacttgtggacagcctgcagaaacagctcgtattggaggctacacagaaaaacctgcacccaaaagttgtaaagctcaccaagaaccttgcaggataacacaagtgctgaattttggaaatggatcatgggcgttatgctccacaacatggatgggagaacaacagtgcaccaaatgggtatggtgtaattaatgagccagattttaggtctggtggatcctacaatgctaggagatctgtggatgaaggctttcctagagattcatatggaaggggtgcattctatcatgatacacatgatagaaatatgtatgcatcaccaccctctgccggtggaatgtggtctcagcctcgaaggaatcatgatgaggactatgcaactgcaagagaccatagaaggcatgacactgattatcgcaatgatggaaagcatcatgagtttgattcatacagaggagttgatagactccatgataattatcgtgctactgacaactattatgaatctggcagtcaccgtgattttggtgctgataggagcaaaaggattggaagcagagaacgggcggagtttcatggtgagtttgaagaccggtaccgcagttctcaccaaagcagggaggacagctatgagagagatcatgaatatggtcgttatggttatgattcggattatgaaagaggcaagagagatagtagctggagaagacgtgattcatgtgacagcgaacgtgaaaggagtggattaagtcgtgaaagagaggaaagcccgtacacgcgccatagccgttctcgatcacatgggcgcgatgaccgatcaagatcacggtctagatcaagatctcctcgtccgagaagtcatggtcggaaccaaagagatggcctgtattatgataatcgatttgacagaagaagggaatatgattgggatgatagggggcatggtgattcagtggctccatctgccactgttgttgtcaagggactgtccctgaagactaatgatgatgacctatataagattcttgctcagtggggacctctacgcagtgtgcgtgtgatcagggaacggaattctggcatgtctcgtggatttgcttttattgacttccccactgtggaagcagcccgtagaatgatggaagctacaggagagaatggtctcgaaattgatggcaggaatgtgttctttcagtacaggactgctgctgcaccgtgtgactggatttgtactatatgcggatgtatgaattttgcccgcaggacctcctgctttcagtgcaatgaacctcgtactgaggatgctcttccagctgatgcgacaggttccgcttcacactttgggagaaggggatctgaactaggtccaactcatgttttagttgttcgtggcttggatgaaaatgctgatgaggaaatgcttcggtacgaatttgctaagcacgcaccaataaaggacatccgccttgttcgggataagtttactcatgtgtctagaggttttgccttcgttcatttccattcggtggaagatgctacgaaagctctggaagctacaaacgggattacacttgagaaaaacggtcaggttttgcgtgtagcatatgctaaaagtacacatggacctgcatcagggggttctcagtcaaacagccttgctgcagctgccattgaggctgcatcatttgctcagcagtatgatgccataggttgggctccaaaagagtacaatcctgatgacaaacagaacaacaactctgaatctcaaaaagatggcagcacagcacagtcgggatttgtttgggatgaaaaatctggttactactatgattctgcatctggattctattatgatggaactactggcctttactatgacagcaactctggagtttggtattcatatgatcaacagactcaacaatatgtcccttgtaatgaccagagcaacactaaggcagccggggaggcggccagcgaaaacacgaaaacctcagatagtaatagtggcaaaaaggttgtgatctctgcgcctgctgccacaattaaacaaagtgagaaaacttcacttcctgacgctgttcaagctgctgcaaatgctgcactggctgcagaaaagagagaaaaggagaaggcaaaagagattaaattggcctcaaaaaatagtctcatagctaataagaagatgagcaatgtcctagctatgtggaagcaaaggaatcaagaagggcaggccgcacgaattgtccttgatgacaaagaaccagcaaattctgatgataaatttagtcattcacgtagtggaactggattctctttgaaaagcaagccaaattctgaccttgaaaatgctatgggcaattctcttggccaaggaatgacatcgactcaaacattggattctgttgtaaagcctagacctgtcagtaacagcttagggactacagttatgggtgtcataagaggttctgctagaggagtgatcaagtcagatactacgtttcacgcattatctgatgctggtagcactgattcccgcaccactataaccacaagagcaagtgggttaatgacaagttctgaggcacttataactcctgcacccttcaaaactgatgtgtctgccttagtctctaatactccatcgggagtttctgggagtggtaaacgtcggttttctgaggcaccgggacaatcccagtacagggatcgagctgcagaaagacgaaatctgtatggatcatctcatggcactgatactgttggattggattcaatgagatagggtcgatgccgtttcctcctggtgtgggtgaacgttccagtggtgaaattggcaacagcgaaaactatgaagttattaccgctgatagagcaatcgatgaaagcaatgtgggcaaccgcattctacgcaacatggggtggcaggagggactgggtctcggaaaggatgccagcggtatcaaggaaccagtcctggcaaaatccgtcgacgccagggctggactgggaagtcagcagcggaagcctgatccatcccttgaagcccaagccggggacagctacaaaaccatcatccagaagaaggccatggcaagattcaaggagatgtcttagctacactgttttatctattttattgctgcattttgtagtccgtttttaacagcatgcatttttttgtttgctcgtgtgttttttaaataaactgagccgctgaattgtgatttattatcctgaaaggggcactacatagttcgagacctggatgctttggttcccttgtgtgttagttttcatttgcacgacctatgtgcccgggtgttcataagttgatttgccacaatgtggtcgtagagtctcaacatcaggtcatatcacatatcgtttttttaaacggtgagcatgttttctccattattactggatgaagagaaaggttcttcttggtttgagggaagggtgatttaagggattaagattctttttagaaaaatac

SEQ ID NO: 23377 - DNA, 2477 bp, Zea Mays
tgcatctttgttgggatcctggctctctcttttgccttctccgttctccccttcccctaaaagccagcagcgagtagataaaagctcgggtcggttgtggtgagtggtgacactggccttcttaccctttgcttctcttctctgccgctagggaggcgctgacactgttcctcttccctcctcctgctctctccccatgtcctcctcctccggtcctcggcggccatgactgctgcggcctctttcgtccgtgcctgcgcgctgcatggctgctgccagctctagatacacactcctagctaggcagctgttgccttcacctgctgccgcgcgctgctcgatcgactgcacgtcttcacagttcacaccacagagtagagtggagagagaaagccaagaagccggcaggggagagtagggagagagagagggggaggagtcgtatgatagaaagaatctggaattgctttccctctcgttttgtcccccctgcgcctccttgattattgtgttgcttgctgttcctccctgcctgcttgctccctgcttcggcttggaggccttctcatgcatcaacctccttagcatctctctccccctctcccatacatacccccttgtctgatgcctgcttctgcttgccccatcctccttcatccttcacgagttcgtctctcgatttattgtctgccacacctcccttcagctagctatcttcccctagctagctaggtaccagtagtgtgtgtatatatagatagatttatagatatagacacacacaacaagtgcaagatcaggcgaaagctactagccgcccttgcagtcttggactccattcgtcgtcgtccttgggttctcctcctcacctagctactatgttccaccatcagcaggagctcttgcaggcagaagctgcagcggcagatcgggagagcagcatgtccaacctcacctcctccacgtccggcggccccaacgcggcgcctgctgctgctgctgctgccccgccggcgcccgcggcctccggcaacaacaagcggaaacggagcctcccaggcaaccccgaccccgaggcggaggtcgtggctctctccccggcgacgctgatggcgacgaaccgtttcgtgtgcgagatctgcgggaaggggttccagcgggaccagaacctgcagctgcaccggcgcggccacaacctgccgtggaagctgaagcagcgcggcacgggcaaggaggcgcagcggaggaaggtgtacgtgtgccccgaggcgtcgtgcgtgcaccacgaccccgcccgcgcgctgggcgacctcaccggcatcaagaagcacttcttccgcaagcacggcgagaagaagtggaagtgcgacaagtgctccaagaagtacgccgtccactccgactggaaggcgcactccaagatctgcggcaccagggagtacaagtgcgactgcggcaccatcttctccaggcgggacagcttcatcacgcaccgcgccttctgcgacgcgctcaccgaggagagcgccaaggccatcggcctcaacgccatggcggccgtgccggcgcagcaccaccaccacccgatgctcttctcgccgccgcccacgcacgtcatgcagcaggacgtcgccctcctccaggagcaccaccaccaggaggtcatgcagcaggagcactgcaactacgccatgaagacggagatgccgccgtggccggggatgacctacgaccacccgctgctgcagccgctctgcaacgccgccgcaccgcagagctcggccacgtccacgccgccgccgccgacgacgatgcagcttcccgctgcctacgcgcacctatcggccacggcgctgttgcagaaggcggcgcagatgggcgccaccgtcgccggcgcgggctacacccagatggcgggggccgcgacaagcgccaccttcggcctcggcctcccggacctgcagaatacccagcagcagcagcatcaggacggcgagatcatggccgggctcgcgaggacagcctcccacggccgcggcggcgaggaaggcggcggcggcggaggcgacggcatgaccagggatttcctaggcctgcgcgccttctcccaccgcgacatcctcggcctcgccggcttggactcctcgtgcatgggcgccatcatcagtgccagcgccagcatgaactgctacgacgagccacagcagcgtgcacaggctcaggcagagcagcagcagcaaagcagcaacgagcaatggcacagcatgggcagccatcaaagctaggtcgataaaagctactttcttcttcctctcgccagccgtcatcggatatcatctcatgcatgtggtaaccacgcaagcgatcaaaccgttccgatcaaactctagcccggtccaaggatggtgatgacagattggtgatacagaggattcacggagcgagagcgaatactggaactggaaaggtcacagctg

SEQ ID NO: 23378 - DNA, 1626 bp, Zea Mays
cacagggttcgcgccagtgtccatcgactcctgccactcaggcactcacgagaggcagttgtacactgttcgtgatggcggtaccattgccttagattggttactagcttctgatcttgaagatggagatattggcacttctgacggaaccatttctaaggatgattcaacaccccttcttgttgtgatacctggattaactagtgattctagtgctgcttatgtgaagcacttggtcttttctatggcaatcaaaggatggaatgttgttgtaagcaaccacaggggtcttggtggcatctccataacatctgattgcttttacaatgccgggtggacggcagatatgcgtgaagttgttagtttccttcatcaagagtatcctaaggctccactattcactgttgggacaagcataggtgccaatattgtggtcaagtatcttggagaagaaggtgaaaacacacctgtagctggtgctgcatctatttgttctccctgggatctgctggtgaccagcaaatttatttcacgcaagcttgtgcagcgatgttatgacagagcccttgcgattggtctaaaaggatatgcgaaactacatcaatcagtcttggcacgacttgcaaactgggaagctattacatcgtcacactctatccgggaattcgaccgccatgccacttgtgttgttgcaaaatacgagacagtggacacattctaccgcaagtgcagcagtgcaaattatatcggtaatgtgtcagttccactgctttgtatcagtgccttagatgaccccctctgcacaagggaggccattccctgggatgaatgcagggcaaacaaaaacattgtattggcaactacacctaatggcggacatcttgctttctttgaaggcctaactgctggaaagctttggtgggtacgacctgtttccgagttcctctgtgctctgcatgatggcccctacatgcatcggcagaaggcacaagggcacgatttgcactcatcgttggaatcatcaattgacaagagcccatatgtgaatttcatggaagatggaatggtagctgcattaacagatgatggtcctaacaacggtgactccttgcttaacgaggttcttggtgaaattgaacctaatgatagcgtggttgtccaacacgtaaaacagaaccaaaacaccagagctatacaaaatgagagtgacagttggttggatgataaaaacagctccgaagggaatgttcaagcccatggaggaactcaagaacagagagaagtgccatatgcgaataaaatcagtgatgccattggtcctgttaagaaatcaataaaccaactcagtcgatcccagggtaagtcaatctggttgcttgcttacattgctcttgtaacctcttggccgttgcttggggccctaggttttttcttcaggaaaaggttgagtaattctctgttatctaggaagctgaagaaatcgtgaacactgtgctaacacagatttatttggtatgtaagagcatgtacagtgatgtttaatatagaggctcttgagattatctaaagagagcatttgcaaaaaaaaaattgtggagctgtctctatgtgaagagacgcctttag

SEQ ID NO: 23379 - DNA, 6361 bp, Zea Mays
ctcccctctcttgcccaccttgcttcctcgccaccaccactttccccaccgctgcggcactagtcagtcagcaccagcaccttcgtcaccctgcgcttgtgcgcggcaacaccaacgcgcgccgtcgggatcggcggcaccgctggaaatggcgagcgccggcgccggcccgtcggggccggtgcggtccatatcccaaacggggcggtcgcggacgatggggcgtatgcccacgcgcgccttcaccatacgtccggacggatcctccggtgaggacggcgtcgatatcgtggaggaggagctcgtgccctcgtcgctcgcgcccattgtacccatcctccgcgccgccaacgagatcgaggaggagaacccgcgcgtcgcctacctatgtcgctttactgctttcgagaaggctcatcatatggaccaaaactcaagtggacgaggtgttcggcaattcaaaacatacctcttgcataggcttgaaaaggatgaacatgagacaaagcgcagtcttgctacaactgatgcaagggagatacagaagttctatgcgcagtactgcagaaaatatctagaacaagatcatgataagaggaaaccggaagagatggctagatactatcagattgcgtccgtcctatatgatgttatgaaaactgttacacctggcaaaaatgagtatgatgattatgctaaagatattgaaaacgaaaaagcatccttttcacagtacaatattctaccccttaatatttctgctcgagaacaaccaataatgaaaattcctgagatcaaagcagcagtgaagctccttgagcagataaatggccttccaatgccaaggattgaattaccacaaagctctgacagaaaaacagtgtccgacaaaatggacagacctgtggttaaggatttgcttgattggcttcggcaaacatttggatttcagaaagacagtgttgcgaatcaaagggagcacttgattttgctccttgcaaacattgacatgagacaacagggtactgccgatcatagtgagagacatgttcacatgatacgtagtagcacagtgatatatttgaggaacaaaattttccataattataactcctggtgtcgatacttacatctggagtcaaacattaggatccaaagggatgcccccacacaacagccagagcttctgtacataggactgtatttactgatatggggtgaagcttccaatgttcgcttcatgcctgaatgtctttgctacatctttcaccatgaagcatgtaagcaactagggagcattattgttaaacttcaggagagtcatcaacccaccacaattaagtacatggtttttgaggtgctgcaatgtcctgtggcgcaggggatggcaagagatttacatgacataatatctgatacaagccaaggatcatttgagccaccgttccagggagaggggagtgacgatgcatttctgcagctagtgatccaacccatctatagtgttatgcagaagctgcaaggagcaaacgtggtaaggtgagccactcattgtggagaaactacgacgacttgaatgaatatttttggtcaaaaaaatgcttcaaaaaacttggatggccgatggatccaacagctgacttttttgcagaacctaccagagccaagaatgaaactgagcaacatggtcacgtgattaggagaagaagggcatcaaaaacaaattttgttgaagttcgtacatttttgcatatgttcagaagttttgatcgtatgtgggccttctttatattggggttccaggccatggtaatcattgcctggagcccttctgggtcactttcttctatatttgaaccaaatgttttcaaaaatgtattgacaatctttataacagcggcatttctgaacttccttcaagccacgctagagttaattctcaactggaaagcttggaagagcctggagtgctcacaaaggataagatatatcctaaaatttgctgtagctgttgcctggttgataattcttcctactacgtactcaagctctattcaaaatcccacaggccttgtgaagtttctcagcaattggattcaaaatttgcagaatgaatcaatttataattatgctgttgccctttacatgttaccaaacatattcagtgccctgtttttcatgtttctaccaattcgacgggccttagagcgctcaaattctcgcattattaggttccttttatggtggacacagccaaagttatatgttgctcgaggcatgtatgaagacacttgctcacttcttaagtatactacgttctggatcctgctgcttatatgcaagctcgccttcagttattatgttgagattgctcctttagttgaacctaccaggataatcatgtcactggaaaggccgccttatgagtggcatgagttcttcccaaacttgcggcataatttaggtgttgtggttactgtatgggctccaattgtcatggtgtacttcatggacacacaaatatggtatgccattttctccacaatatgtggtggagtctatggtgcattcagccgcttgggtgagatacgaacccttgggatgttgagatcaagatttgaggcaattccaagagcatttggcaaaaaacttgtacctgatcatggcagtcacttgaaaggagatgaggaggacaaaaacccacccttcgataagtttgctgacatatggaatgcatttattaattcattgcgagaagaggacttactaaacaatagggagaaagatctattggttgttccttcatctggtggtcaaacaagtgtttttcagtggcctcctttccttcttgccagtaagattccaattgcacttgacatggcaaagagtgtcaagaaaaaagatgatgaacttatgaagaggataaagcaggatccttatactgagtatgctgtaatagaatgctacgatacattattagatatcctttacagcattattgttgtacaaagtgataagaaagttgttgatagaatacgtgaaagcatcaaagatagcatccaccggaaatcactcgtgaaagaattccgattggatgaacttcctcaactaagtgctaagtttgataagttgctaaatctactgaaggaatatgatgagaacgatcctgtaaatagaaacacacatattgccaatctgttgcaggatataatggaaatcatcacacaggatattatgaaaaatggaaaaggtatcttgaaggacgagggccaaaaacaacaactgtttgcaaaattaaatctggattcattgaagcatgttgcttggagggagaagtgcattaggcttcaattgttgttgacaacaaaggaatctgccatatatgtaccaacgaacttggaagctcggcgtaggatcaccttttttgcaaactcactttttatgagaatgccaagggcaccacctgtccgtagcatgatgtccttcagtgttttaactccatacttcaaagaggaggtgctcttttcaccagaagatcttcataggaaaaatgaggatggtatatcaatactgttctacctacggaaaatatatccagatgaatttaggaacttccttcagcggatagattttgaagtgaaggatgaagaagaacttaaagataagatggatgagatctgtaattgggcgtcttataggggtcaaactctcaccagaacagtaagaggaatgatgtactacagaaaggcacttgaaatccaatgccttcaagatatgacagatcctgctaaagttgaccgagacagatcaataggatcctaccaagagttgcaatatgatattgaaatggcacaagctattgctgatatcaaattcacttatgttgtctcatgtcaagtttatggcatgcaaaagaaatcaaaggatttaaatgaaaaaaggcgctatcagaatatcctcaatctcatgataatgaacccatcactacgagttgctttcattgaggagatcgaaggtctaaccagaaatggagcaactgagaagacatattgttccgttcttgtcaaaggtggtgaaaagtatgatgaggaaatttaccgcataaagcttcctggcaatccaacagatattggagagggaaaacctgaaaaccaaaatcatgccataatcttcaccaggggagaagcacttcaggccattgatatgaatcaggataattatattgaggaggcgtttaaaatgagaaatgtgctggaggagtttgagagtagaaagtatgggaagagcaaacccactatattaggcttacgtgagcacatttttactggaagtgtttcgtcgctggcttggtttatgtccaatcaagagaccagttttgttactattgggcaaagagttctggcaaatcctctcaaggttcggttccattatggccacccagatatttttgatagactcttccatatcaccagaggaggcataagtaaagcttcaaagactataaatctgagtgaagatatattttcaggttttaattcaaccatgagaggaggaaatgttacacatcacgaatacatgcaagttggtaaggggcgtgatgtggggatgaatcagatttctagcttcgaagctaaggtggccaacggtaacggtgaacaaacattaagtcgtgacatttatcggcttggacgcagatttgacttctacagaatgttatctttctattttactacagttactgtacttactgtctatgtgtttttatatgggaggctttatctggttatgagtggtctggaaaagtctattatgctggatccacgaaatcagcagaatgtcaaggctctcgaaaatgcactggcttcacagtctattttccagctaggtctgctgcttgtcctccctatggtcatggaagttggcttagagaaagggttccgcacagcattaggagagtttgtaatcatgcagcttcagttggcatctgtgttcttcacattccagcttggcaccaaaacccactactatgggagaacaatactccatggtggtgcaaaatacagaccaacaggtcgtggattcgttgtgtaccatgcaaagtttgctgaaaattaccgtatgtactcccgtagccactttgttaaaggactggaactcttgatacttttggttgtatatctagtctatggaagttcctatcgcagctcaaacatatacctatttgtcacctgctccatatggttccttgttgcttcatggctcttcgcgccatttatcttcaatccatcatgctttgaatggcagaagactgttgaggactggacagattggaggaagtggatggataacagagggggaattggcatgtctgtggaacaaagctgggaagcctggtgggtaactgagcaagatcacctcaggaagactagcatccgagcttttgtgttggaaatcatcctttcacttcgatttttgatctaccagtatggcattgtctaccatctgaacatagcagatcaccacaaaagcattatggtatatggagtatcatgggtggttatgctccttgttcttgtagtgctgaagatggtttcaatagggcggcagaaatttggaacagacctacagcttatgttccgcattctcaagggccttctcttccttggttttgtctctgtgatggcagtcctatttgtcgtcttacaccttactatttctgatgtcttcgctagtatccttggatacttgcctactggatggtgtcttcttctgattggacaagcatgctcaccattgattaggaggaccctgctgtgggactccatcatggagctcggaaggtcatacgagaatataatgggtctcgtcctcttcctgccaattggtttcctgtcgtggttccccttcgtctctgaattccagacacggctgctgtttaaccaggcatttagccggggcctccagatctcaaggatccttgctggtcagaaggatgttagcgagttcgagttcaagtgaccaatttcatccctcttgcaagcaaaccaaactcactttcatgtatttgtttacgatgatcgattttgggtgtctgtactctagtatattttcatcacgtttactactataatactgtctgtacttgagaatgttttgcctctgtaaactgacatgtagaatttctgtaatatatttatggaatttgataacttccatccatgcactgaacgctttgaatggaccattattactaaaggggtaacaaatttatcattgtaaggtcaaacatgtttgggctggaagttttgctattcaatactccaaacatgtttgtaagtgttagatactcatttaaggtttg

SEQ ID NO: 23380 - DNA, 2070 bp, Zea Mays
tcgcggttctaccgctccgctcatgcccgcggccgaaccctcccccgcatcccacagccgccgacgctcaccttccatcctccccgcagcccgcagccgccaacgctcaccttccatccccgcggatcccacgctccctcgggcgctccttccgcgcccgcccacagatctcccatcgacgtcgatgctctgcgattaagcccagctaaactcgcgcggtttggctttggcgcagcgctggagctctcgagacgctcgcttggcgccgaagcggacgaggagcagttgtcggcgtccgctgccgtgtcctcagctccgccatctccttctccagctcgacgatcctctgcttcctgctcgtgaactccagcgcggcagcgtcgagctcggcgcacagccacccgttctcggcttccacccgctctgcggtgtccctgcacctctggagctcggtcttcttggccgcgagctcggcctccaggactgcgccaaagccaaactgctactgctacaactccgccgtgctctccatggaagcttctgcgcctagatcaacagcgttcggccgctggtgcccggcgctaagctccacgccgtcatcgagcgtggcacagtgattccgtcctcgacctccccttcctctgcaacatgtccaggaccgggaactagtagtgggaggatcaccgtccaccgtcgagcgtctgcaaggcaaatcagatcaaccaccacatcggagtgaaaagtctgcgccactctgcctcacacagccaaaaaatgtatcaggtgattaagaaccatcccagctcattgaagctttatgagcagaaactgctaggaacgagtgaagtcatgaaagaagatgtccagaggatccatgacaaggtgaaccgaatcttgaacgaagagtttgctaagagcaaagactacgttcccaacaagagggattggctctcagcttactggactggctttaagtcaccagagcaaatatcacgtgttcgcaacactggagtgaagcctaaaatactgaaacgtgtaggtcaggcaattactacactgcctgaaaacttcaaaccacatagagcagtgaagaagatttttgagctgcgtgcagctatgatagagagtgctcaaggaattgattgggctgttgccgaagccctggcctttgcaacacttatagtggaaggcaatcatgttaggctaagtggacaggatgtggaaagaggaactttcagccatcagcatgcagttctgcatgatcaggaaactggagcaaagtactgcccacttgaccatgttgcaatgaattaaaatgaggagctatttattgttagcaacagagactagttggagcttcattgttgatttttgcaaataagcaagacatgcaaggagctctaaaaccaactggaatcacgaagattttacttagttcgatgtgggagcaaaaggatatgccaaattgaatgtagtttcatcaattatgctcaattatggatgttcagaggcatccaatttcagtgtgtactgcaatacttgggtccacctgtacttggtttaagaagcgctccgcggacttccacggccgcgccgccgatctcgtccacggcctccggggcacggcgatgcccaggagacaggccctcaaggaagagcagtgcagagaagagaaaggtatctcgactattccaaagcacaagtatgcatccaaagcctgttccccaaaaggatcgaaaggaacttcaacctgaaccagcgagagtatcgatacaaagactgtttgaaatcttctagaaatgacatcgaatggaacttcaagctgaacaagcgaaagcatctatacaaagactgtctgaaatcttctaggtaacaacagccatgacttcgaacatattgtattctaccttttcagattttcttgtttttaatggtatcacaattattgtgctattgtgaataaaccacttgtaatgctgttttgctcagttttttcgtgttgtacataaatcattttatatttatactgcgtcacaataatttactgatgtgcaaatatgatattgcttt

SEQ ID NO: 23381 - DNA, 3008 bp, Zea Mays
agcaaagccaagagcccaaaaaagagacttcacagctctctctctcattctctcctccgctgtgaaaataggagttggagtaagagcactaaactactactagtagtatttagattacaaacaaaaaatcaaccaaagtacagccccaaataatccccggcgacagcggtagctagctccagcagctctcgtgtgacaggcacggaatcgcggtgtagctagctccggttccaaattgtgcagttcgtgatctcgactcccagccagcttgattgctgtccgtctctatccggccggtttacatcccagcttttgagaggggaggtggttttctacggaagcttcttctaaccgcgcctctctctcgctgtcaagagctctcgatccgccctggttcgcactccactctgattttttttactcgttttatttgtttatttatatatatgatatcgtgctttatttccttccacgtcatacctgtccgccatctactagtagcatacagatcccaccttagttcataccaacgacttgggtgcgtgtacgtgtgtattcaatctatcgcgcgtgtgaagtgcaagcgtctactctactcgcgattagctttccatgaatggtcttgcgactagctttatgagatagagagagaaaaaggaaacaacctgaaaggcagaaatggttatttcgcgctaaactcacttgagcataactctgacggtgatgctagatggtagtagcttattagcaccagcgagcgcaattattatcggtgatggcagcacagctcgggggttcatctcctgtcgttctattcctttcagctaagctaatccagcaggttgagtgagcagcaagccttagatattcgcccgtagttttcacctctctctctctcctcccctgccctgttacggatcgcactaaagcatgcacaagcacaacacaacagctcgcgtctgctagaacagtctaccaggagctagctcgatgatcgagtggcgaatgaaggcacaagtcctcggtggtggcgggccccagagaccatttgctttcgcgcccttgtcacctagcagctagcagcagagggaggaaggacaagcccacacacaagctctcttcttttctctctgccgtctctcctccttcgctgccgtttggtgctcgtgtcgcgtgtggctgcgctcgtatatagcgtagctttctaggatcccaccagcagagtagcagtagcaggcgcctggtttccggtttccctgcagtgaaggaagaggaagcccaaccccaaggacagcagcgtacaatcaggctgatgcttgttggaactcagctgttgatgcttgtaagcctcgctgcctggctgcgtcctgtgctgtagatacgagatcccgcagcgttcgtttgttgcacttgcaccggcttgctgctagcttgcgacaggactaggaggagctagccgaggaggaggtgtgtgactccatggacgcgggccagcaggatgcgtgggactgggactgggaggtcctgctgccagaccacaggagctcatcctccgtgcgccaccaccacggcagcaacaataatacccttgacgatcaagaagaagcagaggagctcgacctgctgctgcctgcgccaggaggggacgacgtcgttgacgcgcacgacgacgagtgcaaggacatcggcgtcgtgccggacgacgaggccaagaagtcctcctccgtcgcgcctagcgctgccgccggcgatccgacgatggcctcctccgagggcgccgtggaagcgaaggagccgttccagagccctgatgacgccaaggccaccgccgacgacggcggcaagtttgctgcccagcagcaggaggaggaggagggggaggacgaggaggaagatgccggcaaggaaaacgacgacgacgacaaggcggcgcgtgcgccgcagtgcgtggtgttcagcgtggggaagctgaaggtgaacgggatcggcgcgctgtgctcgttcggcgtcgcggccgccaccctctgcgtgttcctcgtcggcggcaggcagcaccacaggcggcaggagcagcgggaggagacgatccagctgcagttctacggcgacgataaggttcgctgacgactcatttaccggctaccgccgcgcgcgccttttcctttccacctaatatccatccgcaatctctctcgatcttttacgaaagcagtattcttttgagcaaatagtagttaattagtcgggcatgaagaatgcgagtgcgaggtctgagtaattaattaattaattgttacggtctaccttgggcgttagtatttgtctgtcgtcttgtctgacgcaaacagatagtaactccttaccactagctagcagatcgtttggacccagctgcttgttgtacgtgctacttgttgtttctttgattgacaaacgaatgaatcgatgacagtaactgattctgtctgaagaagatgcctgcttgcctgccgtgcctgcctctttgtgttgtgtagtgtgtgtgctgatgtggtgtgcatgcagaggatccatcaggtggtgcagcagacgtcgaggctgaaccaggccatgtcgtccgtgatgggggcgggaggaggcgcgtccgcgagggccaacatatccttcggtggattctacgatggattctgacggaacactggggaacagatgggtgtagctagtatacactgccgcgtactactggtggacgatgtaaataattattgggggctcttattattattattagaccttggtttaatgctacacagatacggacggacggatggatgggttataggtttattcaagttgatagtaactaaggggcatagggaagtcttaattagttgacaagttattagtaactaaaaacgtcgaaccatgcgtgcatgctcctcttgggtttacatatatttgtattcattatatattaatgaatgatctgtgtgcatgcaataaaaaaaaagaaaaaaaagagaaccttt

SEQ ID NO: 23382 - DNA, 163 bp, Zea Mays
tctcaactcaacggcgtcagggaaatagctaacttgtggacgcttgattggagctcggatttgccaccgccgccgtcgggattcctcggcgactgcacttggttgcgggtgaattgcgaaggcggtcatcggaagcgaggttgcggcaagtggacctttcggt

SEQ ID NO: 23383 - DNA, 5066 bp, Zea Mays
gggtaccataaataaatacctttgtttccgccaattattcgataaccaagaacaaaccattgttggacgcgttcccctcctgcacgcaacctcatctcgtcctccagatccaggatggccgtcctccttgagaccttgcctccccgagtgctctcggtgagctactttgtttcgatttatcaggaaatccgtttgcttcatgttgtgcaggctcatatctgattgctggattcggcaaacccgcgttggatcctgtatcgatctggagaaatcgcgaagtcgtcgtcgttcggttcggagcggatctgaggcgacgatagatggaggcggcgggatctctcggtctgcagtcctgctccacctcgatggatgatgtctctgcgctgataattattggatcaatttcgataattattagtagatctatgagatatgccgcctggaagaggcgaggtaagctgcagcatgtaaaaaagagaaaaaagatgtgacatcctagaggaggaggcctttgccatgatgggtgcgctcgcatggcaggccaggcaataataaaaagatgattattgcgtgccgggggaggagatcgcacgggggttgatgtttttggccccgggttctcctccctcatcttgttccgtgttcctgtatgcgttgcttccgctcctgttggtccgctacgcacgccggatttttgcatcgagcacggagatctacaacaaaaacatggagctacgacgcgattcccaagtatgatggattccactattcatcaaccgaaattatggcgcgcttcaatcgtggctacgctgatggggaactgatccgttatggtgtgcttggatcgtggctgtgtggagatgtgtggaactcattggttataatggtgatgctgatggaactgattttgctcccgttggacggcctgattggttactttgccctgttgactgtttgagaacgtaccgcccaggtttacttatacttactgctttttgacggtactgtacatacagttcgacaatttatttattggcagttcaattcatccatttagctaggggcacgagagcatgagttcccctggagatcaatttcatgttgctttttttttgcgaagttccattttctattttcaatttgattagggctagtttgggaacttattcttccaaggtttcctaaggaaaattagttcatttttttttttgggaaaatgaagtttccaaaagggtttcaaatccatggtggtgtgggaattgattgcagtaaaggcgatgggtaagctgataccggtgggttgagaattagaccatcagtagcttactctttcccatatttaaactataatctacactacaaaatagtgcaaaaggtgttcatagtgacctatgaataatataatctacactacaaaaatagtccaaaaggtgtttgtagtgaccatatatgggtgtacattgtacctttttacattgtatttgtagtgatcatatatgggtgaactactgtacttttttatattgtagatcgtattatttatagtgtgcagtttgaatataggtaagctgatggtcttattgcctgtcaagttcatatataatagttttgggattaattttttttgcgtcatagaaattcataagcatgtgagtttatcacatatatacatcagaatattaactagaatatatttaaaattggtttcgttcatatactcggaattgtgcccagcgggattatataatttaacaaagaacatggtacagaattataagccgtgactttataccattatattaaacgtaattgggaatatttaaattgtttttcattctaattgactgcattttgtttaagtctcaagggtgccgtgcttttaatctagggcctaaaattgggtgattaaggggctgtttggttcgtggtcatactttacctaaggttagtcgtttgaactgaaaaactaatcttagtcagaaaagttaagcaaagtgtagtaagttagtcatcaaaccaaacaggctctaaaagcaagttaaaatccaccggaattgactgcattttgtttgtcttgttttcatcaatccaccggaattcagtgattaaatctcgcaagttaaaatttttcttaatttgctcaatatttttcagcgatatccgttcttttgaatgggtctattcacagaaggtttggttgtgaacacgaatattcaattgatatatgtgtactttttaaaggtattttatggttatttaaatgtagctgcgtctgctcgttgaggtgtggatctttcctcaacacggtgaggtcatccgtttgactgctagcctaggcgtgctgtcccggatggatggtggttcaaatccaccaagattctttagtagtcggaacttattgctcaccaaagaacttaccattgctttaggatgttttatttttgtatataggcttagccggttagggcctgtttggatcagtttataagaaactgttttttgaaaattgaggtggttccaaatatatcactagactttcaaacagcatcttagttaaacaggaccttagttttgatacgaggcctgcactcagcccggcggcgatcaaaatcgaacgtgtgggatctctgatatttgactaggtctggtcggtagcaaaccaaacatgtaagaatttgtacatatactcaacgtcttagaatttgcagtttagagaacagagagtttttgtttttgtttttgcttagttcacgtctctttcatcgaagtggcttctcatttttgcctagactctttattttacaagtaagaatttcttcctagatttttatgatccacgggaatttacactgaatcttttgtcagaaaaatgcaagaatttcatataatccagtttatttttattttttgataataaaatttctctagtaaaaaaatgttgtagggcctaggagttctataatttataattcataccgaattatcagcaatctcctttatagaagtgatatatgtagaaaacaaaaaaaaaagatggcattcacgttttctagaagtggtgataatttgaattttgtccaaagtcgtactgacatgttccgtgcgaaagggcgttctcaatgggaagaggaaaacactgtttccaaagctaccatctcaaaaaacactaaatctcgtatttttctttattaaattgtatattgtgttatcttatttgtttacgtgacgtattattaataaaaataaaactcttatgaaactcctattaagaatgacttcatttagagtaaaattataaaaaatttactaacatttatgatattaagtataattattataataatatttttgtttatagtaaatctacttaaagttaagatacttggaggctctttggatccaaacaagttcagccaaagtgactaaaatgacatatttttattattttagtcacttttaactagcttggaatgtgattgaactttattaatgtttgttttagcacctaaacaggctcttagatcatggctactactaatagttaactactagctaatatgtcataactactatgtaactactattacccctattaggactagtttaggaacttcattttcttaaggaatttctatttttcaagaggacttggataaatgaggttcccaaactagtccttaacaaatttcactcgactagtaaaatagtactattattagctactagaaaaatattgctaacaatcagttaaactattagcaacatgtatttggattcaagaaaataattatgagtagctaattagtaattactatctttcttgaacctaagtaggatcataattaataaaaatcctatagtttttagagagccaagataggatcataattaacataaataatgtagtttaattttttgatagacagtactagggcatgtttagtttcattgtgctaaactttagcatcacttaaagagataaagtgctaatgtatgttaaactttagcattttacttttaatatcttctagtatattttagcactcatgtttggatttacaagagctaaagtttactaaagatgtagtgctaaactttagcattatggaatcaaacatgcccttagagtgtacataataagaactgcacattaggccttagactgccttcaacaactaccttattttattctatattttaaactttactctgcaatcagtataatccatagtataaataataaatctcttattttacatgatctagtgtacataataagaactgcatattaggccttagctatcttcaacaactatctcatttcattctatatgtcaaattttactctgcaatcagtataatctatagtataaatctcttattttacatgatttgttgtggacaatctttacatggatggcacatggacctgagacaacattggacgacatgtgaaactttctttggacaatattggacaacaggagaaagctagaaggagcatacaaatttgaattctgcttcttttccaacattggataatatgaaaaacttagaagaaacatagacataggattctacttcttttccagtttttttgtgctgaaccctccaaccaactgaaggctacaaatactcctctgtttggacgagggtgaacatgagcttagacttgtcctcattcgatttgcaacgtctcgacaacccttgcacgatctgactctactgttagatcgtccgtacccatagtttatccaaaagaattattttacacggtatgtactgttatgtgttgtagattatattgttagaaaagtgaagtttgaatatataggtatagagatggataaactgtcatagatttagtcttagaggtacaacaccattccgttgcaagcctctgcctcaacaacttgtgccatttaaaatcacttgtcgtctctaccagtctgcctcgtgccatgtaaaaatcacttgccaagctgtaaattagacagttgtactatcatcttttgccaccgccttcaaaattgtatacaaggaatatatatatagtgaattcctta

SEQ ID NO: 23384 - DNA, 1384 bp, Zea Mays
tcgtcccgatgccatatggatttctctatcgacacagttcgcaataatcaactcgtttctctccgattgctcctccgagtccgagactccgttctctcccgcatccaccgccgtctcatccccaatccgagcaacgcctcccctcgcctccaaaaccctacccctcctgtcaccggcgggggcatgaaccggtgatcgcttacctggtctcgtctgtctgcgcacgcgcgaggtcagtgagtgagcattgcggtggtccgatcgcccgcggggggccatggcgtctgtggcgggatcgggcggcggggcaagcgcgggggccggtgggttgaagacttacttcaagacccccgaggggcggcacaagctgcagtacgagaagacgcactcccccgccgtcgtgcactacaaccacaacggcaagaccgtcgcccagatgacggtggcatatttgaaggagaagccagcaggccagggttccacgccttcaacaccaagtgctggtagtgggatgcggtctgcagctgcgagactgcttggcactgggaatggtagccggacacttagcttcgggagcaatggtaccagcagggctgtctcaggaagcagccgcatgggtggaggtattggtgtgtcaactagtgcaagtggatcgcaaggcatggcgaactacgatggaaagggctcatacatcatattcaatactgcggatacgctcttcatcagtgatctcaactcacatgacaaagatccaataaagtccatccacttcagcagctcaaacccgctttgccatgcatttgacccagaggccaaggatggacatgatctgctcattggggtgttctcaggagatgtctattcaatgtcactgaggcatcagttgcaagatcctggaaagaagcctgtttcataccagcattttgttaataaagacaaagacaaagataaagatccaagtcaaggtggcgctgccagcagtcagtgcacctgtgttgcatgggttccggagcgtgaaggaatttttgttgttagtcatgctgatgggaatctgtatgtgtatgacaaattcaaggatggaaatactgattggacatttccaactgttaaggatcaaagccaggtgctaatttcacatgcaaagtcgagtaagggcaatccaattgcaaggtggcacatctgtcaaggtgcaatcaatggcatttccttttcaccggatggtgcttacttggcaactgttgggcgagatggttatttaagagtatttgacttcacgaaagaacaactaatatttggtgggaaaagttactatggtgcactgttgtgttgctcttggaggttgtatacatttttaacttgtgtagtcctgatgactgatgagtaa

SEQ ID NO: 23385 - DNA, 1181 bp, Zea Mays
atcgccgttctgttttcccagttcgctcctcccatggcggcgtcgcccgctctcgtctcgctgactcccgccgtctccaggcatccccacctcctcttctgctccccttgccccccgccgcgccacatccgcctcgcccctccaaccgccacacccgcctcggacggaaacggcctcggccccggccccggccccggtgtcttcctatcgccgcgcgcgctctcgcagctcgacgagctcgcggccttccgctacgagcacgccttcccgcacggcctcctcactgtacctccacgaccgccgcgggctcgctccgcacgccgcggtgctcgtggggttctaccgccccgccgacgccgacgccggcgccgacaacgccaacgccgccccggaggacgacgaaggggagggtggggatgaaggggagatggcgtgcaccgcggaggtgtcgtttgacgcggtgggcgcaccaggggccccgcccacgcccactccgccgctcaacttcccctacatctgcaacatgactgtgaagacgccactgagaaggagaggaattggaaagcaacttcttaaggcatgcgaggatctggttttcaagatgaatgccaaaagacgtgtataccttcactgtagaataattgaccaagtcccattcaacatgtacacgaaagctggatacagtattgtccagactgacagtatattggtctggctgagccttcaaaagcgcaagtacttgatgagcaaggaattaccccaagcttctgttgttagtgagacttcaaccaaaaactttgagtgataatatttgacaagctgaatgtgccacgggaccaacaggtacacataaaagtttatttttgtgtataatgggggttctgtttaccacacatatccactattgtatagcttgtgatgaaatcaactgccattcattaattggcagtcgccagatgttttaacagaaaatgagttggtagtgcttttaacctatgtacgtattcaatattatagcctgcggactcactaatttcattaggattaattgacaatttaagtgttgtaatatttgatggttcagtgtaataactcatatggccagtaatcagaaatggcttcagcttccacatccaactaactaattggatgcttatgattcagcatgtgttgctgtttta

SEQ ID NO: 23386 - DNA, 3068 bp, Zea Mays
cgcgtctccaaaaaaaaaattccccagctccttcgccaccggcgaaccctggcttcccgtcctcccacggttcctccgcatcgtgctacatggcggattcgcgaggaatagcttccaagagcgctgacaaggatagcacctccactcgcccggcgcgcctccgcgtcatgcgccaggaagtcaaggattttttgacgagtcctcgccgtagccgccccaagaagcagccgcctccgcctcatcccccgccgccactggaggagaaggtgaaggagaggaagaagggaaaggagaaggcagcgacggaggaagagaaattcgagcgcgcgcaatacagctgtgccttccaggacgagggcgatgggggccgcgacttcgcgccgccggagctggtctggggtaaggtgcggagccacccctggtggcccggacaggtattcgacgccgccgatgcgtcagagatcgcactgcagcaccggaaagccggcgccccgctcatcgcctacttctgggacaggaccttcgcgtggagcgactcttctgcgctgctccccttctgcgccaactttacgcgactatccacccagagtactatgtctagcttcgtctccgccatcgactccgcgctgttggaggttgagcgacgcgtagaggctggcctctcgtgcggttgcttcagttccaacattgccacgaagcaggaggttcaaaactccggtatccggcaaggggcgtatggtgcggcgatagactctgtctacacgagggatgccttccatggcaaaacatttcttgactacatctcagcactaggaaagaagccactagccggtgctgatcttcttgacctagccaccgccaaagcacagttgagggcattcaatcgttcaaggggttcaagggaccttcctgagtttgtgatgtttgagggcattgcggagattacagagatgacacacacaaagggagaaaggatgcacaagagtgaggatgatgttctgagcaaggagaagaaatcgaggcgcgctgggagttcacgtagaaaaggagaggctttaccagaggctgcaaatgatgatgctatagatgaagacagcaatggaggggcaggaaatgatacgttgagtcagggggaaaagtcaaagcgtgtgaagagttcatcgaagaagaaaacagacatttacaaacatttatatggactcaaaactgattctgttgctgacagcagaacactggacaagaagggagtagatgatgttttgagcgagagaaaatctgggcgcacactgcgatccacgagcaagaaggaagatgcattagagggtttgaaaaggctggcaaagcatggaattgaggaattagcaggaaaaagcaaagatgcccccgttcttaaagaaaacaatcagaggcatggtgcaggctctgcacacaagggtagaatcacagaggatgggtatcatagacttggagattgcaatgctgaggatctaacttctccaagcaagagaagattggggcataatgaaaactcaataatcaagccagtgaccatctccgagcatggtaggaagaagaagaaactttctgaactcatggcagctataggcaggcctaattctgtatcgggtggtaagagcaaagctcgagggaagcgttcgttgcatggtttagctgagaaacctgaggatgctgatcgccactctaaggatacattgatgactaggaaaagaaagaagctcaacacattaggggatttatcttcacagtcagagcctctctctcctaagaagtccacaaaggttggagaactgatgagcaaagcagctgggagcaacatgttacaggcagcacctgctgtcaaagctattagtgcagtgtctcagacgaaaccacgtagggctaagcacaggcaagtaaatgctgcagacaaatctccacgtcatatgaaggtaaatcgggggaacagcaaagccgctagtaaggagtctctatcttgtggagaaatgctacggcagatctcattagcagcatgtggtcttaagcagagagaggaaattgctccttcaagtgttaatttctttaccgattttaggaagaactccattttttctagttctgatgtcgatgagaggatgcctgagaaggcaaccaacgccgagtccactccttcagaacagcccattgttgatcatatgcaggatgactattggtccgacattctcattaatgtggaggagccgttatctagcctcaaaaagaagatatataagagtaagaaaagagcaaacaagaaggcacctcaggttaagaaacctcctgttaattcattggcgactgcagaaaatgcggatgagccaaggagtgaaggcaaccaagatacagaaaatggggaacaacttaggaacaaaacgaagctgttttctgcaaatggatctcaacagaatgggacaaaatctggtgaagagatggaaaatagctttctgtctggactggtgctgcacttcagcaggccaagtgatgttccatcatgcagtgaccttatcaagatctttagccaatacggtcctgttaatgaagccaaggcagaggttgcaaacagtaccagctctgctcaggtgatcttcaagaggcgcatggatgctgaggcagcgtttgcaggtgctgggaagatcagtgcccttggaccagcccttacgagctttcgtctcaccgacttcccagcaagtgcttcaggaaataaagcttcacatggtgcatgaaagagcgaatagagtgttgcatggcagtgagggaaaccagatgagggagttagagaaaaaggtatactctactgtatgtggtagctaggttgttgcaggattaattcataggaacagcgatgacacttgtgtcgtccagtgttgtggaggtgtcatatactgcagatcacttgacatgagttgccaagaaccaataggtgttgtaaaagcatgtttgttttaaactgagttttggtacttaaaaagtgtgctttgtttcttaataatccaagtactggatattgttgcgggtgcagttggatgtttctt

SEQ ID NO: 23387 - DNA, 294 bp, Zea Mays
aggttgtaattttgttctgttgtggatggtgctaagtgccggtgggctcggccttcttctataagtatatcccgtctttagtttctctattgaggattgtcacttaagctagcatgtatttgaaaacctataaatattctatacattttaaattgtattttttttaatcactccgataattgtataatgtaaacttattgtaatatgaaatcattttgcaataaagaattttgtttccgctgcaaatgttggtgtgtgatttgtgtttacttaatcctgcgatcttggcggtaa

SEQ ID NO: 23388 - DNA, 327 bp, Zea Mays
ctgtttggctgaggggtttggtttgccaaaagcactagctgagtctaaaatcaagttttagcttttcaagttttagtagaatcctttatactagatgtgtacctagctattcatacatggtatcaaacattttatcaatcaacatcttttgccagtcacctcatttccacttattactcaatgcagtacaatggatcaagcagtctcattagctgcgagaagcagacgattcgaatcgagtttttatccttgcaaggtaaacctaaacacacgacgtggcaaggcactccgtccccacacacatcaaccgtccccgtcgattccctg

SEQ ID NO: 23389 - DNA, 482 bp, Zea Mays
cacccagcgggcatggcggtgtggattgggggaaagttcgccgccgccattgctgcgctcagaaattcgccgtgatcgtgacctcgtgaccagccgccggagttcgccgttgcgcaccgtgcagttttgtactgggtgtggggcgcagattcggtgcatcaggcgtcaattcctcgccgacatcggggcaagtcttcgttcgggatcctaggtatgagctcccgctcgatttgcgatcatctagaagccacgtagcatctaccggccaagtaattgatgggattaggcgccggccaccactccggccgcttaggggtagtgtcgtggccgcccgccatcgtggacattgtgccctatttcgtcgcatgcgaattaggatagaagggggtgttcactgtcgtcccttcggcatgaatcgtggtgcgggaggaagaattaggggttgtaggcgccggcccgcgatccacggccatggcaccgcc

SEQ ID NO: 23390 - DNA, 1600 bp, Zea Mays
attgtggtaccggcctcctgagcttttgttgggtgctactaactatggtgctgctgttgatctatggagtgccggttgcattcttgctgagttgctatcagggaagcctatcatgccaggacgaactgaggtggaacagttgcacaaaatttttaagctctgcggttcaccatcagaggagttttgggctaatttgaagttatcccgagctaccatattcaagcctcagcatccgtaccgccgatgtgtgaatgatgtatataaggactttcctactactgctttaacacttttggaccatctacttgccgtagaacctgggaataggggtaccgctgcatctgcccttgacagtgaattttttacaacaaagccatatgcctgcgatccatcaagtctacccaagtatcccccaagcaaggaatatgatgctaagcttcgagatgaagaagctaggaggcaaagagcagctgctaaaggacaggaagctgaagctggacggaggaagcaacctcctgcacctgatggtaatagtggattgcagcaccgccgagttcagatgaatcctaaaagcagcagttacaagttcactccaaaggaggatgctgtttctggatttccaattgatccgccagcaagagctgctgcagacaatggttaccctcagcgcgttcctctgatgcaagctggccgttcttcctccactctgggtagatcaagtgggatggatccaaaggcccaaagattccacacctcccaaattgtcactactgagatgtccggccaatctactgcatctgggcagcgaggcaatgctcctaagatgtctaacctcggggaaagtgccaggagacaatatcttcgagagcatcggtccagttcaagatacagtcaactcactgctgcggacccttctgacaggcctgaatggaaccatcaattccaagagcggccatcgtcttcccatcggaaggatgatgctgtggcaaacaaggagcatacggtggtgaacgggacaaagaagaacagaatccactattcggggccattgatgcctcctggagtgaacatggatgagattcttagagagcacgagcgacagatccaacaagcagtgcgaagagcgcgccttgacaagggaaagggaaagcacagcggtgagagagaccagtcggagtcactgctgtgtaccaccgggaatctcagggctgatcgctaagttcagtttgagcagtcatcagaagcaaagaaaacagcatcgaatcccttatattttttcggttcccccgccccaccccaaccgccaagcggagaggtttttgttctgccagaaactcaaactcctgatgcggtttggtacccaggaggtgggcagctgccaaaagaaaacctgttcctgtagagatttaccgccccagagtctagcatatgcggtctgaaatattttttccctgaagatttgttggttatccatagtcctcaattgtatatctcaaaagtactcacccccaaaaatgaaaaattgatccatacactcgtttttgcatacgacgtgacactccaaaatgaaaattccataaagattctcgatgaattaaga

SEQ ID NO: 23391 - DNA, 3748 bp, Zea Mays
gccccaacgacagaaaacgcccggttctgtgatgcttctcttgcctactacccattcgcaaatcgcaacctcaaggttcgagaccttgactcgcggacgcgttttctgttcgccgagcgctgcagccgtcgagcgggagtgcgggccgcgttactgcgttagccgccccccgccgtcgcctgcctcagcggatccacgctcggcaggttactgacgccgcccgcctaacttccaccggtctggtggagtggtggggagatctatctgccttggatcgattattctctactacttggtagaagagagtttatccacacaggcagctatgttggaaaagattgggttgccgccgaagccgtccatgcgaggcgccacctgggtggtggacgcatcccactgtcagggttgttctgttcagttctcgttgtttactaggaagcaccattgccaaagatgtgggggcttgttctgcagcagctgcacccagcagaggatggttttacgtggacagggtgattcacctgttagaatttgtgatccttgcaaaaagcttgaggaagaagcacgccatgagttgagatatgggcacaaaaatagagctacaagagctaccacaaaatctgcttcgaaaccagaggatgaaattctaagtgaaattcttggaggtggagagcgtatccaatctctggattctttgcttcctgggagaaccacaagcagtgccagtacctccagacgaacttcttctaacctcagtacggacgcaaaaggagatgaaagcctttctgctgaagcacacaattatgaacttaacaataccgcatctattttcaccccagaggagttgcgccaacatgctgtagaagagaagaaaaggtacaaaactttaaaatcagaaggtaaaccagaggaagcactgcgggctttcaagcatggtaaagaacttgagaagcaagctgcagccctggaattagaattgagaaggactaggagaatggctacaaaagcgactaacatctcttctgctgttggtacttcgatgactgctggttctgatgaggttgaaacaaaaaggtcttcaactgggaaaaagattaagaaagaaaagaatgatcttgcctctgagctcagagatctaggctggtcagatgcagaccttcgtgatgaaacaaaggctgcccctatgagtctggagggagagttgacacagattcttagagaggtggcccctaaaccattggagggcaagagaacaggtggtatcgataaatctcaggttaatgctctgaagaggcaagctttactgctaaagcgggaaggtaggcttgctgaagcaaaggaagagctcaagaaggctaaaattttggaaaaacaacttgaggaacaggagattctaggtgaagcagaaaactcagatgatgatttggctgctattattcggaacatggacgacgataagaatgatgacatatttatagatgattcaaagttcccagctttcaactttgaacaaattatggttgcctctaatgatcttgccactgatggtcactttgacgttacagatgatgacatgaatgacccagatatggctgctgctctaaaatcatttggctggagtgaggaggatgacaaacagttggaaaatctcgaacctgtttcttcaaatcaagaggggctaaaggagcaagtactttctctaaaaagagaggctgttgcaaacagaaggtctggtaatgttgtagaagccatgtcattgcttaaaaaggcaaagctactagagaaggatctcaaaactgaagagccagactcaaaggttccttctctagaaaggcagaaaactacacatgcagaagatgccacttatgcagggacgaatgtccgacctataccaacaccaaaaagtaagcttgcaattcagcgagaactgttggctctgaagaagaaggcactagctttgaggagggaagggaaggtggatgagtctgaggaagagctgagaaagggtagtgttcttgaaaagcagcttgaagagcttgaaaattcttccaaaccacctgtagcaaaggaaaccaggagctttccatctaatcccccgtacaaagttgaacccccaaatatcaatcttgctgatgaggtatatgaacctgaggttacagacaaggatatgcaggatccagcattgctgtcggtgctgaaaaatatgggatgggaagatgctggttcagattctgtggaaacaactgacaaagcatcattttctgcacatgtagttcatcataaatcatcaaaaactaagggccagcttcagaaggaattgcttggtataaaaaggaaggctcttgccctcagaaggggagggaaaaacactgaagctgaggaggaacttgagaaggctaaggtgttggagcagcaacttgcagagatggaagaatcaaataacttgagtgctagtcaaggtgttactactgctggcggggacgaaatattgctagtgcatgcatctgaatctggtacgccagtggttactctgtgtggttctccaagtaaaccgcagattgagacaaccaatcctaatcaaggtgatgtgggagaagaaagtagagctggaaggtctccagccttgtcgcagccagcttttactgatccgttgggatcttgaaggtgctcaacaagacaccatggatggtgtgggtgactccattactcctgctgtggaacagaacagtttggtccaacaacctgctagctccagcaatcacactgacgacataacttctccccctcctgcacaagcgagcaagcggacgcaacctcagaaagcaatgtccagccgggatcgtctcaaaatccagcgtgaatccctggctcataagcgcaacgccctcaagttgcggagagaaggaaagactgcagaagcagatgcagaatttgaactggccaaggagctagagagccaactggaagagtcagacaaccaaagctcgagctccgggggaaagtcaagtgaaccaaacgacacgagcgtcgagaatctccttgatcctcagatcatgtctgccctaagatccattggttggagtgacatggatttatccatgcaatcctctagtgcacaacctctgaaacctgtgcagtcctcaagttctcaacctccgcaaaaagtggaagccaagtcatctgttgccgcgaccagcaaacctcagagcgagagaagtcaacttgaagaacagatcaaggcggagaaactgaaagcgcttaacttgaagcgggaagggaaacaagcagaggccctggaggcccttcgctcggcaaagcgactggagaagaagttgaactcagcttaagccaatcacaccctcccagattgctcttgttcttttgtcaattgttcgttttggttacctgacatcccaagcgttccagctagaacagagaatcatatcgagtcctatggccctgattggcacagcttgtgagctttgagcaccataaacttatgtcctgtttgtgttcgagctatgagcagtccctttcatgtatgtataaataaaatctgatggacggagattattttcacgaattcgtgtatacacaatgttaggggaatgtcaattaagttggaatctgaacatttcatatgttagtcatttgataataatgttttccaagctcacaacgtatgctactgtatttgacattttcacaggattctaatactaatagttcttgtgtccttgcctcgtgg

SEQ ID NO: 23392 - DNA, 1251 bp, Zea Mays
aactacacccgcatccaaacaataacattggtattgtagatcaatttcatttctccttaaatttggtatttctagaccaattcaatttcaccacttgtaacgggaaaaaggcacttccccccgcaagccaaaaccctagcaagcaaaccaccggagcagcggcgctcgcgcgggcggagccatggcggacgacgattacaacgaaatcgacatgggctatgaggatgagcctccagaacctgagattgaggaaggggccgaagaagagcttgagaacaacgaagatgcccctgatgatgtcataggtggagagggtgaagataaggaacaggaaaagaccaagcgtgagcgcaaaacaacaaaatatatgacgaagtatgaacgtgcgcgcattcttggtacacgagccttgcagataagcatgaatgctccagtcatggttgagcttgagggagaaactgaccctcttgagattgcgatgaaggagcttagagcgcgcaagatacccttcacgatcagacggtacctacctgatggaagttatgaagactggggagtagacgagctcattgtggaggactcctggaaacgccagtgaatgaaccaagacgaaacgatgctatgctagatgttaccttgacgtctgtggttgccttggaactctggaaccgtgatggctggtggacggtggttgagttatgcttgttcgtttcagtttcagacatgctgtgcagatgattcgtaaactgactcgtctttcattcatttggaagggtttatcgtatcttgctatcttttgtaatgagttgtatgctacatccggcatgagaccatgttgctgttgcttgtttcattaaactccaacggtttccataggagaggagcaaatccagatgggtagttcacagcatagctgagcggaaagtatgcagaccagagcatggcgtatttggtgtgttccatgctactgctctgtttaagactgttttgtatcagagtttgcaaagatggataccatgtatccagatcatcttgctcattgatgcgtttttactgtggtattctggctaaatacaggtatgcttcatgtatcacatgatgacaaacttgacagacatttgtgtggatcacgtttgctgctgctgcctccctccctcggattgagatggagctccttcatcattcctcggaatcagactcgagggggcaggagccgtcgtcgacggtggccagcgggtcgaacatgtcgga

SEQ ID NO: 23393 - DNA, 813 bp, Zea Mays
ggtaactttagccaatagatagttatgtgcaccagttttgaccccagttttgtcgcagtgaacctgaaatacaactgcactccatatttttacatgtaaggaaagtcaggcgaatggttggatttcgggattttgacagaacagtggtgaagctggaatgggtactcaactggactacctttgtaacagcaagggtgatatgccatatcttgattacttacaagctcatctctgatgcccacaaatttgggaagggcattgagcttccgctagctctacttggtatggcaggaatgaatctgcttaacatatttcttgggctcgatctacttaaagcattcacacgagaaagaaataagcagaaccatcaggattgaatgcacctttcttgatgacggtgtactctaaattttgagaaggctgtagttccgttcttgtagggacatagaggtatgtttaagtcttaattaatcagcaactacactggaggctatggattctttatgtatcaacacgtgctaatgctaagatctctacaagaaagggttgttaatgtgtaatcatgtaggtataacattattgttcattaggagaattaagagagtgcaggcgggtaactggatgcaggatttacatacattttgcaatcaggaatcggaaagaagagaagcgtaccatgtatcaaaccccttggtcccaactctcatacctcatctaaagtaacacctaagcaacttgtagattggcactgtgactttgaggctacaatgctcttgtttattaatatttataatatttgacgatatcttgctg

SEQ ID NO: 23394 - DNA, 3958 bp, Zea Mays
accgacactcctctccttctcccccaattttctttaaaaatccccgctcgctaaatcccctcccaccgacgcctgtcgccactggcacgcattcctgctctcctctcctcttctccctcgtcggtgcggcgtggcgcggctcggcgttcggtgagaaaccactcggggatgaggatctgctgctagagtgagaggagctacggtcagtatcctctgccttcgtcggcggcggaagtggaggggaggaagcgatggaggcgagcgccgggctggtggccggctcccacaaccgcaacgagctcgtcgtcatccgccgcgacggcgatcccggggctgccagcgtgtgaccggtgacgaggaggaggacggcgtcgatgacctggacaacgagttcaactgggacggccatgactcgcagtctgtggccgagtccatgctctacggccacatgagctacggccgtggaggtgaccctaatggcgcgccacaagctttccagctcaaccccaatgttccactcctcaccaacgggcagatggtggatgacatcccaccggagcagcacgcgctggtgccttctttcatgggtggtgggggaaagaggatacatccccttccttatgcggatcccagcttacctgtgcaacccaggtctatggacccatccaaggatcttgctgcatatgggtatggtagtgttgcttggaaggaacggatggagaattggaagcagagacaagagaggatgcaccagacggggaatgatggtggtggtgatgatggtgacgatgctgatctaccactaatggatgaagcaagacaacaactgtccaggaaaattccacttccatcaagccagattaatccatataggatgattatcattattcggcttgtggttttggggttcttcttccactaccgagtgatgcatccggtgaatgatgcatttgctttgtggctcatatctgttatctgtgaaatctggtttgccatgtcttggattcttgatcaattcccaaagtggttccctattgagagagagacttacctagaccggctgtcactgaggttcgacaaggaaggccagccatctcaacttgctccaattgatttctttgtcagtacggttgatcccttaaaggaacctcctttggtcacaacaaatactgttctatctatcctttcggtggattatcctgttgataaggtttcttgctatgtttctgatgatggtgctgcaatgctaacgtttgaagcattatctgaaacatctgaatttgcaaagaaatgggttcctttctgcaaacggtacaatattgaacctcgcgctccagagtggtacttccaacagaagatagactacttgaaagacaaggtggcagcaaactttgttagggagaggagagcaatgaagagagagtatgaggaattcaaggtgagaatcaatgccttagttgccaaagcccagaaagttcctgaagaaggatggacaatgcaagatggaaccccctggcctggaaacaatgttcgtgatcatcctggaatgattcaggtcttccttggccaaagcggaggccttgactgtgagggaaatgaactgccacgattggtttatgtttctagagagaaacgaccaggctataaccatcataagaaagctggtgctatgaatgcattggtccgagtctctgctgtactaacaaatgctccatatttgttaaacttggattgtgatcactacatcaacaacagcaaggctataaaggaagcaatgtgttttatgatggaccctttactaggaaagaaggtttgctatgtacagttccctcaaagatttgatgggattgatcgccatgaccgatatgctaaccggaatgttgtcttttttgatatcaacatgaaaggtttggatggtattcagggtccaatttatgttggtactggatgtgtatttagaaggcaggcattatatggttatgatgcccccaaaacaaagaagccaccatcaaggacttgcaactgctggcccaagtggtgcttttgctgttgctgctttggcaataggaagcaaaagaagactaccaaacccaaaacagagaagaaaaagttattatttttcaagaaagaagagaaccaatcccctgcatatgctcttggtgaaattgacgaagctgctccaggagctgagaatgaaaaggccggtattgtaaatcaacaaaaattagaaaagaaatttggccaatcttctgtttttgttacatccacacttctcgagaatggtggaaccttgaagagtgcaagtcctgcttctcttttgaaagaagctatacatgtcattagttgtggttatgaagacaagacagactggggaaaagagttacagaagatattctaactggtttcaagatgcattgtcatggttggcggtcaatttactgcatacctaaacgggttgcattcaaaggttctgcacctctgaatctttcagatcgtcttcaccaggtgcttcggtgggctcttgggtctattgagatcttcttcagcaatcattgccctctttggtatgggtatggtggcggtctgaaatttttggaaagattttcctacatcaactccatcgtgtatccttggacatctattcccctcttggcttactgtacattgcctgccatctgtttattgacagggaaatttatcactccagagctgaataatgttgccagcctgtggttcatgtcactttttatctgcatttttgctacgagcatcctagaaatgagatggagtggtgttggaattgatgactggtggaggaatgagcagttctgggtcattggaggtgtgtcctcacacctctttgctgtgttccagggacttctcaaggtcatagctggtgttgatacaagcttcaccgtgacatcaaagggtggagatgatgaggagttctcagagctatatacattcaaatggactaccttattgatacctcctaccaccttgcttctattgaacttcattggtgtggtcgctggcgtttcaaatgcgatcaataacggatatgagtcatggggccccctctttgggaagctattctttgcattttgggtgattgtccatctttatccctttctcaaaggtttggttggaaggcaaaacaggacaccaacgattgtcatcgtctggtccattctgctggcttcaatcttctcgctcctttgggttcggattgatcctttccttgcgaaggatgatggtccgcttcttgaggagtgtggtttggattgcaactaggatgtcagtgcatcagctcccccaatctgcatatgcttgaagtatattttctggtgtttgtccccatattcagtgtctgtagataagagacatgaaatgtcccaagtttcttttgatccatggtgaacctacttaatatctgagagatatactgggggaaaatggaggctgcggcaatccttgtgcagttgggccgtggaatacagcatatgcaagtgtttgattgtgcagcattctttattacttggtcgcaatatagatgggctgagccgaacagcaaggtattttgattctgcactgctcccgtgtacaaacttggttctcaataaggcaggcaggaatgcatctgccagtggaacagagcaacctgcacattatttatgtatgcctgttcattggagggcttgttcattacatgttcgtctatactagaaaaaacagaatattagcattaatctatagttaattaaagtatgtaaatgcgcctgttttttgttgtgtactgtaatcatctgagttggttttgtgaaattttcgtagaaagaatgaatgtgagatacagaaaatgtaatgccgtggtatatgcgtatggaacgatgtagtatcttttatggttccataatagtgtatttaacaaccccagcaaggggtttcttgggtttct

SEQ ID NO: 23395 - DNA, 2046 bp, Zea Mays
ccccaaactggaggcaccaagcacccgcctggcccatgtgctggtccccgaatcccgacctcgcctccagttccactcttccggcggcgtcggcggccgccccttccccacgcccacaccatgtacggcgtcggcggcggcttcaacgcgccctccaccgctgcctctcggcgccgcaacccaggcgacgaagaggaggacgaggaggatgagggcggtgagggccgcgtcctggaggcgtgggagcgcgcgtacgcggacgaacggtcgtgggagtcactgcaggaggatgagtcgggcctcctccgtcccgtcgacaccaagaccctcgtccacgcgcagtaccgccggcgcctcctactccggtctgccgccgccgccgctgcccgcatccaaaaggggctcatccgctacctctacatcgtcatagacctctcccggagatggattatcgtcctagtcgaatggctgttgttgcaaaacatgctgaggctttcataagagaattctttgaccagaatccattgagccatgttggcctagtgacaattaaagatggtattgcccatcgacttacagaaatcggagggagcccagagtcacagattaaggctttgatggggaagcttgagtgttctggtgattcatccctgcagaatgctctagacctcgtacatggttatttagatcaagtaccatcatatggtcacaaggaagttctgattttatactctgccctgaatacatttgatcctggtgatatcacggagacaatagcaaagtgtaagaagtcaaaaattagatgctctgttattggtcttgctgcagagatcttcatttgcaaacatctatgtgaagagactggtggatcttacacagttgcactggatgagtctcatttcaaagagttgttactggaacatgctcccccacctcctgcaatagcagaatatgctgcagctaatttgattaagatgggctttccacagaggggtgctgaggagcttatctctatttgctcttgtcacaagaagataaaatctggggctgaaggttacatatgtcctagatgcaaagttaatgtctgtgagcttccaacagaatgtcgaacttgtggtcttacgctagttagttctccacacttggcaaggtcgtatcatcatctcttcccagtaccaccgtttgatgaggtcacccctgtcccaaatagaattcaaaggggagggcagatctgtttcagctgccagcagagcctttataacccagacggccaatctaacctccatgtgcgctgcccaaaatgcaaccaacacttctgccttgattgtgatatttacatccatgagagcctgcacaattgccctggttgtgagagccaacgcagcatcgcttcatagagaccgtgttactgcgtgcattattcaggttgtaccttaagctttctcctacactgtaacagccagcaaagttgtttcatgatcagcttttttctggctagcttttctgagaatctagctgtagagagaatctggctgtgagaagaatctgtgtatcgtgggaattacgtgcggaggaagatgaagtggtccaaatagttcaggatctagaaagcgatggatttctaccatcgcgatgattcaaccgattctgtgtttatgttgattttggatggtttctaccaaaacgattcttataaaagcgggttgaaaagctggatgtttgacagtccgcagcagcttttggtggccagaagctaaaaaaaagcccaaacaaacagggtcattccggcatccttttattgatagttcctgttagattgagtacctactagctagtgttgagctattgctacccatcagaggccaatgggttgatagttttaatttgtgccgagaagagaagctgaaagtgtataacatgaccgagacttgactcttgctgtttttttttcttccctgaagcgtgacagtatatttatttgttttcatttgtttatgctaaaactttgtcataaattgagttgtggattgggtcgggggtttcatc

SEQ ID NO: 23396 - DNA, 4211 bp, Zea Mays
acagctgaacatatctgtaacagctggagctgtccttatcttcattagtcacatctctgggtactcaaaatatgcaattctactgcattagtagcatcacttggtagctgctacggcatcggcatagaagcacaaggagagagggaggggagagtaagagcgatgggggatcttgtcgtcggattggcaaagtcggtggtggagggggttctaacaaaggcccagtcagctattgaggaagagtcaaagctgcgtcagagtgcacagagggaccttgtgttcatcacaggtgaatttgagatgatgcactcctttctcaatgtcgccaatgaagagcgtgccaagaacaacgtggttaggacatgggtgaggcaggtccgtgacctagcctacgatgtagaggattgcattgaatttgttgttcacttggataaccggccccactggtggcgccgcttcataccatcatgtatgccagcatcggcactacccgtagatgcagtggtcgccgagatagagaagatcaaggtcagggttgaggatgtgagcaagaggaactcacgttacagcctcatcagtgactctggatccaagccagtaatgcagcaacaaccagctaccggccctgctattggcacaacaacgcttgacatgtttgttgagtcaagggacgccacgaaaaagcagcaaggcttaggggatatcacacagttgatcactaaagaaaacattgaccttggagtgatctcgttgtggggtacaggtggagatcttggtaagacatccatcataaggaaagcataccaggatcaagaaatctgcgaaaactttggatgtcgaggctggatcaagctaacatatcctttcaatccacataagttcctccagagcttggttactcagttctatacgaattcctgtctgcaacaaggaactactttagatgtagctcaactgaagaggatggtagcaaagcgaggaataattgaagaattcacgaagcaagtggatgggaagaggtacctactcgtcctggaaaacatgtgcacgatgggagagtgggacgctatcagggcatgcctgcctcacaggaataagggcaactggattatcgtgtccaccgagcaccatgaaatcgcaagtttgtgtgttggacattcataccaagtgttggagcttaaacagtattcagctgagtaccctgtatgcgtcttcttcaaggagagcaagaagactggaagagtaatatctagcagtggtgaaatattagaagatgaaatgagccacaggggaggccttacttatggtaggattcccacctctagaaaggctttagccagcagttggatggatcagtctacccttgttggacgtgagtcacaaatgaatgaacttcgtaagtatcagaccacggcccgtttcaaagattggcaagtgatgtctgtgtggggaattgctggtgttggaaaatctgatcttgtcaaaaatttgtactatgaaaggatgcttaaagaggacccaatgtttgacaagtatggttgggtccacgtgtcccatccattcaatttgagggacttctctcggaacttacttttggattttcactcagatgccgtgggaatcagagaccctattcaggagtgtcataagcttctaaaagaacatcagtgtcttgttgttattgatgatctacagtctgtggaagaatgggacttaatacgacctgcacttgtatctagacattccaagagtgttatcatcgtcattacaacagatgaaaaaattgccacgtattgtgcagacgatgaagaggtcgtgtttaatgtgaaatgtctagaagctgaagcatcctttgatctctttaaaaaagaggtacaaaagaaaagccaaacatcccctctgatgaattcaaacaacaaggagctagaacaacttattctaaaatgtgggagacttcctaaagtgatagttgctgtagccaaatttttggcaccaaagacagttacatgtatggacagcacaaaaacactgaatcacagatttatgcaggagcttgagagcaaccctgagttcagtgttctgcaagatctgtttgcttggatgcattcttacttccgtgcttgcccggattttctaaggccgtgtatcttctatatgtcaatcttccctgggtcccaaatcattcgtcggaggcgtttagtgatgcgatgggttgcagagggctactccagggatacaaaagacatcactgcagaggagaaaggagagatgttcttctcaatgctcgtcaatctaagcatgattcagccgccaacatgcagggtcatcaccgacatgaaaatggtcctatgtcaagttagtgctttcttccatgaatacatcatttcacgtccagtggaagaaaatataatatttgcactcgaggtctttgcactgaaggggcgttgccttccaactaccggacgcacaggacggcaccttgtaatagagaggtgctgggacagggataggattgtgttcgagagcattgacttctcgcgcctgcggtctttaacagtgtttgggcagtgggaatcattcttcatctctaaaagtatgaaggtgcttcgggttcttgatctggagaatgccacaggtgtgacagataaagacctcgagcagatggtgaagcttcttcctcgcctcaagttcctatctttgcgaggaagtactggtatctgccaccttccgagttcattgggtgagctgcggcagcttgagactctggatattaggggtaccttcatagcaaaattgccagcatcgattaccaagctaaagaagctgcagtacatgcgtgctggtacaatatccctggcaaaggaatcatcaacatcttactcttcagcgtctaggttgccaaacctatgcaaatcttgtaaactagttggtgttgagatgccatcagggattgatgaactgacaccattgcacacgcttggtgttgtcaatgctggtattggagggggcaaggccactctaaaagagctgaagaagattacccaattgcgcaagcttggagtgtccggtgtcaacaagaaaaataacaaggaattctgtgctgccatctcatgtcatgtccgcctggaatccttgtcagtgtggcttagcaagggaaatcaaggtttgaatgaaatatcgtctcaggataagcctctgcaaaaccttcagagccttaagttatatggtcttggaagtgaggtgccagcttggatgaaagatcttcccaaactcacaaagttggatttgcatatgaccatatcagcagaagttgacataattaaagtccttggggaaataaaagaactatgcactctacgtctttgtgtcaagccccttcaagatggtgatggtaagcttgatttttgtgtttgggtgaatggaatacagcagcgctgttatttaaatctcaagatcctcgagattacttgcagttcaaagttaaatatatcctttggatcagaagctatgcaaaatcttgagctgctgagagctcgctgctgtagtggatcgacattgaagtttatggagataaagaatctctctaaacaaaaactcaaggaagttcagcttattggttcccatgacactgcactcaaggatgacatggagaagcaactgaaggaacatccaaggaaacctcctttgaagctggaggaaccggaaggatgctgatctcagtatttagcaatagtattattggcgctaatcctatgtgaaacatcttactctgcttcatttcttatcactaggagaagcaactgaaggaacatcttactctgcttcattcaagatgtcatgataattggcgctatcctatgtgaaacatccctaggagaagacattcagttcatttactccgtacatcaaacgccgagcttcagcttatgtaactccataaaggatgttcacttgtgtgcatgtttatggatttgacttatgcgttgatgtagtaatcgttttgtaattttgtgttagagtaatgttagggttttgaggttagccccttgtaattactgtcacacccttagagctgatttggtgaccggggatcccgagggaaagaaatcctcttgctattcaaaattgaattgcaagggaattcctcccccatggatcccctagggatccctaatcaccaaatcagtccttatgtaatggattaggcccaa

SEQ ID NO: 23397 - DNA, 889 bp, Zea Mays
agatgctaaaatttattagagggaaacgaacatgccctcatctacacatttgcatctatttaagtttgaaaaaaaagaccaagaataaaagattttctgctccacaaccagccagcgttccattgttctttttctgtctcaccccaaggccccaagtgataagaacactccatctctactatgtaaaacatgtcgttccgagtcacccttccccccgcataaagtaaaattgtgcatcactggttaaagctgttcaactagcatatcatcagctactatctcactggttggagaagcatcacaactagcatatcatcaaggttttcaactcctcatcagctgcattggccttctcctccgtgaggtgtgcgatgttgtcctctacatgggcggacccacgttaggctgagtgggaagcacgggcctcacttaattttctggttcttgcgaagtttgtattattcactgtagctgtaaaggtccattaataattatgcttctatttaagcccccactcaaacttttggctgggtccgttcctggtcctctacctgggcatcattgacatattgcaatagtacaatatgacaaagaaaatcgatcgtgaattccatgcaatatgactcggactcgatctcggttgtggacccccagttctactcggagcgtttcttgaagttcattcgggccgtcttccctaagaattcatagctcatcaaccaatacttgcttcaaagatgcccacctgctgccgttttgttactgacgttggccaagcacgcgaaacctcatccacacgacagttcatgtcttcaaaactaaagaataatgatatgtatcaggggacagatatgtataagatgttgaatgtgtgccagacaagcagcaa

SEQ ID NO: 23398 - DNA, 5736 bp, Zea Mays
agccactaccccagtacccctatatttagctgtttccgtccccattcctcctctcttcttcccgtttcaaaatcgcgtccaatttaaacagcaaaatcccacacatcaagccatcgaatcccgcggctcttggattcatcccttccctcccctcttgttctccgccatatgtgaaccggtgaacgggtgtgcgtgtgtctatcgaggctttcggtgggcgtattcgctccggtggatttggaatcgtgccttctcggcgcgcacaagtggcatgctagcacaataatgcagtgaagttgtgtcatgagtaaaatgtgtcacgcatgtgcatcagaggagacaaccatgaatgaagctaatatcgacctggcctgcagtacgtcttgctgcaagatgtgtgattatggtgagggatcatcaattgttaccagcgagatcaactggctggccatggactcgagcccttacagcactccttacggcacccctgttttttcccgagaaaattctttctcaagctttgccagttgcttttcaagccttggtgactctctaacagattctgattctgaagaggagattgagctccaagatactggtcaattttatcatgataccatattaattaaagattttatggagcaagaagagagttttgtgcgagtggaagaatgtcaatttaaggatattgctgatgactgtgctattttttccattccaataaaccaatatatttcatctgctgagcaacagctggagagacatgaagactccaacaagggaaattttgataccattaatatttcattggattcagatatatcttatgaacagagaaaagacatcctgtccgatgataaacatgtaagaacgaaatgtgctgtaccagtggaagatattgatcataaagaatcaggtgctatagttgttgaacagatcactagccttcccatgccaggtggtgatattttcccattgaatgaacaagttatggatggactcagcagtaccttggaaaatacaatagtatataacaatatattgaataccgaacctgaaatgaaacatggtactcactttgaaaatgaaaatgaatgcctgtacccactagctttgcctagttttgaagcagatcctctcatttggttaccaccggagccagaaaataatgaagatgactttgatactgtttctaatgatgacgacgagagtggcaataacagcactgggtggggtaggtcaagtttcaaggttaacttagcagagagaaacaaggaaagccgcgacgaccaattgcagaaagtaatgtcagaagtaatgaatggacaattcaagatcctagtaagtcgattcttggctgctgaagggctctctttatctgatggaggcacagataaaaactggcttgatattgttgcatcattgtcatgggatgctgcactacgtgtaaaacctgaagccaattccggaaatgcaatggatcctggttcgtatgtgaaggtgaaatgtttagcttcaggatcttaccagcagagtgaagtgatcaatggtcttgtttttaagaagagtgctgcacataaacagatgcgtgccaatgtaaaacatccaaaactgctacttcttcagggcgcccttggccattcgtcaacggggctatcatcaataaattcgatgaaacaggaaaacgatcagctggagagaactctttatgaagtgatagtcaaatgccagcttgatgttatattggtcgagaaagcagtttcccgtaatgtaaacgaatatattcagaaacaaggagttacggtaagtgttcttatgaaacccagtcttattaagcagtgtgaatctctccattttgaaaagtttgttgaagagcataatattactggagaagatggaaaaaaatcatgcaaaacatttttatttctagagggttttccaagacctctgggatgcacgatactgctgaaaggagcaacaagggaagaacttaagaagattaagcgtgtgcttcatttcactgtctttgcagcttaccatttgatccttgaaacttcattctttgccgatcaaaaattgtttacgacagacaaaactaccacagggaaagagaagtgctttaaaactaatcaacagctgcttggttcctgttatgataattcaaaaaacagtgacaccatgaataacacaccaacttgtgatgatcagtatcctaatcaggaaaagcttattcatactgaaaaatctgtaccattgcatcttcatgattccaaaactatggcatctgaagattctgctggtgaagagcatattgacagcaaaggcattcagtcatattcatccctgcctgtttcagatccctcgacaaattttatgcaggacatgccatcaccagattgtgctgagtcaaaaatatctggtggttttgatggctcaacattcactgatacttccaaagaggtgcagaagaaggaattgtctagtgacaattttcagggaacttttgatgtaatttgtgctgagagtggagctgctttgaacactcaggatatcttggtatcaatgtctagccaacatatcaggaaccaagctgtttgtgagcagagtcacctgtcgcggataacttattatgggtattttgatacatcccttggacgatatttgcaagatactttacttaatgagaaacacagctgcctatcatgtggtgaatctccagaatctcacatgtactcttatacccaccataatggtactctaactgttcttgtgaaaagacttcccttggagttgacactttctggtgagactcaaggaagaatttggatgtggaccagatgtttgagatgcaatgctaagccgacccatagggttataatatcttcctctgcacgtaatctgtcgtttggaaagttcttggaactcagcttctcaacccactctgctaccaagaagctaccaacatgtgggcatttgcttcatagagactgcctacgtttctttggatttggatccagagttgctatgttcatatactcatctgtagaaatatattctgcttgtaagcctccattgagtttggagttcaataaccgaaacaaaaatgattggcttgacattgaagtgaagaatgtccttcttaaatggaagcagttatttacaacaattgaaaatgtaatacaagacttgagatcaagatactctagtcaagccatgggggaagacaccaacgtttcagtagatgaggatgaggggttacttttggaggtgtccaggatgcttacacaagagaaaaataaagttgaggtttctctgagggagtttagccgaattgccatacctgagagttttgcacatgggatccttggtttgaactggttgtaccagcaacttcttcttgggttctacatttgggatcttcggttgcttcatattctgcagtacactaaagttaatactgcatcttcagacaattccattcatgaaagcacagcaaagaatgaaccgaagagttcagcaagtattgcaatccaggacacaccatcactaaaggaaattggaacagaaagaaaggaagcaactataaattcttctggcaactttgatgatccatttgggtgatacaatgttggataaggttcaccttactgctaaattaataaccaaagagaaagagcacgatttgctcaattatcaagaccatgatgtaaaatcagctctttcctctctaggcgaagctgctgatcagtttgaaacgattgctaatgttaattgttcagagaaattaaacactataccatttatgaatgatgaacaacctgcagcatccaatgtattgcatcatgttgtcattccaagtgacgatgaaggaaaatggttctggaatcaatttaatcaattggaaatggaatacaagaaagaacttgaaggtggttctttgtataaattttacctcatcaacaaatacaccccatgctcttcaccattggcacaattaaaacatcaaatggacttggggcattttatagctggccatggtggtaatatcttttcaatttctgaggaagaggcttctagcattattgcttatgctctaattatatctgaacaacaagggttctattatgaagctgcatctagtaacttggataaaaatgcttctatgctgccatccatgtcgtctccaaatgagtctttcgaaaacaaccataaattttcaaggtttgcaccaactgaggaattaacatcagggttttatgattcatttctgtcagctttaaaagatctgcaccacgaaatcgatctgaacaatgaaaagatagctctgagaagcaaatatactgtcatttgtatatatgcaaaacaattccatgatcttcggaagatgtgctgcccatcagaacttgcatatatttcgtcaataagccgctgcaaaaactggaatgcacagggtggaaagagtaaggttttctttgcgaaatcaatggatgacagatttatcataaaacaaatcaagaagactgaatttgactcgttcttaaagtttggtcttgagtactttaagcattttggtgcatctcaggtttcaagcaaccctacttgtcttgcgaaaattctaggaatatatcaggttaaggaaactaggaatggcaaggagacaagggttaacttcatggttatggaaaatcttctgtttggacataatatactacgcagatatgatctgaagggtgctcttttctcacgatatattcctgattcagaaaattctgaaaaggtactgttggatcaaaattttattgaagacatgcgtaccatgccaatctacattcaaggaaaaactaaaaacctcatggaacgcgctatttggaacgacacatctttcctaagtaacatgaatgtcatggattactccttgcttgttggagttgacaaagagaagaaagagcttgtatttggaattatagattatttgagacaatatacctgggacaaacagctggaatcttgggtgaagacatctcttgttgttccaaagaatctatccccaactgtaattttacctagggagtacaaaatgagattcagggcctttatgtcacaatactttctatcagttccagatgcttgagtcttgaggcccaatcattttctggtattggtgaccgaacatatcttgagttaggacttcggagatcatgttgccgatggttatttccctatccagtgagcagtacggcatattggcatcatgttttgagcattgaaattttcccatagtttcattgttgtgtgtgtctatccttgtccattttccttctcagcagttgtgtacatagtagcagctaggacacctgggaagtgcaaattttaagcaaacgaacggtgatggacgcacaaatagcctagtcattgttttttattgagttaattagggtggagatctttccaaaaaaagggtggagatcaaggtctgtaggggtagaggagcatgtaatgtactccggtttgtgtttatcggaatatattcctgaagtttaaagttagattaaagattcagcttttttactttaatcaaattactagcaaaggtttatcatagcagcatttgtgtgacgaacattacttgtggcatggcagacatagacacaatatcattgtccaacatagatacaatatcgtcgaatgctacttcgtcaggcgaatgtatgtcaattataagggtatctgttcggg

SEQ ID NO: 23399 - DNA, 2656 bp, Zea Mays
ctccacctcgctcactcctcgcttctcccccttccggcctccacttcgccgcgcacgtagccacagcccagcagctgctgctatcctgcatcgtctccttccccgcaccacacaagcagcccatatcatccatcgcctccagcgcggcgccgacctgcctctccattatttatgcatttccgcccccacccttacctttcccaattcagccgaggaccgcaatcgcagggcactgggagcgattaaaaaaggcagcctcccccgcaagggtaaaaaacaaacaaccaccgcatcgcggcaggcaaggcatcgcccgccagccaccgagcggagggggaagcaaaagcttgataaaaaggagaggaggagacgagacgtgccgtccggacccaagcaacttcctcccaccacctcctccctcccatgcccgcatcgagatcttagcgggacagcgagaggagaggcgacgccgacgcgggcgccccctgatccctcctcgccgccgccgccgaccgaccgaccgggggaggaggaggggaggggaggacggacacgatggaggcggactccgggaagctcttcgtcggcggcatctcttgggagacggacgaggatcgcctccgcgcgtacttcggtcgctttggcgaggtcaccgaggccgttatcatgcgggaccgcaacaccggccgcgcccgtgggttcgggttcgtcgtcttcgccgattccgggatcgccgaacgcgtcaccctcgataagcacatgatcgacgggcgcatggtggaagcaaagaaggccgttcctagggacgaccagagtattgcgagcaagaacaacagcagcatagggtcacctggaccaggacgcactagaaagatcttcgttggaggtctggcctcaaatgttaccgaggtcgaatttaggaggtattttgagcaatttggtgtgataaccgatgtggtagtgatgtatgaccacaacacgcagaggcctaggggctttggtttcatcacatatgactcagaagacgcagtggacaaggcactgcacaagaacttccatgagctgaatggtaaaatggtcgaggttaagagggctgtgccaaaggagcagtctcctggtcctattgcacgttcacctgcgggagggcagaactatgctatgagcagggttcataacttcctaaatggcttcaaccagggttacaacccgaaccccctgggtggttatggcatgagggtggatggaaggtatggtctccttacgggtgcacggaatgggttctcttcgtttggtccaggttatggaatgggcatgaatgctgaaggtggaatgagtgcatattttggtgcaagttctggttttgccaatagctccaatgggcggcaaataggttcttacttcaatagtagttcaaacagattaggcagtccaattggttatgttggccttaatgatgattcaggatcaatactgagttcaatgtctagaaatgtttggggcaatggaaatcttaactacacagggcaaccctacaaacacgaattcttttgctccacctgtaggtggtgggggtattcctggtgatgaaattagttggggaaaccttacttctgttcatgggatgggcaacatttcaagccttggaccgggaaaccttggccgtggaaccggagataacaactttggattgccttctggaacctatgtgaggagcaactcaactggtacaattggcgagccattttctgcatcagccaatccatatgaatcgaacaatctaggtgcatatggcagcagttctatttatggtgactccacctggaggttcaactcatctgaggttgatatacctccttttggtcatgatcttggaaatgttgatccagatattaaatcagaaatatcagcaaactatatgggcaactatactgttaataataatcagacaagcagaggtatcacttcctaggaagagtattattatattcatacatgacttgggataggtgaaatacccactactatatcaggctttcaggtgcatgactgtgaattggtgatgtcagattaatatacagcaggtaaggtactgggagctgatttgcagtggcagacaacgtaatgacggccgcgccgatccaacagtgggttgacaagcgttacagatgggaggaggacgcatcaacgccgaccgactaatccactatagccagtggattaatgccaatcacgtagcttgaaatcgcacactctcaccaccgtcatcctcgtatatgttcgcaatgtaaaaacatcaatcgtgtgtggtgactgtggtcgccgtatacctgacgtaaaaaaacagcagtccacattcggggggtcgtcgacacttgcaccacgcactcatcgctgcacccttgagaacacgagacacatctaatggtcatcgtgtcttgacagagtagtacaatagttaccatcgtgtcttgtcggttaatgtgatatgatccaattttgggttgggtgatctaatggtcatggtttttttttggtagactttcactggtacgactatttggtcgattggagctataaatacccaccaatcagccaacacatgtgctttttccccgtttaatagctccagcgacccacatatcgtgtgataaggagc

SEQ ID NO: 23400 - DNA, 2001 bp, Zea Mays
tttttcgacaacgccaaacatctggtttcgctgccccgattcgccacgaagccgcactgtgagagagggacgcggcccgttgtcctcggcttgtacgcaatccttccgtcgctgcgaagctgatccctcgtgttcgccatggcccccagcgtcgccgtggaaaacctcaaccccaaggtcttgaaatgtgagtatgcagtccgtggcgagattgtcatccatgctcagcgcttgcagcaacaactacaaacacaaccagggtctcttccttttgatgagatcctgttctgcaacattgggaatcctcaatcccttggtcagcaacctgtgacgttcttcagggaggttcttgctctttgtgatcatccatgcctcttggaaaaagaggaaaccaaatcattgttcagtgctgatgctatttctcgagcaaagcagattcttgcaactattcctggacgggcaacaggtgcatatagtcacagtcagggtatcaaaggattgcgtgatgcaattgctgctgggatcacctcacgtgacggattccctgcaaatgcagatgacattttcattacagacggagcaagtcctggggtcccctattaccttgatgaaaaaactgggtggggtttggagatctctgatcttaagaaacaactcgaagatgctcggtcaaaaggcattgatgttagggccttggtggttatcaatccaggaaatccgactgggcaggtttatactgatcatttctcctcttgttaaagaacatctctgcttatccacaccatactctttataattgatgtaataacatgagatgtgtatttattgtactcctattttaagtcagtgaatactttgtatacttgtattgtctagggaaaggttttggttgaaaaaaataagtgtttttttgtcgttctgcaatgcgaatgaatgtttttcaatgctggtgaccaaaacacaaattttattgaagtggttcatttatttgtaggttcttgctgaagacaaccaatatgatatagtgaaattctgtaaaaatgagggccttgttcttctagctgatgaggtatatcaagagaacatctatgttgacaacaagaaatttaactctttcaagaagattgcaagatccatgggatacggcgaggatgatctccctctagtatcatttcagtctgtctccaaaggatactatggagagtgtggtaaaagaggaggttacatggagattactggcttcagtgctccggtaagagagcagatctacaaggtagcttcagtgaacctgtgctccaatatcactggtcaaatccttgcgagcctcgtcatgaatccaccaaaggttggggacgaatcatatgcttcctacaaggcagagaaagatggaatccttcagtctttagctcgccgtgcaaaggcactggaagatgcattcaacacgcttgagggattttcatgtaacaaggctgaaggagcaatgtaccttttccctcagatccatctgccacataaggcaattgaggctgctaaagctgccaagaaagcacctgatgcattctatgcgctccgtctccttgaatcaactggaattgttgtggttcctggatctggatttggccaagttcctggaacatggcacgtcagatgcacgatcctgccgcaggaagataaaatccccgcggtgatcacccgcttcaaggctttccatgaggcgttcatggctgagtaccgtgactgaactgttacagtggctgagtaccaccgtgtagaccgaaacaaaataaagctcccccctctctctgtgtctgtgcgtgtgtgtgaactgatctctgaatggacgaacaatgtactctgttggcgcctttaatggcaattgaggaaaattttgatcaaatttctgttgtctgctgttgtgaaagatgcgggattgtttcctagtgcagcgcaaaatgttgtttccatgtactgaggatattggcagggttgcaagagctggga

SEQ ID NO: 23401 - DNA, 2438 bp, Zea Mays
catcagtccgctgttgtccgatccctcgtcagtcaccaaacaacagtgagtgccccaatactgcgcgagcctcttaatgttgaacgattcgcgcgtcgtgttcccagacgggataggggccttaatcgtcgagagcgatgaaaggtttctaagatcggctgccttgatgctctctctcctaaactaccgagtggccacgtgcgagaggccaacgtcggtagtcaagctcatcaccggaagactcaaagacgccgacgtcgtcttcatcgacgctctgagagccgcaacctgcggcttcgacttccgcagaatcgtggagtcccatctgtgcatcccagtcgtctacttcctctctcgggattatggggtcaccggcgacgtgtctgaggctctgcagcgcactgtttgggctgccacctacgtcgtcaggaagcccctcgacgctggagaactcagcaggctgtggaaggtcatcaagtggtccaagtttttgctgcggcgcgcatggccggaatggcctcgcggcagccgagtgcgtcccgccgtcgtcggagcacttctgcccggctcctctaccgttgatggccgatgggaagacgacgacgacgacggccgcgaacatttcagggcggtgagggcaggaagaggccggaggaggaagctgggtgatcgccaataccacggcggacgatcctccggccgcggtggcggcggcggcgttgcagttggaattggaataggacgacgccagccaactgagagactggagcaaatgaacttgacaggatggcagcaggagaacgatgacgacgacggcgtgtttcctatccaccaacagcctgcacaacagaaccgaccaggagtccagaccatggacgatgtccagaaccagcagcatggtcggtccctgttcatgcagcccggcccccagacgctcaatgtgccgcacaacaaccccatgatctcccccgacgctggctggccgagcagcagcaatgtcgcagccttcgctggcgccagcaacaccaccggcccaacactgctgcagggagtgtaccaagcaccggcggcacgaggagcaagagcagcatcgccggcaccgcatgcggtgtacgcaccaccagcgccaggactgcgccctccggtgtatcagcagcagcagcaacccatggcgcccctctacgacttcggcgacatggtcgcaccgcccgcggcagtaccactaccaataccaaccatggccgccaccagcggacaccagccgcagttcaccctcaaccatcaccaccagcagcagcaggaggaggaaatgtttgcgccgcggaggcaaggcggctggatggggagtcgtcgtcgtcgcgagaccggacccatcatgctttccttccagcagccacaggccgctgatcctttcacccctatggctggcagtggcacggcctttggagcttcatcacctacaggtgctacagatgcaggagcgtacggggccgctgccgtggcacaggcacagcttcagtccccgaacgctggtgctcaaccagctgacagcagctttgatgatgtgctccgagccatgatggagatggactactatgccaacaactgcagcgccgaagcactcatggccccggctacagacgagttagcaggtatgcaagcagcagcagcacttggcagcagcggcaactacaacgctggaccattcatggtgacggatgcgaatggcggcaatggtacaccattcatggcgctggcgctagcgccacaggatcccgccgcgccaactgggaaccaaaaccaagtccaggtggagttgggagcaccggacatctacggcggatcactgctggtggggtctcatcaaggcggcgggactagtgcaatgttcaatggggatggtgacatggcaccaatgtttccttctaacgagtacggtgcgactgcgaacgccatgttctctctggatgcccttctggatttcgacgacggcgtcccaacgtaccctgaaggccaccaggtcgctgcagctgatagcaccaccgccagcaacgctacaggaatcatgtcaaatggcggggaaagtggtggctcgggaccgagctggaacatgggagctgcagctgctgatgaaggtctggatatgttggaagagttcttaatggaggacaatgagtctggttttcttctcccgcaagacatgaacaatggcctccagtagctggtggtgcagccatgacgagaaacctgagagattttaagagttcgagagaggaagagaactataaattagctagattcaataatgtacaggcaaccctgtctaaagttctgtttgctgtagaactagatacttggtgcacccgtacttagaagtgtttggtaagatacagaaaaggggagtgcccctgtgatcattttccgtgtgtttggttgag

SEQ ID NO: 23402 - DNA, 1203 bp, Zea Mays
ggcggttgggccatttatgtaggtagctcacttgggtcctggcagtcaccagcccactggccactgcccaccacgttactcggtggcccagccagccaaaacccttctcggctctcgcccagcctgaccggaacgaaacgctgaggcagcatcttccccgccgtcctccgccgcctcccattttcaccttggctgcagcctgcaacacaatcctacgcttccgacttcaacgcgcgcccctcccattttcacctagccctactcctttgtacataaaggaagatgggagcatatgcaacgactggtatgcagatgatagcaacacgcccttccatcccggcctacaggcaaatacttgggtcgacatcagcactatctgcatttggaaggtcaatctgttccagaactggctttgccatctcttctaaagccacatcagcaggaccactggtttcttcgaattgcaagagggttgttgtgagggcaatgtcgcagagaggtgcccaaggacttcccattgatctcacaggtaaaagagcatttatagctggagttgctgatgataatggttatggttgggcaattgctaaggctcttgctgctgctggtgctgagattcttgttggtacatgggtgcctgcgttgaacatatttgagacaagcttgagacgtggaaagtttgatgaatcacggaagctacctgatggatctcttatggagattgctaaagtatatccactggacgcagtttatgacacccctgaggatgttcctgaagatgttaaagcaaacaaaagatatgctggagcttcaaactggactgttaaggaagttgttgagactgtaaagaatgactttggtagcattgatatccttgtacactctctcgccaacggtcctgaggtaacaaagtcactgcttgagacatcaaggagaggataccttgctgcaatttcagcatctagttattcttatgtttctttacttcaacacttccttcccataatgaatccaggtgctagtatctctttgacctacatagcttctgaaaggataattcctggctacggtggtggtatgagttcagcaaaagcagctcttgagagtgatacaagagttcttgcatatgaagcaggtcgaaaaggcaaaatcagagtgaacaccatatcagcaggtccactttaggaaatctgccgagcagaa

SEQ ID NO: 23403 - DNA, 7465 bp, Zea Mays
ccgacgcccgtccgcccgtcgcgttgcttcgatgccccccctcgcagtcgcgactcgcctcctccgcgccgttccccattcatcctaaaggcctaaaccctagcctccttgctcctgcgctccggtcgccggtgcgtcccctcctccgctggccgccggcgccggtgcaatcacccgccgccgccagtgcatccgtccagggctgcacggccacctgtgcccactgggttgtgcggtcctaacgcaagttcggcgccgaccaccgccgaactgaagccgtctgcccacacccactcgcggcagcaccgccggacggctcccggcactgcgccagtgcgtgctgcctccggtatagcggctgccggatcccgccgcggcacctgcagatttctgcaggcactaatcactaacagttactgcactgttggtatgcgagtcctagtttgctgctcatgctctaagatatgaggtagttctgtgtgagggatttgaaagatggcgtcaaaaggtccccggtcaaggctagaccatgacacaagagctaggcgtcagaaggctcttgaagctccaagggagcctcgacggccaaaagttcactgggaccatgtccttgctgagatgttgtggctggcaaaggagtttgattctgagagaaaatggaagttgtccatggccaaaaagattgctcaaagagcaaataagagcatagttgatcaagcagcaaagggcgagagaaaacagaagggaaagcaggttgtctataagcatcaactggagcttgaggagagaaagaagaaggcacttgataagcaacttgatttccttttaggtcagactgaaaggtattcaacaatgttggcggaaaaccttgtagatatgccctattctcaaaacctagaaaccgagacttcgcagataaaccaaccatcccatcaagaggtagtagcagaagagaacttaaacgcaaccattccggatgatcttgataatatggaagtcgatgatgattatgggagctccttggatgaagagccagaagatgatgagcacactatcgatgaggatgaagctcagattaccgaagctgagcgcaatgaagaactagctgctttagaggcagaagctgacctaccactggatgttattctcaagatgtatacaaaaaccaaagttactccgaaccaggctaatgggtgtgatcatgaacttgctcactcttcaagtgacgaaggcaattcttctgaggaagtggatgatggtcattcttatgctgagtttgtgaagaagaatcatggtaaaagtaatggaaatatttcttctatcaatgatcaggaggacgaagattacattgctgctgaagaagtaaaggatgacgaagcaactttgtccgaagaggaacaattggcaaagaaagaagatcctgatcatctggaagagattaagttactgcagaaggagagcgagataccactagaagaacttcttgcgaggtaccgagaggatggctgtgcagatcatgaaacagctgagttggagaattcaccccattttgttgaagaggtcaataccgacaagtctttgaatgatcaatctgtgaacattttggaagcgaaaagtgatatttttgtggatcaccaatccagggatgtgctggaaactgagcacacgactctacaatcagaaattgcatcagagccttgtgctcaacaaaattttgtggaagagaataatctcactgatgttaagacagtcaatgaagataagagtgatgatgtaattgctgatgctgcagctgctgcaagatcagcacaaccaactggcaacaccttcttgactacaaaagtgcgcacaaaattcccattccttcttaagcattctcttcgtgaataccagcatatagggctggattggttagttgctatgtatgagaagaggcttaatggaattctagcagatgaaatgggtttaggcaagacaatcatgactatctccttgcttgcgcaccttgcgtgtgagaaggggatatggggtcctcatcttattgtcgtgccgactagtgttatgctaaattgggagactgaatttcttaagtggtgtcctgcttttaaaatactgacttatttcggaagtgcaaaggaaagaaagcagaagcgtcagggctggatgaaaccaaattacttccatgtttgcatcacaacatataggcttgtcattcaggattctaaagtgtttaagcgaaaaaagtggaagtatcttattcttgatgaggctcatctgataaagaactggaaatcacagcgttggcagacattgctcaacttcaattcaaagagacgtattcttctgactggaactccactgcaaaatgaccttatggaactttggtccctcatgcattttttgatgcctcatgtatttcagtctcatcaagagttcaaggattggttctgcaatccaatttccgggatggtggaaggtcaagataaagtaaacaaagaagttatagatcgattgcacaatgtccttcggccatttatactgcgtcgactgaaaagagatgttgagaaacagttaccaaagaagcatgagcatgtcatatattgccgactttctagaaggcaaaggaacttgtatgaagaatttgtcgctagctcagagacacaagcaaccctggcgagtgggaattattttggcatgataagcatcatcatgcaacttagaaaggtctgtaaccatccagatctttttgaaggtcggccaataataagctcatttgacatggctggtattaacatgcagctcagctattcagtctgcatgctccttgataagagtccattttctcaggtggacctgtctgatatgaattttgtgtttactcaaaatgaatttagcatgagttcctgggaagctgacgaggtcatctccgcctttccttcaagtatcacctccagggactgtgacctggatattttttgctctaataaggatcatcagggaagtaatttgacaaacatttttgaagatattcagaaagccctacaggaggagagaataaaggaatccagagaaagggcagcttctgttgcatggtggaatagagttagatgccaaaagagacctgtctatggcacaaacatgagacatgttttgactgtaaagcatcctgtatcaaatattcttaataagaggaacaatccattgtgccacatggactattcatcacgccttgcagatcttgttcttccatctgtggaacgctttcagaaaatgctttattttgttgaatcatttacattcgcaattccagctgctcgagctcctccccctgtttgctggtgcagcaaaggaaagtctcctgtttttattgatccagcatatagagaaaaatgcatgtacaagttttctcccattctgtctcctataaggtctgctatcgttcgtcgtcaagtctactttcctgataggcgtttgatccagtttgactgtgggaagttgcaggaacttgctattctgttaaggcgtttgaaatcagaaggccacagggccttgatatttactcagatgactaagatgcttgacgtcttggaagagttcataaatttatatgggtatacatatttgcgattagatggttctactcccccagaagagaggcagactctaatgcagaggttcaacacaaatccaaagtttttccttttcattttgtccacacgtagtggtggtgtgggaatcaaccttgtaggtgcagacactgttatcttctatgacagtgactggaaccctgcaatggaccaacaagcacaggacagatgccacaggattggtcagactcgtgaagttcacatatatagactcatcagtgaaagcactatagaggagaacattctcaagaaagcaaatcagaaacgagctcttgatgatttagtgatacaacgtggtagctacaatacggaattcttcaagaaacttgatcctatggagttcttttccgggcacacatctcttcgtgtggaaggtcaggagaagaattgctctacatccgtgggagcttcaaatgatgtggatctggctctgtcaattgcagatgttgaagcagctattagacaggcagaagatgaagctgactatatggctctcaagaagttggaggaggaagaagctgtggacaatcaagaattcagtgaggaggttgcgggcagaccagaggaggatgaattggttaatgaggaggatggaaaacctgatgagcacattaatgaagatcacaaatactactcttctgatgtagagaaggagaagcacattactttgtctaccaatcgattaaacaatgaaaaggctcttacattggctgttggtgatgaagatactgacatgcttgctgatgtgaaacagatggcagcagcagctgctgcagcagggcaagcatgttcatcttttgagaaccagctccggccaattgatagatatgcaatgcgctttatggaactctgggatccagtaattgacaaagctgctgtcaatcatcaagtaaatgttgaggaggaagaatgggagcttgatcgcattgaaaaactcaaagaggatttagaagcggaaattgatgaagaccaagaaccactatcgtatcaatcatgggatgttgattttgctacgacagcctatcggcaacatgttgaggctttaactcaaaagcagttgttggaagaacaggaaagacaggctcaggaagcagcaaaagagttggaagagaataatgataatatgagtcaccgcagaaagtcaaacaagaataaaaagaagactggcaaattcaagtcccagaaaagaccgcgtttgtcttctgaatcagaagtcattctggaggaaacctctgtagatacaatgagcattgatgacaatgcaccctcacctgagcttataagtgatgaatcgccacaccattattctaacaagcgtaagaagattatgtctgctactgaggaagatagtaacagcagaagtttaaaaaagtttaagaaaactaaatcaagttttatttctgagttgtcacctaggccgaaggaggaccttaatgattcagatccaaaatcagtggctagaactaaaagtgatggcagactttccatcccttgcatgccagtaaagcgtgttattgtgataaagcctgagagattgaaaaagaagggaatatggtctcgagattgtgcttcagactcatggacatctgaggaagatgcagttctttgtggaactgtgcatgagtatggtcctctttgggaactggcaagtgattttcttcactccttgccaggcgggtcctcctataggggaagatatcatcatcctttgcattgctgtgagagatacagagaacttttctgcaaatatgcaatatcagcaacagataattctaacagtgaaaaggctccttctgggactggaaaggctgtacttagagtatctgaggatcaagctcagatgttggtgaatgtgaccagtgaacttcccaacaatgaattgcttctccagaaacacttcatggctgtaatttcatctgtatggagatcaaaatgttgccgtcatccctgctgttttaggaataagcctggtggatcaagtgagaactggcccatggtaaactttagaccaagcgtcaatctagttagggaagcccttgcagctggtcaggctaagtttacgctaactgtgattccaccaccgtcaagaaaccaggaatactcacggaattatttagaattagagttagatttcttgaaagatcaacatgcctatgaggaagacttcccgtctgtactaaatgtatccatactggaaccagaatcatccaaacaggctccagagccagtggaacaatcattgttatctgaactttcatgtagacaggctgagaaccgactcaggatagcgtcagaagcttgttatgatggtgaaagttttcattgggcatcatcatctttccacataaatgatgctgcccgccacaaatctggtttgaagtctatagggaagcacaaagcagcatcggaatctggtagacctcccaaatccaaagtccagaagattactgaattgcatcaggaagggccaattgccatgagtaattttctctgtatgcctgctcaactattgccaagtacagctgacttccacattagtgactccctatctgactttggtatcaacgattatgaattcaactactctgaggatctcttgcaagagtttgacgccctcgagttcttcccagatcagggtgactctggtctccttggtattgaagagttagaacctctttcggatttcacagatatcggatgaacatagatgagcaaattatggttgatgggatgctgtcctataccaagaggagacaagatcgcctctggcaggagcccaaggatataggttgagttgctcaaccatgcacagatgtgctgcaagctttatcatggctggctggagcaaagctgctggcttggtgaggtcacattgatctgacaagcttgaggatgggtttgcactaatggcggcattgggtaatttccatacatgtaccaacagagaaggtaaaagaggaggccctcagcaccacccatttgttgctgtatatcgtgttcattctctgtttaatccaatgttgtttggctattttgccactgaaaacatctcacatgtcaagttggtggatgccatctctatcagaaatttaggatgtggcgccaatgtccaaagaatgatcagtcaagtgcagcttatcggcgcattatatttggtcaggaatcaatgcatgacatcaatatgatcagaactgctgttccagtttcatttgaggaatgcaatttctggtgattcgggatgcaagtttttcataggaggtaaagagcgtgggcatagttgtacatgtaataaaatgaataaggttctgtgaactctcggtctcggttatgccaattaatagccataatttgttgttagaggccagggggctttttgatcagcgggctgctgctgtgagccggtaacaatgtagctgattgtgcgcctccatattgttttcttggtaagtggactttgcatcactgccaagcaacgatgagatagagtaattggtctgtttcgcgcaaaaatactacgagcttgtattcagtcttgacctccagtaacctgaacgctgagaatgtttggccaaccacataatacgtaggctgactagctgagaatatctagctaatcccgtaatctgtaagctgagaatgtatggtgaatcccataatctgtaagctgagattgtttggccaatcaaggtcacaatgctgcctacaagctgagaatgtttggccaattaaggtctagctgatgtccttagcagaaaacaaaattttctaaacgcaaactgttttaataatagtaagaaaacagggctccacttatttgt

SEQ ID NO: 23404 - DNA, 985 bp, Zea Mays
catccatgccatgtacgtctcctctccctagaaaaaccccgtacatcctcatccttattcctgtgatgtacagctaacttgaaaaaaaatcctcaaccatcctcatcgcccttatccagaatacgatcatcactagaaaatcttccccaccgcccatatctccctctcttatcctctcacgttactctttcctgtttccagaatccactcgacacggttcctggtaccatgggatccctgtgggtgctccatccgtttcctttcgcctacagcaacctcgctgggccgctttgcgactgtgttcagccccgagccatcgaccactgttcccaacagcgccgcgcttctctgaccctgaccccaaacatcacaaggacctgcacgcgtgctcctcatcgaagcgctcgacaaaccttgcctcgccaacgtctcgccaagttgtcagacccgtcctcgagtttggtggagtcccaagcttgcacgccgtcaactccctgctcgcctcgcttcgttgtcatcgttcactatcttcgtcctcatcgtctaccccaccgattctcacgcccaactggccatcgtgctcggcgtgttttcctccgtgcagattcgcatgttcctttcactccatccgctagtcgtgtggtagagaagatcacgttatcgatggatcaatcgtctactggagtaatttcttggaggctggtcatcaccctgaagacttgtggcaaattatttttgttggggacttgttctcaaatgctgagttaagaacaaggcaacacaaatgttaatggttaaagaccttcgtctttcgaagcattatctccctgcggatataatgatcttcagacgaaggttatgaaggacataccttcataatttcagtatgtaataatgaaagcagaaacatatgaaacatagaaaagaacatgttaatcacattaaaccatcagattatttgtgttctcattatataatcatgaac

SEQ ID NO: 23405 - DNA, 2130 bp, Zea Mays
gatgcagttttggaatatatatgcagctttcaccgtatgcacgaaatcagctgacaaaccaagtttgggagatgaattggatacttctggtccatcaaaggaacatcagaatgatctcattacagagaagcaaaagatcccagatcttaagagaaggaagcatggaagactcagtaatagtttacagaagaaggctgagaggctaaagtaccttgagagtagaaaggctgtcaaggttggaaaacagcgagatattaaaaaagtgctccctttgcacagcattctgaagaagtacacaaaacatacgtctgttaaaatggttaaggaaaaacatgggaattcaaaaggcactggagtcatacaactctgtcgcaaatcagtcaagcgtgtcaaattctcagaaacagatgatgccaaaaagcaatgttccaaaagaccaccactggaaagcatccgcgagcttctctctgctattagttcttcttcgtcgtcatctatagagatgtcaagtgaagaggaacatgttattgcggaaagtagtagttctcacatgacagagaaagctgtcactatggctagcgaagcaaatgagaacacaaatcatgacaatcaatatgagctcagcagtaccagattgtccaccggtttgcttgatctgaatcaagctcttccagaacctacggacttaaacaatccatatgttccaaattcagaggtttcaaatcttgagcaggcacaggtaggaacttggaatctggatcaacaagttcttggtaatggaagaaaaaacatagactcatcttttgatctgcatggacaggaacaactgagacattctactgagttggacaccacatcaaaaggcaagtccccttgtactctgtcaaacggattccaggattcagtgcatctccaacagaattggagctctatgactttgcatcatggtgtctctcaactctcaactggaggtgaaccatcttcctttgaagttcgagaaagtaatatatcacacagtgagaaacgaaattttagttctgaaacgaacgtggaacaagagttgaggccttctgctggacaaaccttgcgcttgatgggtcatgatcttacagtatccgatactagagttgactatttatctgacgcggcacagaatcacacaaataatactgcagaccatcttaccacaaaggtggtgttggaattgccacgacaaggtcagcctttcctagcattacaaactcagagtattcccagtgtttcagcaagttctgcaaggacagctcaggcacattttggatacagaacaacacataacatcagccacccgttgctcgctgccaatgtgttctctggtgatccatcagtatatgaagacaggtgcagggacttcacaaacttgcaatcacatcgaaattctatattgggatatcctcctctttccaatcatggcagtgctgcatttcttcagaattcaccaccttggcgttattactctgatcattccaccaggagagattcactctcagcgccatttacaccaacagtgatgcagcatgtggcaacaccttcagattaccgtgccaatctgcctcatcagtcatatggtgtgtactctggaagctcaacagttcgacctcttaactctgcaagttttacatgcacaaaccagatagtacaagcagttgacagtagggctactgcaaaccttccgtccagaagtccaacaactggaacgacaagaactcatcacaactccaatacttcatctagcagccgtttggttctgagatcaggccctgtaaagctcagtgccggggcgaagcatatcctgataccaaatgagaatacggaggacgacaattctgcaccaatgtactcttgtgtgtcctttggcagcagtggtgggaatgtttcggcagcttatcagaataaaggagcaggttcccataggcatcagaataaaggagcaggttcccgtaggttctgatccaaaagctggattatcttgctcgttcgttttctggacagctgctgggcaagaggctgcatgttttgaaggtacgtctctagtcagagttgttgcccatctgacgatcacgggcatgaccaatcgttggaatctgtcgg

SEQ ID NO: 23406 - DNA, 2980 bp, Zea Mays
acaatctgaatatctgataattttactcagatttaccatgttgatggcaaatttggcccattcacacttgtatcactgatgggtatgtggagtggggaacacacagagcgttcggaggccacagctaacgagtctgcatcattgaatggcttagtgggtgacatggttgatgatgatgttagccatcagctgcatgcagggattatgaaatcagctcgcagggttttaatcgatgaaatattcagctctatacttccagatttaattgtttccaagaagactgagaagcaacttgctgcaaaacttaagaaccaagttactaagtctggcagtgtgagcaacaagaaggattccacggctaaggtcaaagttaacacattgtctactattccaaaaaaaggaaactcctataatacatcccaggtggattgtttagcggaaattcaatctacagcagtgcatggtaaatttgctgatatagtatcagcagtttggcaaacagtctatcacgaatccatgaataatgtatgggacgaaatactgtctgaacgtgttatggactactgtgatgtatggttacagagaaattgtatattgaatctgccctctacaagtatttccgtcatctctgatgataacataaaagcccaaggcagtcatgaattgtcaccaaaggatttagatgctactgaatgtgacatggactttccacctggatttggaccatgttggaaatctcctgagagctccctctctccatccctattagaagttaatggaagtgctaagttggatgggaagtctgaatcaagtaccacattattttctggccccttagcagtagtccagaggatgctggcaaatgaactatatatctcatcgaagcaatctttatttcactattttgaggaggttattgcagacgatataacaaattgtttatgctttggacttgaaagcaatattgatcaggaacagattggtactcctatacacgcaccagaatcacccatttcagccgaaacgtctatgcatgaaacagccaattccattgagatgactggaggcgatgtactgaatattgttgaaatagccacgtccacaagaaccagtccacttgaaatgactgtagatgaaaagctgaataccgttgaagctacaagaaccagtcgaactgaaccgacttcagttgaaacatcaactgttgctgaaatggcaacagataaaatgaccacttatcatgtggaagagcacttatccatgtcgtatgcaagggtatttgaaaagatgaacatatgtaagacagcagaattggatgagaaatttgatgaagtgcctcctggaatggagactggcttagtccctttaccacttatggacaaaaatatatatcagccttcaaagtcagtgaactctattcctttgatttctagatatataacattggctctctgtcggcaaaaactacatgagaatgtcgtgagagagtggacatatctcttctcagatacaattagcaagtgcttgggctcatggtacaccaggagaaatgctgtacctaaaagcgcagacggatcatcaaaactcaaagaaaaaacatactacaggaagaggaaattcgagaaaacatgtcaagcaaaatcatcaaaaagaccagtggaaatctcaatggacgagcagctttcaaaacctctctgtcagcttgttgaccgcaagatttatgtgaaaaatatccaagaaccaaacaaatctttgacatcaaagagagtttcatttgtggacaagccctccgaaaaaggagccaaaactgtggctaatgatgcttatgatttgaatatccagcaagatctgacactcctttccagtgaggtgccaaaagagccaggtcatctcatccaactaagaagcatatggttgctaacaggacacctacggtgaatgataatgtggcgaataatagtatgctcacgaaacatgtcaagaaaaaaaagggcaggaacatttccagtgagaccagtcagaaggtaaaaccggtgatctcatgcccagaatcagatggttgtgctagagcttccattaatggatgggagtggcgcaattgggcacggaatgctactccgtcggaaagggctcgtgtgagagggtaccatgttcggactattctttctgcctcaaatgataatgtgtggaaaaattctcaagcaaaggtttcatctgcaagaacaaatcgggttaaactgcgaaatctgttagcagccgctgaaggttctgaactgctgaaaattacccaaatgaaggcaaggaaaaagcgtttgcgttttcaaaggagcaagatccatgattggggtctggtcgcacttgagtcgatcgaagcagaagactttgtaatagaatatgttggtcaactgattcaccggcgggtatctgacatacgtgagtctcaatatgagaagagtgggattggaagcagttacctctttcgcttggatgatgattttgtggtcgatgccactaagcgtggtgggttagcaaggttcataaatcattcttgtgagccaaattgctacacaaaggtgatcactgttgatggacagaagaagattttcatttatgcaaagaggcgtatatatgccggtgaggaaatcacatataattacaaatttccattggaggaaaaaaagataccgtgccattgtggttctcggaggtaaatctgttaatcactatacaggaggcagaaggcttttcttttttgtcagctgagacctatttaataagataatgtgttgcaaatggtgttacgggtattaaatttggccacccttgtagtattattgatgttattggcactacttgcatgtctacataataaaaaaatcggagccaacataaaatgattttcgtactaaactgtttataatgcgagattataatcaaagtttttctaggtgctaggcggaatctaggcgatgacccttag

SEQ ID NO: 23407 - DNA, 3214 bp, Zea Mays
acacgacatccaaatcgaagaacacgtcgctgacacaccacctctccctcgccgcattctccactctctggtcttcgccgtggtcggtgccttccaaatccaaaaaaccccaagccctagctgtagccgtcccccaaggtcgccgagatgtcttcgtggctgcgcagcgcggtgagccgggcagtggaggccggcggccgcagcggcgtcgcccgcgcggtcaaggggtacgccgataccgtcgcgcaccacgccggtcaggccgtcgcggacatcctccacgaccgcatgggcgttcagaactataaaagtttcaagaagacagtagcacgattggaagaggctgctgtatcatgccgtgggggtgaaagagttgaattgttgaaacgttggttaggagcattgcaagatgttgatgctgaaaatggaagttcagatttaaaggtgtctgaagctaatgacccttctggtgaaatggacactttgaaagcacaaactgttttgttctatgatgctgatattgatggtgcacctatgaatttttgtgatgtattcttgtacagccaagcacttgaaggtattacattgtccatgattctcgaacctccttctgaggaggaagtttcactgcttttggaaatattcagcatatgccttactggagggaaagaagtgaacaaagaaatcatgagtaatgtacaagacttggccaaggcattttcagaatacaaagatgaagtcctggtgaaacgtgaagagctgcttgagtatgcccaaagtatcatttcaggactgaagagaaatgctgacattgtgaggatagatgctgaaaccctagaattgcagagaaaactagacgagaagcagaaatcacgaggtcaatcacctgaatatcaagataaaacgtcagataagattgctgctgcaaatcttgaggtcttcaaagaagcacttggtgaactccgcttatgctctagagttgaagaacttctgctgaagaagaaatcaatcactcttggtgactccctggagattcattctcagaaggtagataaactaaaggttttagcagattccctggcatgttcatcctccaaagcagaacagcgtattttggagcacaggcgccagaaagaagatgctctcaactttcgtgtgaaaaaagagaatgaagtcagtgtttctgaaaaggaattgcttgatgagattactgaattggaaaagcaaagagatgagcttgaggcacagctgaagaaggttaatatatcactaaatgctgctgctggacggctcaaacaaactagggaagagagggaccaatttgacgaagcaaacaatcaaatcatatttagcttgaaaaaaaaggaggatgacctctcaaaatccattgccttatgtaatgtggaatccaatgttgtcaagatctggatcggtttccttgaggactcgtggaagctgcagtcctcatacaatgaacagaaggataataaaacgtgtgatgagctggagaaatgtgtgagtgattttctaaagttgacaaaacatcatctttcagcattcaaggaagtcctaagccaattgattgagaatatcgaaacatatgtcggtaacttggctgtcttaacctcaagggaagaggaaaaagaacatggggatgatgaggcatctgagaggacagatccacgtaaatcccttgaagaggaatatctagaaacagaaaagaaggttatactcagtcaccttactttaacttggtctcatacatggttcttaaagcggtaaggcgaggtaaggcattgaaccaccgctggacgcctaggcgccgccaaaggcgagcaaggcgacaccttatcaacatgagaaccagcaaaacagcagcatggaggaggaacaaaaagaaaaaaaaagaaaaaaaggaaatggaaaaaggagaaggggtaggagccccggccaaccggcaagcccatatgctcactctgtttccctctctctcccccgattgagctgctgctttccttctcccccttttcagccacggcttccttctctcccccagattcagccgctgccactcatgatttcgccgccgccacccccgatttggttgccgctggccccgattcggccaccgctgcccctgatctcgccgccgctgccccctgaatcctcgatttgccgcctccagccccgattcggccgccgctggcccgattcggcgccgccccttttcatcccctctgttctcttgctgatttagttaggcgacggggatgcctaggagagttggggggcgcctagacgcctaggcgacacctttaaaacagaggtctcatagttctagttcattcataacatgatttgatatgcctgaagaacccaaagttgaattgacatctatcagtcgccatatattataattgcgttcagcatagttgatcacataaagaaattgttttattctggggaaggggctgattcaaggagagatgacccagaggtcaagagcttaattgaggagattgagaaaatgagggaatcgttcgagtctatagaaaggccaacactaagcatagaatctgagaaagcaaaaccactacctgttgagggatcgaaactgagtccttcacctcttcaggctcctgctaccccaaaagctgcacacgttgactcaccaaaatctcccatgaaacctgagcagcatttcgattcagatgcggagcttgcaaccctgggatcagagatcgggaaagaagacaaagagtactcagttgaggagataagcgggtgggagtttgacgagctcgaagaggaccttaagagctgacacaaagaatcgacaaacagaacacaattcgatttggttatcttcactgacatgtattatttgtctgggccttgcgtgggcaagaaatacacactggttgatatgtacatagtgctgtttgattgtgtattgtcgcgcactcgcgctgtcaatttgtcactgtcttaagatatacggactgagctggtgtaacttgggcgaggcatttgctatttgtttgctcttgccgcgaatatttttatcttacatgtataccgaaccctgttgtaacagttgtaaacgcggaaaacaaaattcgaacatttgacagaatttgctccgtagaacattggattgttgggtttgagttttacattgcattcctaatggatgaatctatcaggattcagg

SEQ ID NO: 23408 - DNA, 201 bp, Zea Mays
ttgcaggtacctccttgatttggttgatggtgtgacttggccttcatccctgtcaccgggatagacggtcgagtgggttactgcttccgcaggagaggaccaggaggagtagcgtggcttggcttcgccatgttactcggttttctccgttagttatttccgctgcattaaaaatttattgttattatttctgaaactccg

SEQ ID NO: 23409 - DNA, 3007 bp, Zea Mays
ggataagcacatctggctgctctcaagctcaggctgccgaggtggcattggaagaggaaaaatgttaagcagtgggtttagtggtgggggtgggcatggtggtaaaggcggtgatggcatttataatggtggtcatgtagagggtggatctgcgtatggtcatgctgatttaccatgtgaacttggcagtggcagcggtaatgtcagtggatcttcaactgctggtggtggtataatagtgatgggttctttggaacaatctctgccgaacctctccctttctggctcgattgaggcaaatggtggtaattttactggtttgatgtctcatgccacaattggaggacctggtggcggttctggtggtacaattcttctttttgtgcggacattactcttgaagaaggactctgtactttctagtgttgggggagttggtggcaatggcagtggtggaggtggagggggtcggattcacttccactggtttgatattcccactggagatgattatattccttttgcaaccattaaaggaacaatacttgcaagaggaggagtcagtgaagggcaaggtttctctggtgagaatggaaccatcacaggaaaggattgcccaaaaggtctttatggaacattttgcaaggaatgtccctcaggaacatacaagaatattactggatcatctaagtccatgtgctcaccatgccctccaaatgagctacctcgccgtgctgtatacataagcgtccgaggaggtgttgctgaacccccatgcccatacaaatgcgtgtctgatagatatagcatgcctcactgttttactgcccttgaagagctgatatacacgtttggtggaccttggttgtttggtctgcttctgtctggccttcttgttttattagctcttgttttgagtattgctcggatgaagtttgttggtactgatgagttgcctggaccagcaccaactcaacagagctcccaaattgatcactcttttcccttccttgaatcactgaatgaggtattggaaacaaacagggcagaagaatctcactgtcatgtgcacaggatgtatttcatgggcccaaacaccttcagtgaaccttggcatctcccacacaccccgccagagcagatttcagagattgtgtacgaagatgcatttaacaaatttgttgatgagatcaatgctcttgcagcctatcagtggtgggaaggttcagtttttagcatcctatgtatactttcatttcccctggcatggtcgtggcaacagtggcgcaggagaaagaaattacaaaaactacgtgaatttgttcgttctgaatatgatcattcatgtttacggtcctgccgttcgcgtgcactttacgaggggctaaaggtagctgctactccagatttaatgctgggttatttagatttcttccttggtggggatgagaaaaggactgatcttcctcctcggcttcatcaaaggtttccaatgtccctgatctttggaggtgatggaagctatatggctccattttcacttcatagcgacagagtggtcacaactcttataagtcaggctgtgccatcatctatatggcatcgtcttgtagctggattgaatgcccagttgcgtttggttcgccgtggaaatctaaacacatcacttctccctgtgctcaaatggctagaaagtcatgcaaatcctgaattgaacacgtaccgtgtgcgtgttgaccttgcatggtttcaaactacagcattaggttaccttcagtttggtcttgtccttcatgctgtcgggggagtggtggctgctgaactccaggatggctgtacaagtaaaaccgatcagcattcagtaaaccagaatacatgcactgactctcaaatgggccactcaaggaccaatgatgttctgcgtaaaaggataactggcaccattctcaatgttgacaacttaaggatgcttggtggcaggagaggtttcttttaccttctctctcttatcttgcacaatacaaaaccagttggacatcaggaccttgtcggcttagtcatctcaatactgcttcttgcagatttcagcttagtcttgcttactttcctccaactatattcatattctatggtcgatgttctgttagtcttgttcattcttcctcttgggatactagcaccatttccagctgggataaatgctctttttagtcatgaacagcggcggtcagctggtcttgctcgtgtctatgccttgtggaatattacatcactggttaatgttgttgtggcttttgtatgtggatttctgcattacaagtcatcaagcaaaaaacatccaagcatgcagccgtggagttttggtggggaggaaaccagctggtcgctattccctataggacttgttctatgcaagtgcattcaagcaaggcttgttgattggcatgtatctatcttggagatccaggatcgtgcagtttatagcaatgacccaacaatattttggcagtgaaagcatttcgatttacaggagttctcatgaggagagcttaatgcaactcaagtttttgtgggagttgataaaaggaaggctatggagttagtctgttctttgtccgcccagtcaggggaagcatgtacaaagtagatgctggtaattgcctgcctatatagacttaatgacttacagtgcatggtcaaccttttgtccagtcactcacccagctttgttttccttgtacataggaaacgggtttaattagttgaccgattcgttgtaggatttaggatttagacaccatagaattatagattacccaaggtaatctcaaagagatggtggaaaacatatatacttcttttgtttaaagctttgtcttttgcattgatgttgagctgggaaacgggtgaggcatcaaatagagcttttttcccctctgttaagattaagacaaatgttaacgtgctgatgttttattcaagatctggttgccatatgttcccgtga

SEQ ID NO: 23410 - DNA, 2145 bp, Zea Mays
gcctgcaactctctcgtcccggcaaaggtcacaccttcctccctcgtccacatccgtgcctccagccaccggccgcctagggcggcgctcttgccaccggctgtcgagcccgccgaccttgccgccgtttccacgccgcctgacctgcccccacgacctgctgccgtcacgccatccgacctgccccaggacagcccaagcccccgcgaggccgcgacctgctggggaggagattgataggagaggtggtcggcggcgtggataccaacgacggagacatagtgattgccgcccgtcgtcccctgtttccgacacgctgaagcctcacgccacgagcgagcagagggccccaactgccagcagcaaccttaggcactggttgcttgaagtaaccaaacattcggacgcgcataaaatcgccacgcacgcatcgctggttttgccgtcgcagagcagaaggcactccgggacggcagcgtgctctgcagacgctgaaggcaggatgtggctggaagaggtgaggcggagggagcgtggagagcttcgcgctcggcggtttgaggccgccgcccgagcgtgccgcacggcttcgctcgcgctctccaatcgcaaggagtttgtcaccccacatcacggcgccgtcaactcgctccaggttgatttgacagaggggaggtacctgctctccggggcatcggatgggtcggccgctgtgttcgatgtgtggaacgcgactgaatacgaaaccgggttcatagcaaagcacaggaacatactgcttgtggacaagcaacaccagaatggccacaagttcgccatctcggcggccgtttggtatcctgtggatacggggctgtttgtcacagcatcctttgaccagtttgtcaaagtttgggatacaaattcgactcaagtcgtcatggaatttaagatgcctggaaaagtgtacactgcagccatgtctccaatcgcaacaacgcacgtgctcattgctactgggagtgcagatgttcaggtccgtctatgtgacattgcttctggagcctttacccacacgttgtctggtcatcgtgatggtatcatgtctttggagtggtctgcctcaagtgagtggattttgatgagtggtggctgtgacggggcaatacgtttttgggacattagaagagctggatgctttcgggttctggaccaatcaaggtctcaacttggaaaaaggccccttgttaaaagtgctctatataaggatcacacagattccttaggaccttcaccttccgcaaggagaaggacaggcatttctaagaagagttcatcagctttgcgcaaaattcaaaacccgacacatggacacatgcaacagagattgcatcctggtttgtcatctagtcaaaaccgtgctactgctcattatggtgctgttactggtttacgaacaactgcagatgggatgtaccttcttagctcaggatctgattctcgcttaagactatgggacatcgattcaggctgcaatacgctggtcaattttgaagctatgcgattgcagacaggcaagccattacaattagctgtcactgaggatccttcacttgtatttgttccatgtatggcaagcatcaaggcatacaatttatggtctggtaaaacatttcaaacattccgggggcactatgaacttgtgagttgctgctactatagtgaacaggaccaagaactttatactggcagcaacgacaggcaaattcttgtgtggtctccatcaactccagcttttactaaaatggaagatgatgacaagatcctttctgcagctgatgaggataactggagcgactgagaaaccctggagccgggaggagtgtgtcttgtatctactgacatcgatgttactgatgttaacaaataacatgtcgaggttgttaggtcttgttagcagcccctaaatgatgatattgtcttggtgtattttcaaaaatatgtacattaccatgtgaaaatttgacagatcattgaataatttgtagatttatctcaggaggatagagggatgtttgacgttcgccaaaatgttgtttagccctggagccttgttttcttcactgtgtattaatgctttacccaaaaataagaatttttctgagc

SEQ ID NO: 23411 - DNA, 1734 bp, Zea Mays
ttgccatatttgtttaagattgatgaactaatatccattgaccatgacatcaatgttccctagagtaaatgcatcaaaagtcggaaggaatggactttcagtagttctatttgatgcttatagtatactgaaggggatccacaagagaggaagcattgggctctcttaccgatgcttttgaaagttttgtgcttcttggtttagtggaaaacaaatatgtcacactattgagccagttcatcaattcaattaaaaggggatctgtaaaagaggtgtgtctggcttgtcgctgcattggcttactggcaattacactaggtgctggaagtagttcgcacgaaataatggatgagtcacatccacatcttttgagagttctccaaacttggcctgacgcacaaaagatgatctctgcacttgattgcttagcagttgtcacatttgttggtgcaactgatcttgctgaaactcagctgtctctgaaagccatctgggatgtgatccatccaaaatcaggatcaaatgtcggcgtagtcagaaaaccgaagcctcctttgttagcagctgccgtatctgcatgggcatttcttttaacaactattggttcatctagaagaaatactgattcttggaaagagccaattacatttctctgtagccttctagaagcagaggaccgtgctgtgcggattgctgctggtgaagcattagctctgtgttttgagctaagaatgtttgatgtttcctctagtgacgaagctgatgttgacagttacactggagaggctggtggttctaagcatcaacttttcttgaatatgcaagcattgaaggccaaactatctggtctagtctatagtctatctatggaggcggggggcaggggtgctgacaagaaaaatcttaatgatcagagagacctgttccaacgaatctcagattttattaagagtggtgagtgccctgaagaatcacttaggatttcaggcaagaatggcattttaagagttacatcatggcgtgaatcaatacagttgaactatatgaggcggtttcttgggcggggattcctgaagcattcacaggacaacgatttgctgcatgaggtctttgacatcaaaattgatcgtactgaaaacatgtcagccaccgaaaagaaaatgttcagatctggagaagagaaaggaagagctctgaagttgaataaagagcgtcgtctagctcaggagaggaagcagcagaatatcttgaacgagcaatatggatagaacctacccggaagactggagttttgtacagtggaactgttaccagatggtgagtgctgtgtgtgtatgtgacggtattgatgcatttgaggtgtattgctccggtggcggtactacagcgacatgtttgaaattgctccgaaatactattgagttttgtagaaagtgccatgttccctgcactccctagtgtttcctctgcatgcgcaaaggagatcttgagttcagttaatcacaattgtacagttccatagggtagagatatgaggtgattgtgaataacacagaggtcgtctagcctaagggcaataattggcgaactcttcctctagccgcaataattggtctgcaagagatttcgaaatgcgttcgctctctttcgtcctgaactttttatcttgtccattctccctccgtttctttggaaacaacaatattgattaaattagatgaactgtgcatggat

SEQ ID NO: 23412 - DNA, 2782 bp, Zea Mays
atctctgcttcgaacgttcacggagacacgaggctggaggctgcagcgctaaccctagccggcgtcggcggtggcggccagcgggaggggagctgccaaacgcctaaccctaacggctgcaggcggctgggcgcaaggcatccgtggccagcgtgccgcgcgcacgagcggacagttgcggcggcaggggcgcagggcgcgacctcggcgcggtgggcgcgggcgcaccgctgagcaggctgtagggggaggtgggattggattttttttgacgtggaagttggaatactcaagttggaaattctgctcctccactgccgccgccgctcgccacgtgctcgggtctagactcgtcggtttattcgccaggtcttcgttgtgcccttcgccggcgaccagcacgcaccagttactgggtcacgcatgtcgtctgctgctgcggtggacgagatggagctggacggcattgagcggcaccgggataaggagaggagggagaggcataggagggaggagaaggatcacaatggcagtggaagaagggacagggagaaagagaaggacgaccggagaagggacaaggatgatggcaagcatagggatagggatagagatagggagagagacagggataaggatagcaagtacagagaccgggataaggagccagagcgtgaacgtaaccgtgaccgtgaccggggcaaagatcgggagcgggaaccagatcggcagcgtgacaaggaccgtagcaaagaccgggataaagaagcagagcgtgataaggaaagggagcggagggacagggataaggagagaagccgcaatagagacaaggacaaggataggacgcagagggaggatagggatcacgagaagtcaagggtgaagggtcgtggagaagacgaagcagatttatccaagggcgacaagggggttcagaagcagagagttgatgcctcaggggatgctgagcagcccgcagcagatgagctcagagagcgcattgcaagggcaaaggaggaaagattgaaggagaaaaaggaaggagggatactggatggtaatgacggggcttctgagatactgtcttgggtgggaaagagtcgtaaacttgatgaaaaaagacaagctgaaaaggagaaagcattacgtcttgcacgagcactggaagaacaggataatatcttggcagaaaatggcgatgacgatgatgacgataaagaggaagatacacaagtgggagatcacttatctggtgtcaaggtgcttcatggccttgataaggttttggaaggtggtgcagttgtcatgactctcaaagatcagagtattcttgccaatggggatatcaatgaagacgctgacatgcttgagaacattgagattggtgagcagaaacaaagagatgaagcttataaggcttcaaagaagaaaggaacttatgatgacaagttcaacaatgattcatcgtcaaaaaagtcgatactgtcacattatgatgaccaaatggaagatgagggcgtgacccttgatgaaggtggacgtttcactggtgaagcagaaaagaagctggaagagcttcggaaaaggattgaaggtggttatgttcagaaaaagacagaagaccttacttccaccacaaagatatcaacagactattttacccctgatgaaatgcttaaatttaaaaaaccaaagaaaaagaaatccctgaggaagaaggagaagctggatctggatgcacttgaggcagaagcaattgcttctggattgggggccgctgatcgtgggtcgaggaatgatggaaagagacagtctgctagggaggaagaacaagcggctgatgctgaaaagagaagcagtggttatcaaactgccattgcaaaggctgaagaggcatcaagagcattgcgcggggagaaaactgcacctgctaaaccagctgaagaacttgttttcggtgatgattatgaagatctgcagaaatctctagagcaagcaagaaagttggccctaaggaagcaggaagaggcttcagcttctggtcctcgttccatagtcgaactggctactgcaaccaagagccaagaggaaacagaagccacagaaggagattcagaacagaataaggttgttatcacagagatggaggaatttgtgtggggactgcaattgaatcaaggaacacgcaagccagaagacgatgtgtttatggatgaagatgatgatgccatgccttcagataatgttgcaaaagatgacactaatgggttggcagagatggaagaggatgctctgacagaaataccagccaaggtcgaagaggatgaagtcaaaccagatgaggttatacatgaagttgcagtaggaaagggtttagctggtgctttaaagattcttaaggagcgaggaagcctcaacgagggaacagattggggaggcagaacaacagacaagaaaaagagcaagcttataggtgtcgaggatggacctaaagacattcgcattgaaagaatagatgaatttggcagagtgatgacacctaaggaggcattccgtcatctttcgcacaagtttcatggcaaggggcctggtaaaatgaaacaagaaaaacgccagaagaaatatcatgatgagctgaaaaccaagcatatgaaatcttctgacacaccattattggccgcggaaaagatgagagaggctcaatctcgtaatcaaacaccatacctcattttaagtggcaatgcaaaaacagggtttatgatcatctatatgaatatgg

SEQ ID NO: 23413 - DNA, 1115 bp, Zea Mays
aacaaaccaagatcttatcatggctcaagggggtgtaaccttgttgtctatgacagcatctgatgcagaggatccacaaactcttagaatggtggccggagcaatagctaacctttgtggcaacgcagacaaactgcaaacacggttgcgggtagaaggtggaattaaagcgttgcttggaatggttaggtgtgggcaccctgatgtccttgctcaagttgcacgtggcattgcaaattttgcgaaatgtgaatctagagcagctactcaaggaaataagatggggaaatcactattaatcgatgatggagcgcttccctggattgtaaaaaatgctaacaacgaagctgccccaattaggcggcacatcgagcttgcactgtgtcatttggcacaacatgaagtaaattcaaaagacattatcaatgaaggtgccctatgggagcttgttcggatctcaagggactgttctcgagaagatataaggaatttggcataccggacattgacatccagccccactcttgaagcagagatgaggagattaggaataaaaatgtgataacagaacagagtgcagctggggctcacactatgaagttccatttctcgtgcacatacagaggtgtccgttgctatgggcgctggtaatcaagcacatcttcccttgatctacctgattttggcaggcatacacgggcaccgcactgactaatcagaagaggcaatggccttcgcaccaactttctcctcgagagttcatttttctttggtttgagggggcagttgaaaatctcgacagcactagcaattcgtttattttgtaaaataatgctagcatagcagatgttacctacccccaatgcagggtttgtaaattttttgctgtaaaaatatcaaggccaaaaggagtgctttcgcagtttgaagcataactgtattccctgatccctagaaggtttaacttttatttatttatttatttattgattgcagatgagccatatttgtaactgattttgtttctttcttaagcgttgacactgccatttcttttacactatctgctctcagatgatctatgtgagacacagcttttggaatgcgaagcgaaa

SEQ ID NO: 23414 - DNA, 846 bp, Zea Mays
gactggaagttgtacagactgatggtaagctggcgggaaaggaacttctgattggctgtttagctcccaattcggattgcttagagaaattgcatgtgtccaccatactgctagtcctttcattgtatgttctgaaatttggagtcaactcattaatgaagtcatcatctattatattgatcccagttacagcatccacatcatactttcttggctgacaagagacaccttcactacccatattcaaccgttgatcaatcataaagacttcggggaggtcagacattgtatcctctatgtgaaagaatttccttaacttaggtggtgagaatatcttgtcattttctacacagtcaccatgcaattgagtacatggattagggaaagcaggattactaactgcaacggaaaagtcttgtgcggcacgccttttctttttcctcggagactgcagcaaagtactactgatatctgaatcaacagaagagcattcagtcattacagactttgattcacctagttcaccgaatttgcacaaagcactgaagagagaaatgctctgcggtggcaaatgatacttttcaacagcctgagtacgttgctcatgtgaccatctgaggaaatccataagactgccagaagaaagtatcatgtgtgcagacagaggactaactgaagggaatgctgtgagaaatgactcaaccagactttccgattcagttatttgtggacaaagagcctgatttatcctaacagcattcctgatgcaattgagaatgatttgatctgttgatttgggcatttctgagaagaatagctgcaaattcatgtccaggttaacagctg

SEQ ID NO: 23415 - DNA, 2290 bp, Zea Mays
aaatttgacaacagcatgatgtgttgtggaattttgtacagtaaaaaatgacattatggcattgacatagcttggggaaaaatgtcatttccacacaaaatgttgcctgtcacttttgtttgctctaatcaaggtcaacctggtgttaaatctcataggtactgcaagaacatcattggttgtgacaattggtccatctccaagacatcgtggggaaactaccagtacaataatgtttggacaaagggcaatgaaagttgagaacatggtgaaattgaaggaagagtttgattacaagagcttatgtaggaaacttgatattgaattggataaattaattgcagaaaatgaaaggcaaaggaaacattttgacgatgaagttgagagaataagagctgaagctcaatgccgcattgctgaggctgaaagggaatgcaaaatcacattagagaatgagaaaatgaagtatcatgaagaatacttagactcaataagaatactggaggagaagtggaaagtacatcagcaatcacccaagaaacaaaataaagaggctgagtctacatccaatgatactggagaagtgcataatttactgcagaatgagaaaatgctacgtcaatcggctgaagatgaggccagtgacctcaagaatcaaatatcacactggaaaaagctggaggctacagctacagctgagataataaaactacagaaaatgctagatgctgaagctagccagaaagagaaacttgaagaagaaataggtgttttgagaagccagttattgcagatgagtatggaagccgatgagacaagaagtcttgataaaggagatgggccaggaaaaatatttcctgggtttagattcattgggtgtctcagactcgaggtttcacaacccagagagcaaggacaattggacagaagcaaccgattgccaaactctttgaacaagttgggttacaaaagatattgtcattgcttgaatctgaagaacctgatgtccgcgttcatgcagtgaaagttgtcgcaaatctggcagctgaagaggcaaatcaagaaaagattgtagaagcaggtggcctcacttccctgcttatgctacttaggagctctgaggatgagacaattcgtagagtagcagcaggagcaattgctaaccttgcaatgaatgaaacaaaccaagatcttatcatggctcaagggggtgtaaccttgttgtctatgacagcatctgatgcagaggatccacaaactcttagaatggtggccggagcaatagctaacctttgtggcaacgacaaactgcaaacacggttgcgggtagaaggtggaattaaagcgttgcttggaatggttaggtgtgggcaccctgatgtccttgctcaagttgcacgtggcattgcaaattttgcgaaatgtgaatctagagcagctactcaaggaaataagatggggaaatcactattaatcgatgatggagcgcttccctggattgtaaaaaatgctaacaacgaagctgccccaattaggcggcacatcgagcttgcactgtgtcatttggcacaacatgaagtaaattcaaaagacattatcaatgaaggtgccctatgggagcttgttcggatctcaagggactgttctcgagaagatataaggaatttggcataccggacattgacatccagccccactcttgaagcagagatgaggagattaggaataaaaatgtgataacagaacagagtgcagctggggctcacactatgaagttccatttctcgtgcacatacagaggtgtccgttgctatgggcgctggtaatcaagcacatcttcccttgatctacctgattttggcaggcatacacgggcaccgcactgactaatcagaagaggcaatggccttcgcaccaactttctcctcgagagttcatttttctttggtttgagggggcagttgaaaatctcgacagcactagcaattcgtttattttgtaaaataatgctagcatagcagatgttacctacccccaatgcagggtttgtaaattttttgctgtaaaaatatcaaggccaaaaggagtgctttcgcagtttgaagcataactgtattccctgatccctagaaggtttaacttttatttatttatttatttattgattgcagatgagccatatttgtaactgattttgtttctttcttaagcgttgacactgccatttcttttacactatctgctctcagatgatctatgtgagacacagcttttggaatgcgaagcgaaa

SEQ ID NO: 23416 - DNA, 2596 bp, Zea Mays
cccggctccctcgcgctcctaccccggcccccaattccaatctcgccgccgccgggttgccgtcctgtgctccgcttcgcaccgccgcaccgctaggaacagcccgtgctggagctgggggaacgaacatctcaacctccgtcacccccataccgtacaagtattcctatggagacgatctcatcttgtcccatctgcaacatacaagttcttacggctgagctggaatggcatgccaatagccactttgatgatgatcaactccaaatggacatggaattagcacatcagatgtcagttgctgaatcaagtacagatgccatgaacgacccaaaacattatagtggatcattcactagtgactctaacgctctaggggctctatcgagtcatagtggatactcgcaccattacagtgagctactggatgaacaaatctcttgcttggtccgagcacaaattcgaagcaaagttcaagaggtggaaggcggtattttgagcttgttgaggagctgcttggagtcagaagcgggttcctcgacaagtatgatatcgtgctatattgaccatcatcagagcctttcatcagaagataagggatggggatgtggatggaggaacattcagatgctgagctctcatctattgaagcaaagaccagaagctagagaagtattatttggtggttctggatttgttcctgacatcccttcactccagaggtggcttgagattgcttgggacaaaaaatttgatacaattggctccagccactttcataacaaaatttatggtgccaagaagtggatagggaccacagagtgcgctgccctcttccgctcctttggtctccgtgcaaggattgtagattttgatagcacagaatcatctgacctccatagtaacaacggaagccgtgcagcgagccaagtacgaggacctatggacaagttcttgataaagaataagcctccaaaatcatcatctgaactttgtcgagaggatgctgaaagtacgagaggccaacaggcccttgttgactgggtttggaactactttgcaagtgagcgctctgacagattagccacacagcgtgtcactgttagcaataaaacaccattgtatttccaacatcaaggtcattcaaggacaatagttgggattcaaaagaaaccggatcgtcgtggatctcaagaacaatacagccttttgattttagatccgggccatgtaagttacagttagcattcattctattggtctgaaactgttttccctttatcgtcagttagttgtgatttagtttcacgttctatttgaagctcagcttatggtgtaagttggttggtttcaaagctcagagggtattgtgctatttgatatttcattcctcatgcctttttgctgaacaaaccactttgacgacctccaacataaaaccttgagcccctcctgcttctcatgtgaatcgatgactcctgtggtattgatttagaaagcagcagcagcagcctaaatttcaaaagcacctgccccacattcaaatgttgtttttgatgcgttgcaacatattgtggattatattttctctgctttggttccttatttcgtacgcatagtccattttgaaacttgtagaatagactttgaatcgctgtttctccgccagtacggccatccaaatgtttccccttaatgccgcagagaactgcagatctagaaaggtgtctaagaagcaaaaaaggatggcagcgtctggtgaagagaggcgtccacacgctcaggaagccacagtatcagctgtgttatgtggatcctggaattgctagttcagaagaggtggagcgactgaagactattgatggcacactagtcaggttttaggttcctggtaagtacggaaactaaacctgacttcctttatctaattattgggtttcattccaccgtcttgttgacgccttcatcagttactttgacctaacaagacatgcttggttgactcgtcgagatgctaagtgaagcttgctgcttttcaacaatatttgaaaatctgcgtggtggtattctggagggataggtcaaactgccttgaatagatcttgacatgcccacttgggcacttgtcctaaactgaaatttacaccgcgttttcgtttttttaccaggttgtagtctgcgggatcttgatggtggttgtggcagtcggcaattttgccaacactatgtatacactggtggtactgaagctgaggtttaaagcaaagatgaagagagcaaagggcagacaggatcccccacatcaaaactgacaggcatgatcgttcctggaacacaaggatgcagcagctgctggcaccatctcttctgtaaatcctttgacctgtgtcaacattttttggtgctgccgtgctagtagtaggagtatcttgcaagcttttgttttggatggtgtggtggtccagaaaacactctgtctgctaaattaccagaaacatccgcagttgtatattgcggcaaaatcccaagtgtatattaaagtcctccaaaaactgccgctgctttcgaccacaaccaaccacctgaatgatgaggg

SEQ ID NO: 23417 - DNA, 1040 bp, Zea Mays
tttagagtttatcagtgtgggcagcgtaaaccctagcttccgtcacccacacagccggcgaggtggcttccatctcgctcgtgggccgatctcactgagcccccgccgttcttctctccacttcctgcgttctccagccgccgtcttcgctgataggctacgccgcccgctggcctgcgcgcgccgcagccttaccctgtgtgcaccctgttcctaaccctgcgtgtggccgccgccgactggcttgcgtgcgcccgcgcctccgcctaaccctgctagcttgcgcgcccaacgccagatgccctgagcccaccgccggctgtctgtgcacgcaagtgaacccatccggctacctgggcacgccatccgacctccctgcgaacctctgtatcggccgatattcctcaagaacacagtgcaaacagtaacacatcagcaagttcgagactgccaaaaatatgcaaggcagctggctggaaagaaccatcatttgactttgaagaacaaggacctccgcataacagagtattcacatgcaaggtgaccgtccacctggatgaactggtcaacaccattatggagtgtttcagcgaccccaaacctaagaagaaagctgcacgggagaacgccgcacaaggggcattatggtgccttgagcgctctggttatgtcaagtcatcttcagatgttcctgacctgtgcggccatcagcccttctgctagccagatctacccttgtaggagtattaatgttggtagacgggtgcagcttgttgctgtggcacagtggttatccatgcactgatgccatgatactcttgagaagttgagtcccttatgaatcttgagccggctgtgttggctcgtgtacctagtctctagctcgtttggttacatgcccaacgcctgcacttgtactgtgtaaaatactgaactccggcgatcaatgcaatcaaactggaactcctagccgagctctgtcttgcaattcgatgtccggccttctcctgttggatgttaaacaggagccacggaatccg

SEQ ID NO: 23418 - DNA, 5032 bp, Zea Mays
ttcccctttcccctcccaaaaacctctcccaaacccttggaacctacgccgccgacgccgccctcgcagccaccaccgccgccctcgcagccaccgccgcagcaatgctccgatctcaggaccgccgacccttccgcccgccggatcgggctccacggcctccccacccccaccgcgaccagcacaaccacaacgaacaccggtaccagcctctctcccacccccacatcgaccgacgctacagcaatgaacaccggtatcagccccgcggccagcatcagcgcggttgccacgtgcagccgccccttcgcccgtcgcagttcgagctagacctcgagaagaagacactggagtctgagaaggaatttgtcgactccaaaattgcggagtacaaggaggcgatgtggtcgatacagcgggcaatgttgcgtggatcgggggacaaggaggagggtgtcgacttgtttgcggctgtagatgatggggaggtggactttgttaaggtgcatatgatgctgctgcgtgagtgccggaggcttaaggagggcctgccaatctatgcataccgcaggaggattcttaaccatattttcgccaaccaggctgaacttatggaaaaaggtcatgatttaataggagaaacaggttctgggaagagcacacaattggttcagtttcttgctgactcaggtgttgctggtggtggttccatcatatgtactcaacctcgaaagcttgctgctatatctttagcacatagagtagatgaagaaagtaagggttgctatggggacagttctgtgttgtcatattcaaccttactaagttctcaaggttttggcactaagattatattcaccacggacagttgtcttttgcactactgcatgagtgatgtgaatctggatggcatttcgtatattattatcgatgaagctcacgaaagaagcttgaatactgatcttctgttagctatgatcaagaagaagctgcttgataggctggatttgcggctcattataatgtctgctactgctgatgctgacagacttgctgaatacttttatggctgtcaaatatttcatgttagaggacggacttttcctgttgaaattaaatatgtcccagatgtatcagctgaggcttccttgaatagtgtaccaagtatttcttctgttgcttcctctactgcttcctatgttactgatgttgtacaaatggtaaacatcatccacaagaatgaagaagagggtgctatacttgcttttttgacatctcaactggaagtagaatgggcctgtgaaacattcagtgatccaaatgctgtggtacttccgatgcatggcaagctttcttctttagaacagaatcttgtcttcaaaagctaccctggaaagagaaagattatcttctgcacaaatatagctgaaacatcattgaccataaaagatgtgaagtatgttgttgattgtggcttggccaaagaatacagatttgttcccactagtggtctcaatgtactgaaagtcaactggatttcccaaagctctgctaatcaacgtgctggccgtgctggtcgaactggagcagggaagtgttacaggctctaccctgaatctgattttggtatgatggaagtgcatcaagaacctgaaattcgtaaagttcatcttggcaccgctgttcttagaatacttgctttgggtgttacggatgtaaagtgttttgagtttattgatgccccagatcctgaggctatcgctatggctgtgaataatcttgaacaacttggtgctatagaatgtttagtcctagcctctgttatggcaaatgctagtagcatattttgtagagtgggtactaatgaggagaaatataaagctgaccgcctgaaagtccctttctgtcaccctgatggagaccttttcacctcacttgctgtttataagaagtgggagactgggtatggtaacaaaaatacatggtgctggcagaatagtatcaatgccaagaccctgaggaggtgccaggaaactatatctgaacttgaaaaatgtctaaagcatgagctaaacattatcgttccaagttactggagttggaaccctgagaagcctactatgcatgatacatcgctaaagaagattattctatcatctcttagaggtaatcttgctatgttttctggacatgagaatcttgggtataaggttatttcagcaggtcagcgtgtgcaacttcacccttcgtgctcattgttcatttatggcagcaaacctgaatgggtggtattttcagaaatcttgtcggccgtgaatcaatatttggtatgtgtaactgctgttggtcttaacgaagtgcttacagttcaccccatgtcttttattaagcaactggaggagagtaaattgcagaggaaagtgattactgggataggaaataaatcgctgagaagattttgtggtaaatctggccaaaatctgcagaatattatctcacttctgagaaaagattgcagagatgatcacataatggttgatttagacttcagtagcagtgaagttttattatttgctaaagaacatgacatggaaaaggtcttttgcaaggtcaattatgctttggaacttgaagctaaattgctgagagacgaatgtgacgagagaagacctggtagctctactattgcactatttggctctggtgctgaaatcaagcatttggaacttgggaagagatatctaacagtggaaattctgcatcaaaatgctcgtgttatagatgaaaaggaacttgtttgtttggtagattctcttgttcctggtatagcaaattttcataaaaccgggaattttcagacaaacttagatgaaacaaagtgggggaggtttacgttcctcaaaccggattatgctgaagatgctatttcaaaattgaacgggattgagtttcatggttccttactgaaggttagtcctgtaagcatttacagccactcagggctaccatttcctgcagtaagagctaaagtttcttggccacgtaaggcaagcaggggagttgcacttgtaacatgtgctagtggtgaagctgaatttattgtaaaggactgctttgcccttggagttggtggaaggtatgtcaactgtgaggttagtaataggtacgcaaactgtgtctttgtcacagggattccattgcatgtaacagagccagaattgtatgatgcttttcatagtacaacaactaggagaatccttgacatccgcttgcttagaggacagcccacagctagctcgtccgtttctgaatgtacagaagcactgatgagagcgatatcactattcatgccaaataggaactttccttgccaaaaattccgtgttcaagtgttccctccagaagagaaagacttaatgatgaaagctaccataacctttgatggaagttttcacagagaggctgcaagagcactggaccatcttcaaggaagtgttcttccttgttgtctaccttggcagataatccagtgcgagcatgtatttcatagtactgtctcctgtccgatgcgcatttacaatgttatcagccaagatgttggtgctctacttgagagcttccgtagccaaaaaggcgtggcatacaatttggagaagaatgagaatggaaatttccgtgttaagcttactgcaaatgccacaaaaacaatagcagatttgagaaggcctcttgagcttctgatgaagggaaaaataataaaccatcctgatctgatgttaagcacagttcaattgctatggtcccgtgatggtatggaacaattgagatcagttgaacgggagaccggcacttatattctgtatgacaggcaaagtctgaatattaaaatttttgggagcactgataatgtggctgcagcggaggaaaaattggttcacgcacttgtacagctccatgagaagaagcctcttgaggtttgtcttcgtggccggaacctcccaccaaacttgatgaaggaagtgattgtaaagtttggggctgatttagaaggactgaagaacgaggtccctgcagtagatcttcagttaaatacacgaaggcagacactttatgttcgaggcagcaaggaggataagcaaagggtggaagggatgatctctgaactgataacctctagtgaccataatgctcaactgtcgtcagagaatgcatgtcctatttgcctgtgcgagctagaagatccctttaagcttgaatcatgtggccatatgttctgtttagcttgcttggtggatcagtgtgaatctgccatgaaatcacaggatggcttccctcttcgttgcctcgaaagtgggtgcaataagctgttcctcctagctgatctgaggtctctgctgcctgacaagctggacgagctgttcagggcttccttgaatgcatttgttgcatctagcgcagggttataccgtttctgccccacaccggactgcacatcgatttaccaagtagctgctgcaggcgcacaaggcgacagaccctttgtctgtggggcttgctctgtggagacctgcaccaagtgccatctcgagtaccatcctttcatctcctgtgaggcatacaaagagtacaaggcagacccggatgcaactatgcttgaatggcgcaaagggaaggagaacgtgaagaactgcccttcatgtggatttacaattgagaagagtgaaggctgcaaccatgttgagtgcaggtgtggcagccacatttgttggaattgcctggagaacttcaagagcagtgaggagtgctatggccatctcagatccgtgcacttatcctatgcagatctgatgtaaatctgtacagattgtaatgaatcacgtggtctataatctggcaagctgaatttgccttccaacagtgattgtctgatcctaaccggttcccatctctacctgtgctgagaatattgtaggcgctttatcatttgttactacagcggggaatgctctagtgtgcatcggggacggctaac

SEQ ID NO: 23419 - DNA, 1424 bp, Zea Mays
ggcggggctcgctttcgaccctggctggggccccacttggcagagacgcaaatcaaaccgctgcacaaaaggagatgctcccctacaccggccgatttgctaatttgtcgttattgccgcttcgaaaatttgcatgaaactcataaaatcacgcagaaaactatacaacgaattcagtgctaaaattccaattatttccctgcaggctgcatcggccaggtggccaagtctcgtcaagtcgtccccgctcccccatagtcgccaccgccggcccgcctgcccgcggcacgcaacccgccacgcccaagcagcggagggccaaaaatgcgctcgcagttgccgtagcgccatcgcgtcgtccatccgctggggagccacgcgatggaggaggacaagcgggcggaggaggcgcggcgcgccaaggaggccggcaacgacgcataccgcaagtccttcctcgagacggccgtcgagcactacacccgcggcgcgctcctcgacccccgagatatctccttcctcactaaccgcgccgccgcctacttccacatgggcaagtataaggagtgcgtgagggactgcgagggggcggtggagcgtggcagggacctcagcgccgccaacaagctgatcgcgaaggcgctgttgcggaaggcgtcggcgctgctcgagctcgcgacatgctccggggattacgcaccggcgatcagggccctgcagcaatcgctcaccgagcattacagcgaggagacgcacgagaagctcaacaaggcggtggtagttaagaaggagcttgaggagcaggagcgattggatcaggagacggccgaccaacaccgcgagagaggcaacgaattgttcaagcagaagcagtaccatgaagcagcaacgcactacacacgagctatgaaaatgaacccaaaggatccaagagcatttagcaacagagctcaatgccacatctatctgggagctttccctcaaggtcttgaggatgcagagaaatgtgttgaactggatccaacttttataaagggctacgtgcgtaaagctaaagttcagttcctgatggaaaattatgaaaatgctatggcaacttacctagagggtttgacgtacgacccaaataatctggaggttcttgatggcttaagaagatgtgcagcatgcattaagagggctaatgggggtgatgttgagcttgaggacttgaaagatatgttgggaaatttccaatcagaaaataaccttcttaaatttcgaaaagcaacagaacaagctgcaatactcaagaaggaagcttctgatgagcgtttgaagcgtattgaatctgaacgaatgtagtgctagtgctgtatatggctggtgggtggatttagtaatctgatatatttagtgcaatgatatgtagctatcctgcaata

SEQ ID NO: 23420 - DNA, 3167 bp, Zea Mays
gtctaaaagctaatcccctacgctatctgtatatacaagacggaagcgcgaccccgaaaaaaaaatgtcctccatctccatcctgcacagatcctgcctccgcctaggtctgctgccgttctcaccactgcgtgctcgcgccaccactctacgccttccccttcctcttcctcagccgcggcggcatctccacctgccccgccggagcgccatgagctctgccgcgtccaggctgtcgcacatcgcggctgccaccggcggcgggggcggcgcggccggggagtcgaatgagtcgccgccggccgcatccgccgcgacccaggaagacgatggtctttcatctggggatatgggctaccgccttcctccaaaagaaatacaggacattgttgatgcaccaccacttcctgtcttgtcattctctccaaacaaagataaaattctgtttctgaagcgtcgagcactgccaccactatcagacattgcaaagcctgaggagaagcttgctggtctaaggattgatggaaattctaatactaggagccgaatgtctttctacactggaataagtatccataagctgttagacgatgggactttgggcccagagaaagaggtgcatggatatccagtaggtgcaaggattaattttgtcacctggtcacaagacggccgtcatatatccttcagtattcgagtcgatgaggaagacagcaaaagtggaaagctgagagtgtggattgctgatgtggagtctggagaagcaaggccactttttaaatcgcctgaaatatacctaaatgctatttttgacagctttgtatgggttaatgattgtacactgctagtctgcactattcctgcgacacgtggagatccaccacataagccatcagttccatctggcccgaaaattcaatctaatgagtcaaagaatgtagtccaagcgagaactttccaagatcttctgaaagatgaatatgatgcaaaactatttgattactatgcaacctcacagcttgtgttggcctctttggatggaacagtgaagccaattggccctccagctatatatacatctgttgatccatcaccggatgataaatacataatgctttcttctatccaccgcccatattcctacattgtaccttgtgggaggtttccaaagaaagttgagttgtggactgtagatggaaagtttattagggaactttgtgatttgcccctggctgaggacattccaattacgatgagcagtgtacgcaagggtaagcgctcaattaattggaggccagacaaaccttcgatgctgtactgggtggagacacaagatggtggagatgcaaaagtagaagtctcccctcgtgacatagtttacatggaaaatgctgagcctataaatggtgaacacccagagattctgcataaacttgaccttcgctatgctggcacctcttggtgtgatgaatctcttgctttagtgtatgaatcttggtttaaaactcggaaaatcagaacatgggtgctctctcctgataaaaaagatgtcagcccacgcgttttattcgaccggtcttcagaagatgtatactctgaccctggctcaccaatgatgcgaagaactgtgatgggaacatatgtcatcgcaaagatcaagaaagaagacggaaatatttatgtcttgttgaatgggatgggtgccacaccagaaggaaatattccattcctcgatttgtttgatataaatactgggagtaaagagcgtatatgggagagcgacagggaaaagtactatgaaactgttgttgcactgatgtcagacaaaactgacggggaactgctccttgatcagttaaagatacttacgtcgaaagaatcaaaaacagaaaacacacaatattacttgcagacttggccagaaaagaatcaaggtatgattcatcaaaagatggacctttgccatgtctagtttggtcctaccctggtgaatttaaaagcaaagatgctgctggtcaagttcgtggttcccctaatgaatttccagggattggtgctacatctcctcttctttggttagctagagggtttgtgattctgtctggtccgacaatcccaattatcggtgaaggcgatgaagaggccaatgacagatatgtggaacaactagtaacgagtgcagaggctgcagttgaggaagttgtcaaaagaggggtggctcaccctgataaaattgctgtcggtggtcattcatatggtgcattcatgacagctaatctgctggctcacgctcctcatcttttctgctgtggaatcgctcgctctggagcttacaacaggactctaactccatttggttttcagaacgaggatagaacactctgggaggcaacaaacacatatgtcgagatgagccctttcatgtctgcaaacaaaatcaagaaaccaattttacttatccatggagagcaggacaacaattctgggacattgacaatgcagtcagaccgattcttcaatgccttgaaaggtcatggtgcactgtctcgtttggtaatacttccttttgagagccatgggtactctgccagggagagtatcatgcacgtcctctgggagaccgatagctagtggtggcagtgcagcccgtgaaggtctaaaccctgaggaactctcatcattaccaagatcgcttctgtgatcaacttcagttggtgttcatgaaacattccctggacagcaagcctaaagggaaaaaatagtgtatcgttgcacttctaccttaaccgactaccagggatgccttgattggcctcatatttgtttcgattgctgcagggtgggctgaacaagttccatggccagcatgcgctcagggagcgagcgaggaagctcgaccagggcatcctgattataaggtttctttcttctgaaacattgctttgttttcttgtttgatcatacacaaggatgttatgttagttatgtagaccagtggacgatccaggattcaatacctgactacctgtggaaccaagcacattagttttaaatgaattaacacaaatattacatgattagcatatatataattgtgtattctgtgaaccccctaggctttacatggatccactgcgacctctctgtgtatgtccatgtgtttgttt

SEQ ID NO: 23421 - DNA, 2515 bp, Zea Mays
cgcccactggtcagccgggccagcggcccaccagctccggtttcttccgactgcgagcttccaagtggcgactgcccgagtgcgagaagagggagagaagcggttgtcggaatccactccggccaggggtgcggaggtcggaatggggggaggattggatgaggcggtgaaggtggtggatttggaggacggtgaaggggaggaggaggcagaggccgccgcggcggagggatcgagcatggagatggggatgctgccaaggatgccggtgcgtgtgctgctcgccgaaggcgacgactccacgcgccacgtcatctccgcgctgctccgcaagtgcggctaccgagttgctgcagcctctgatggtgtgaaggcgtgggacctattaaaggaaaaatctttcaacgtagaccttgttttaactgaagttgaactgcctttgatgtctgggttcctcttgttatccacaatcatggagcatgatgcgtccaagaacatccctgttataatgatgtcttcgcatgactcagtaagcatggttttcaaatgcatgctaaagggtgcagcagatttccttgttaaaccgataagaaagaatgaattaaggaacttgtggcagcacgtttggagaaaacaactggcaaacggtgggcctaatgttcagcacatacaacgagaagagaatcttgcagaaagaatccaacagaagactggcgtgacaaaatctgataatttggacagagatgtgccctgtaaaaatagagaatgcagtgaacaagaaagtgatgctcaaagttcttgcacaaggtcagagctggaggctgaaagtaagcaaacagacaacattttggagtataagcaatcaactcaaaggcacttgtctattcctagccacaagaatgttgagctaaatggacagaccaaaatacaaagagctgagggtaataacttgattccagcaagagaagacgatttatcgccaaagaaaagaacgtgtttgaatgagaataattctgagagagcttcaagagatatggagctagtccacattatggaaaatcagcagaagtataacacacagtgggaggtggatactatgagaacaacatctaggggaaatgatgagaagggctccatcccagcacatcagttggagctttctcttagaagaactgactacggaaaattagagaaccacgagaaaaatgatagaagaacactgaaccattcaacttcctctgcgttttccttgtataattgcagggctgtgccaaccttaggaaatgctggtgatggtcaattatgcagcacctcagaaacactagtggatgttgaaaataaaaatggagattcagcagatccctctcaagacatgactgaaacaaatcgtcctcctattagagttgttcctgtccctgtccaaggtctcacatttgatgggcagccattctggaatggtacaccagtggcatccctattctactcacagtcaactcctcccatttggaatagcaaaacatcaatgtggcaagaatcaaccccacaagcaacttcactgccacaaaaatctccacagaatgaaccaaatgaaatgggggctaaaccagttataaatgcaggggaacaatttgccatgggtcctcccagtgccagtgggaagcagctgcatgttgaaattcttaatgatgatccacggcatatttctcctatgactggtgaaagtggaatcagtaccgtgctagacagcaccagaaatactctgagcagtagtggctgtgatagcatttccaaccagatcactgcccctactgaatcatccaatgtatataaggatgttcctgaaaccccaagcgccgaagggtcacggcatctgagccagcgtgaggctgcactgaacaagttccggctaaagaggaaggataggtgctttgagaagaaggttcgataccagagccggaaattactcgcagagcagcgtccacgggtcaagggccagtttgttcgtcaagatcatagcatccaaggaagctagggtccagttactgagctggaactctattctattatctaaaaaaagtcactgcaagtgactccactgcggtctgcgggtatcctgatgtcagattttgccgaagagttggaagcagtcacactgagttacagtttgctctgtatatttgctgaagtttgtaatatatgtatgtataggctaacgctgttctttcctaggttaggcacaggacctggcacgtttgaaggtttgtcagtaggcgttagaaaatacaggcatactttgtttcaggtcaagatgagatgtgaccttcagtagcgcatgtgtgctttaagtcttgtattacgtaattaagttgtttgatgtttcgggttagatgtacgctccgtggatgaaatgtaaaggatgtccaccaaaacatgcttgtttccgtgcagcttgttgcaatgaacatcgttggcctggtttctgtcaatgctctcatgccgtgtgtactactgtgaa

SEQ ID NO: 23422 - DNA, 861 bp, Zea Mays
catgtcttgtttgatgtctcaagttgagggtctgatgatggacgtgacagctgctgaagaggagattaaacggtggaagatggcagcagaggaggaagctgaagctggtagatcaattgaacaagagttccaaattcagatatcatcccttcgcaaggagttggacgaagcaaaccgagctatggtggagctagaaaacaagctgaagttcaaggaagagacagctgctgctgcaatggcggcacgcgatgctgcagagaagtctctaaagctagcagatacgcgatcgtccaggctacgtgagaggctggaggagctcaacaagcagctcgaagaatcagatacgagaaccgagtcggtgaatcgcaatggccataggtacatgtgctggccatggcagtggctgggactgaactacgtgcagttacctctagcggagacagaccagacgtccaacgagatggagctatctgagcccctaataatataggtgctccgacctccatacttgtacagattacagatatatacagatcctgctctttcactagataagggggaacagtagttttttttttgggaggggggttgggttgatgggttcttgtgtagatgttttcgcaatttcttgatgcatgctttgcggaaaacgggcgggtgctggaaggcgccgtgtaattgtaaaaggtaccacttagtgaagatgctgagaagttcattctttgacaagattgttcttgaaacaagtctcgcttgatcttcattgtgataacaatgtgctacactgctactctacttagacggaggaacttgtttgtttaccctttagattatataataatccagtttaaataagtcgac

SEQ ID NO: 23423 - DNA, 2536 bp, Zea Mays
ttcgcaaggctcgaccgtttgcatgaaaaaaaaaacagaggctgccttcctgtctgcctcattcacgtaataaaacgcacttctctacctcctccgtctccccccgtgtgtcaaatcgaacgcacatgcggcgcgactccctttcacggcctccccgcgtctcagcctacacgtccgagccgccagccgtgcgctttaagtgagcgcacccacgaaaagcagccaggcagcggagccggagagaagaagcagcagtagcagcagggccgtcaacaccatggcggtgggcgcgaccgccacgaagctcctcccgtcggcggccgcggccgcgcgccgcccatcgatgctccacctcgcggccgtcgccgtcctctgctcgctgtcctacctcctcggcatctggcaccacggcggcttctccgcggggcccgccgccggcgactcctcctcctcggtctctatcgccaccgccgtctcctgcgccacccccgccccgacgaccgcctcctcgtctccccccgcgggaccgctcgacttcgccgcgcaccacacggcggagggggtggaggcggagggcgcgctccgccatcgcaactacgaagcatgccccgccaagtactccgagtacacgccctgcgaggacgtggagcgttccttgcggttcccccgcgaccgcctcgtctaccgggagcgccactgccccgcggccggcgagcgcctccggtgcctcgtcccggcgcccaagggctaccgcaacccgttcccgtggccggccagccgcgacgtcgcctggttcgccaacgtgccgcacaaggagctcagcgtcgagaaggcggtgcagaattggatccgcgtcgacggcgacaagttccgcttccccgggggcggcaccatgttccctcgcggcgccggcgcctacatcgacgacatcggcaagcttatccccctccacgacggatccatccggaccgctcttgacaccggctgcggggtggcgagctggggagcctacttgctgtcacgcaacatccttgccatgtccttcgccccgcgagactcccacgaggcgcaggttcagtttgcactagagcgtggtgtgccggcgatgattggggtccttgcctccaatcaactcacttatccggcacgttcctttgacatggcgcattgctctcgttgcctcatcccatggcagctttacgacgggctgtacttgatagaggttgatcgtatcctgcgtcctggaggttattggattttgtctggaccaccaataaactggaagaaacactggaaggggtgggacaggactaaagaagacctggacgcagagcagaaagccatcgaggcagttgccaggagcctatgttggaagaagatcaaggaggagggcgacattgctatctggcagaaaccaactaaccacattcattgcaaggccatccacaaagttatcaagtcaccgcccttctgttctaacaaaaacccagatgctgcctggtacgacaagatggaggcttgcataactccactaccagaggtcagtgacttaaaggaggttgctggcggctcgttgaagaaatggccggagcggctcactgcagtgccgcccaggattgccagtggcagcatcgagggggtcacggaagagatgtttgtggaagatactgagttatggaagaagagagttgggcactacaagtccgtgattgctcaactcggccagaaaggccggtaccgcaacttactggatatgaatgcaaagtttggcggattcgctgcggcattggtgaatgaccccttgtgggtcatgaacatggtccctactgtggggaactcaacaacccttggggtaatatacgagcgtggcctcattgggagctaccaggactggtgtgagggcatgtccacttatccccggacctacgacctcattcatgcagatacagtgttcacactgtacaatggcagatgtgaggcggagaacattctgctcgaaatggacagaattctgaggccagagggcacggtcatcatcagagatgacgtggacctcttagtgaagataaagagcatggcggacgggatgagatggaatagccagatcgtggatcacgaagatggtccgctcgtccgtgagaagctcctccttgttgtgaagacatactggactctcgatggcagcgaacaatagcaataacgtcaaataaaagagttggaatgattatatggcatgatcggcagatgtgactgcctacccatttgccctgtgaatctggtggagtttgttttctgtttttttggggggtattcattttaggagatagttaacataatggagagataatctccttgttaagatatcaaagagcagcccagcacagattttgacataaaaacaacaaattgtgcgaagtgggtaaatagaaagtacagtactgggatcagttctgtctccgggtgcacattgttttgttgtacttatgatgttctgtgatcccttttatatgaatgtcataaaaatctaaactaggac

SEQ ID NO: 23424 - DNA, 2561 bp, Zea Mays
aaattccgcgcgcttgtacgcgcccgctggcaatctggtccgctccacgaatcggaggaaggggatgcgtacggctttgctgtgcggccacaacacctgcaacgttacaaggagtacgctggcatctacaaggaggaagaggaggagagatccgatagatggaagaattttctggagaggcagcctgagtcatctggacaggatgctggtgataatgctacgggtgatggttctgaatcactgcatgagaagaccgtagcagggccacagaagattcaaatatggacgccaattagatcgtccctgagcaacattgagcagataatgagcctgcgcatcgggaagaagcaatcttctgctggcaagcagcaagcaaaggacggaacccatcacgtgaaaggtgaagagagcaagttgtcggaggattcagatgacgaattctatgatgtagataaggttgatctgagccaagaagcgcaatcgagtgatactaggaatgctgatgttggaagcaggaaccaagaagaaaattacatttcaagggaagagttggagtgcctggtccatggtggactgccgatggttttgaggggagagctatggcaagcttttgttggtactggagctcgtaggatagaagggtattatgatagtcttgcagcagagggtgaattagataacaaaagttctccaacttctgaaggtgttcaagaaaagtggattgggcaaatagataaggacttgcccagaacttttcctggtcatcctgctttagatgaggatggaagaaatgctttgagacgcttgcttatagcttatgcgaaacacaatccatcagttggttactgccaggcaatgaacttctttgctggtctcttgcttctattgatgccagaggagaatgcattttggacattggttgggattatggaggactattttgatggctacttttctgaagaaatgattgagtcacaggtggatcaacttgttttagaggagttagttcgagagaagttccctaaattagcaaatcacctggattaccttggacttcaagttgcatgggttactgggccatggttcttatccatcttcacaaatgtgcttccctgggaaagtgttctccgtgtctgggatgtgcttttgttcgatggaaacagagtaatgctgttccggaccgctcttgcgctactggagttctatggtcctgcacttgttactacaaaagatgccggtgatgcagttacccttttgcaatctttagctggttccacatttgacagcagccagcttgtcttgacagctcgtatgggatatcaatccgtaaatgaaacaatattgcaagagctaagtaataaacaccgcccatctgttatgtctgccatggaagaaagagcgaaaggtctaggcgtttggacagatactaatggtcttgcatcaaaactgtataactttaaacgtgatcctgaaccactggtttctttaagcaactcagcagaccagttgagtgatgtgggagatggggatgccaatcaagaaagtgatcctgtaaacatggatgacgagtatgttggtgtgacagtgaaatctgagattgattctttgcctgatccaaaggaccaggttgcctggctgaagttggagttgtgccaactcctagaggagagaagatcagcagttctcagagctgatgaactagaaacagcactcatggaaatggttaagcaagacaatagacgccaattaagtgcaaaggttgagcagtttgaacaagaaatatctgaattcagagaggctttgtcagataagcaggagcaggagcaagcaatgtttcaggtcctgatgcgtgtcgaacaagaactgaaaattgcagaggaagctcgcatctcagccgagcaggatgctgctgctcagagatacgcagcaaatgttctacaggaaaagtacgaggaagctatggcttcacttgcccaaatggagaaccgagctgtaatggcagaaacaatgttagaggctacactgcagtaccaatctagccagcagaaagcactgtccccttgcccttctccaaggccatcaatgctcgatgcatcccctagtcaggcaagtcagaattcatcgcaggtgtttcagccaagaaggaaaaacttgcttggcccattttcgctgagttggcgtgataagaacaaggaaaagccgaacaatgttgaagactctgcgaacacaaagtttaccaatagtgatgaaatggtagatgagaagcagatggaaaccctggatctagataacgaacagagagcagaatcaactaaagaagatggcaagatgagagcagaaacccctcagaaagacgacgatctggtaagggtccaattaaccacggaccatttgaatggacaccatgaacagatgcaagaaataaaactggattggtaagcacaatggcacccagtccaagtaccttcggcaacacttctcagtgtatttgtgacctgatcacggtgccagttggtgcagcattgagggtggcctaatgttctttatatcccccccccccc

SEQ ID NO: 23425 - DNA, 3690 bp, Zea Mays
gaaaattcctaaaatgaagactggagacccagcaggtacgcggagcgtagcaaattcttcacgacaccccgatcgagactctggagcgcagagacggcagagagcacagtagccaagcgactggagactcatcactggagactggagagcatccggagccagtgctcgcaccaccgctcccgattcccaatcgccttcccgccgccgaaggggcgccgcactgtcccccggcctcgatctctctcgggccagccgtcggccgtggccctgcgcctcctgcgttatctggctggagatccggccggagtgccattcctactctcggtcaataagtattctggaatgtttttccgagctgaaatagatagcttctggagctggatctcagtattctgttagggacatgctccaaccgagggaagctgatttgcctgcactctttcttgtcttcattgtacttcctgtggtagcttattttcttctcgggagatggcatgatgctgcaagtaagaaggcaagggtaagtgtgcttgctcagcgagctgcagaagaagcctatagagaggaaacaatggcgtgcccagacattattctgccagggtcttccttgagaactatgccctatttcagacctatgcctgcattaagacaggaataccatgaatgtgcaacttgccatgcccctgcaaagactcgttgctccagatgcaaggctgttagatattgctctgggaagtgtcaaatagtacactggaggcaaggacataaggaaacatgccaaaagtggcttggtagtggttctagcagctttggtggatctagcactgaggctactgaacagatgccgttcttgactaacttaaattcacctcttccgggtggtgacattcacttgcgtgacttgaacttcgatactttatcagaaccatcctttcccacaactgatggttataatctagatactgatccatttttggcagacagaagcaacatgaataaatcaaatcaaggtattcatatgagcgaaaatggtgctgttggtgtatcttttgaaaagaataattataatgctgatgatgaaatccactcaccggaaaatttatctagaaacaaggtgtcaaacaactattttggttcagatgcaataagtggtaatggggatgcaatttatcctgccaaaagtaatgcacagcagcctagcagctgtgctcctgacatgagaaaacagccaaaagcaagcatcacagtttatcagcctgacataggtgtctatttaacttctgacatggtcagttcttgtgaggggtcatatgcttctgccagtgagccactgcaaaggagcttgtcatctggaagaactattgggaaagcaaacgcggtgaataagaggcctccatacccatcaagtaaggtggtttcagcacaaaagccacaggatagggtgtctacatcatatcaaaatgatggccatgagaagaatccttgcaacaaaaatgaccaaagatctacccccaaatgtgaatcaagtcaatcaacaagcagcaatctacaaaagtttggagcatccaaggttgaagttttaaagaagccttcaaaatttctcaaaaccagccttgtgggattgatcaatgataataagaggaacaaggtattgttcccatatgaagatcttgtcaagttttttcagtatgaagcccggggtatttcccctagaggtcttttcaattgtggaaacagctgctatgctaatgctgttcttcaatgtctcatgtgcacaaagccactgatgatctaccttcttctgagattgcattctaaagattgttcttcaaaaaaatggtgccttatgtgtgaacttgagcaatatgcttcaactttacgtgaaagtggtgggcccttatctccaagtagaattctttctaatctgaggaatattggatgtcgcttgggtggtggaactcaggaagatgctcatgagtttttaaggcatcttgtgatgtctatgcaagcagcttgcttggatgggctgggtggtgagaagcatgttgagccaagtttgcaggaaacaacactgatacaacagatgtttggtggccgtcttaaatccaaggttaagtgcctcagatgttatcacgagtctgaacgatatgagaatataatggatcttactttggagattcacggctgggtagagtccttgcaggatgctttgacacagttcactgcccctgaagatttagatggtgataatatgtataaatgtggaagttgtgctgcctatgttaaagccaggaagcaactgagcgtgcatgaggtgccaaacatattaacagttgttcttaaaagatttcagtcaggaaaatatggcaagatcaacaaatgtgttactttccctgatatgttggacatggttccttttgtgactgggtctggtgacaatccccctctttatttcttgtatgccgtggttgtacatgtggatacagaaaatgcatcattctctgggcactatatatcatatgtcaaagatatgcagggtacatggttgagaattgatgattcagaggtccaggttgtatcagtgaatcaagttatgtcagaaggtgcatatatgcttttctacatgaggtctttcccccgaccaccaagaatatacatcgagaaggggccgactgttccatccgcgaagcgccacacatcaaagtattccaagggctctaaacacgagcgcgagcagacagagttactcctctcggcgaacgatccagcatacggtgtttatgactttagacctgatggcgagggctacacgcaagatcagcaagcagagttgagatccagggatttccatcgcgccgacgatgccttcgcagactcggtcagcgcggacttctcggaggccacgtcaagcgaatggtcgctgtttaccagctccgacgagtcctcattcaccaccgagagcacaagggactcgttcagcgttgtggactacggcgacaacgctggcctggacccaatctcctcgatatttgggccaagctatgctccggagcatcatcccggtccacctggcagtttcgccgcgtgcacgaggctctcgccttccaacccacagacaaggtacttctcggagagcacagggttcgtctcggactactcttccagcggcattgtacatagaggaagggatccaggtagggcatacacctgttcagcggaaccgctcgcttcggctgcggcggcgcaccagcaccagcggtgaaattttagagcgcggtggagctgctccggttgaagccatcccccgaggcccgaaccagtaaattacgccgaatccggcagtcgtatggccctgcacaccagtgctttgtgaaaagcttgcagattcatcaattgacgtgcacttgccttttatatggacgctgacgtatggaggtgcacactctccacctccgtatatctcgccacctactctgtttatattagaaggttgattgctgacacacaacacctgctcgtacttttttgtcgaaatcatgacggacaacaacgctaaacatatagtacaatcttcttgtcttgctgatctgctatgcccctttgtgaaatctgccggtgacatcagcgatggcgtcttgctgatctcgtggtatacctgatgtttcctcggtctcagcttttatcacgcag

SEQ ID NO: 23426 - DNA, 1019 bp, Zea Mays
cctatctcaaaatctctacaaagaaaatccagccgccgttggcttcttctgtagtgtgtatctccttcacgtcacttcctccccatcacgtttttcctctacccaggtcgagctcgccctactgtgcttgcctgtgctcgtcggccatctccctggtggccgacctcgcccctgccccagccacagcttccccttcggccctgctgctgcaagcactcagcctctcctatggcacacgccccacctgcgacaccgtcgacccccgggagttaaccggtaaagaagcgaggtccgtgcgacgtttgccaagtgttcgatggaaggtccgaaccgggaacctcgcctttctcgcggatcttcgggtcggtttgtgaattggtacgctagttgatcacgtgatgcggaagtcgagctgagtcgaccacaagatgctgttaatcgtgggtttcttcgcaaagtgatactgatgaatgaacttgaagatttcatgatcggatcaagcgccaggatgtgagatgctctccaagtggacgtcgtctaacaacactaacgtagtgttttatcccaggcaagccccggtgcatttgccacctccttctgttttaaaaacttttatcacttacctgctgcattaggtgataggagttgtgtgaataaacaattgatgcattaccattccttggaatttgattatactccttgctacctgttttataaagagaaccaatgaggcttagccctgcctagagaactaaaacttgattctttttaaaagaatgttgtgtaacactggtatgggtttgttttatgaaaaaggacttgtaatggtgagagcatcatctgcagtgatgaattcatcattcaagtatggtacctctgtcaggtacatggttttgggaaggaaataataatatgagaccagacgttgagcaggaaaggtcgcccgtctgtgtcgattaaggaccgtaccgaaagtaggcttgctgatctaggaccctttaactggccacatgcctcgt

SEQ ID NO: 23427 - DNA, 2950 bp, Zea Mays
ctgccgctgttgttttctgtccccgacttggaattcatttctgcgtcgaggaagctttttctcaaatctgcatcgcgtattttccgcaatgtccttttttcgcagaacaaaaaagccgttttttcctttcctgttagttattggagtcagttaggaatgtttttctgatgatgttggtttggtcctttcctcgtcctgaaaagctgcctcttcttctgccctttgtccagttccctctctgaaaaaatcgcagatttctgttagtatcatcaccagttcgccatcatctccgctctgtgggggcagaagctccgcttcgttccaagaaaggcccccgcgtcttcctccgcaaaacctcccgggtcatctcatatccttggcgctggccgagaggctcctctcgttgcctgccggcgcactggcgcagatgcaggtgctgccgaggaagaggaggcgctccgggtcctggcttctagacgttgtgaaccagatcttggtgcggttgcccgagtagtttactcgtctagaggaggggtttggttctcgacccgattcggtgggggcttcgccactgggatagggggacagtttggcctgctggatctttatcgccagttgttggttctgtcctttccattgggctggtactttcttgacggattggttaagcgctgtctgtggggttgttgtgctgctcctcccttcatctcgttttgtggtgattggtggggggaggaggaagagctaggaggattctctctcttgttcttgggtcagttcttggcacggcaggatgaagtatatgaagcttggatcaaagccggatgtccttcagacggaggggagcaatatcaggtttgtcgcgacagatttggcaacagacgttgttatattgattggggatgtcaagttttaccttcacaagttccctcttctatcaaagagttcacgcctgcaaagattagttgcttcaatcaatgaggagaaaaatgacgaagtggatatctctgacatccctggtgggccttcagcatttgaaatatgtgctaagttctgctatggcatgattgtgacactcaatgcgtataatgtcctcgccgcccggtgcgcagccgagtacctagagatgttcgagaccattgacaaaggaaacctcatatacaagatcgatgtgtttctgacatcaagtgtgttccgcacctggaaggactcgatcatagttctacagagcacaaggtcactggtaccttggtgtgaggatttgaaagtgatcagccactgcatcgactctatcgcgtcgaaggcgtcgattgatccatcagaggttgagtggtcatacacttacaacagaaagaaactcccgtctgagaacggtatcgattcgcattggaatggtgtcaggatgcaacctatggtccctactgactggtgggtagaggacctctgtgagcttgaagtggactcgtacaagcgggtgatcatgagcatcaaggcaaagggaagcacgccagctgttgtcgtcggagaagcattgagggcctacgcgtaccgacggctgcttggctccctggaagacgctgtgagcaatggagttgattgcgcaaagcctcgtgcagttcttgacgctattgtatctctcttgcccgctgaggaaggctcggtgtcatgtggttttcttcttaagctgctgggagctgcatgtttgctggaatctgcatagatctggtcatggcaatagtggaggaatttcatgtcgttacagaatagcgacagtggcaaggagaaatttcaagatgatgaagagatcgtggagactgagaaacgtggcatcggtttccagcacgtcaaagctgggcagttgcaaagctgatcgatggatatcttgctgaggttgccaaaggatcccaaccttcctcttccgaagctgaccgcgcttgctgaaatgggtgtcttccctaccccggccaacgcatgacggcctctaccgtgccattgacatgtatctgaaggagcaccccagcctgtcgaagagcgagaagaagaaactatgcgggctgatggactgcaagcagctgtcgcacgatgcgtgcatgcacgccgtgcagaacgagcgtctccccttgcgtgtggtcgtgcaggttctcttcttcgagcagctccaggtcagctgccacgacgacaacggaggaggacggatgtggggtcccgacgtcgagtgacgtcaactcgttgaggtcaacaaggctcgccaacaacagcggcggaagcgagaggagcagtggcagcagcgacatcaacaggagcgccgcggggaggggggcaagggggattctgatgccgaagaagatgctgagcaagctctggtctgggaaaacgaacgccggtgagaacagcagctcagacacgtcgcagagccctgggtccgtcaacaacccggaggaggtgaagtccacgcagtcaaggatcacaaggcgctcggtatcctagtcgcggaggggtaaccgcggtcacagcctagttttgttcttgctcttgatttttgccttcactggagagtagtggcaatctaaaaaatgtggagttactggagtaggtttggtcattgatgatgttttcagccatgttccatgggaactttttacatacaaagaaagtataggttgttataattgatgtatttttgctggcaaaatcatagtgttttagtttgctttttacggccaccggccaagcccggcacgattaatttcaagggctgaagacagagtgaagtaaatgctttatgatgtgattggatttgttagagcaactataaagagactctctctagcctttctaattgttaagaataaaaatattggtaaaagaatatactttagtaactttttaaatggttatctaaatatagtcatctttagttctgaatttgtcgctagtcaaaaataaaaaa

SEQ ID NO: 23428 - DNA, 1209 bp, Zea Mays
aaattgtccccaccagcccatattattcctttgatgatgttatgttgttgataaaacaggaggacctgctggggctgagcagctgcacaggtccagaattctgaagaagttactcaaacaacaaatgcaagctggcaggatgtatggaggggtttgttctgctctgaaggttctgcagcaagaaggtttactcgaggataaaacagtgacagctcatcatgctgtagccagtgagctcacgtgccaagttatagaccaacccaatgttgtgatcgacggaaatttgatcactggtaaggggcttgggacagttgttgattttgccctagctatcatcaggaaattttttggccatggacgagccaaagctgtggcgaatggaatagtttttgagtaccctaagagctaaaccccaagaattgctgaaatcacgaaatctacaataaggactaatgaaacacattggctgtaattgaagatttggctatctatacttctgataaaagcttcagtggcagtcatttcatcagcttcatgacatgatttattggtggataaattacagagtggttgctaactgattatatgcgttcagaggaaactttactgtcttctgtgtgcctgtattggtttgggggcgtattttccaaggtttgaactctgaaggcattattcctcgatgttgccatcatgctatattgctgtgtttcccatctgtgaattcatctgagaagcttgacattctaattccggacttccccagatactgggtttcaagagtgcaggctagcaactgaatcagtatttaattaaatttcgaacttctgtgctgcgttttttttattggaagtcattttgccctctttttctgtgtattgctgatggattgcggttttagcttcatgggttgagcgggacataactgctcacatggttgtccctttaagaagtaacaacagttactgaatttaaattgcagttagcataacggagtagattattttgcttgctgtcttcacgctttcgcaagataaacttttggggtgaagccaagggtcgtgctcctgaaagactggtagtttctgtaaaagcgttgcaattgtagttagccagaagaggagctcctattattgtgtggccatagtcatcagacacaaataaccacagttctgcttgtggactcgtgccgagagagagcgcgagaacagt

SEQ ID NO: 23429 - DNA, 1303 bp, Zea Mays
caaggtatcataagttcttcaaacgtataacgacacatagggacatgagggaagatactccatctatgtgcacgcatcacgtgaaaagcctgttcatactagttctttgtttgctggccgggatattcacagtgatgcggtagtatggggattgatttcaatggttgatgctgagaaaagattgttagcgaatgcactggaagatgttgataatcaagtttttatcttgctttctgacagttgtgttccactgcattcatttgattatgtgtataattacctcatgggaacgaatgttagcttcattgattgtttcaaggatccaggtccacatggcagtggaaggtactctattgagatgtatcctgaaatagacgagagggattttagaaagggtgcccagtggtttgcagttacaaggagacatgctttaatgattctggctgacagcttgtactacaagaagttcaagctatactgcaagccagcagaagggcgcaactgtattgcagatgagcattatttgccaaccctgttcaatatggtagatcctggtgggatctctaattggtctgttacacatgtggattggtctgagggaaaatggcatccaaggtcatatagcgctgatgatgtcacctatgatctcttgaagaacattacattgatgagaacttccatgtaacaagtgatgacaagaaacttgtgatgcagaagccgtgtttgtggaatggatcaaagagaccgtgctatcttttcgctaggaagtttaatcctgaagcacttgacaacctactgaagcaatttaccagttacacatctgtttgagtcctaccggattctttgccttgtgctgtcaaatccgacaagcttttttctcttcctgtttatatgtaaattgtgaagtccgtacttattaggatctgggcctgaagataccggtacaactgcaacagctgtgatggcttggagctgagtcatgggtaaaacggccacagcgatgtttatagaatggcactgccctcatagtaatttatcgtgttcaatgtatgtctccatagtcttccacccaactcccaactcattagttctttattcttggagaacagtttttgtcagagtgttatactgtcatgatatgatccattctttgtagacacagagattacaacagatgtatcacaaatgcagtcttaattttgtcactattaaatcttttatcatgcgttctactgaattaggtgttagcatttcttaaatttcactgtgatcaattttcagcaaagtaagcgtatttgagctg

SEQ ID NO: 23430 - DNA, 1191 bp, Zea Mays
aaggggtggaaggctcaagaacagcaacttggacgcatgtgtacttggagctctcgaggcaagtacctaataagttcttgccactggtgttacaatcacgttcttggacagagctggccggagaatcctccttattgtaacttctggttccctttaaggccactaacattgtaggtcttctgtagcttaaattaatcgtcacttcaaattacagatatcttcttgtgggatgaccctaagccttcttgcggttgctgttgtattttacatcaaggataatatttcacatgattctgacatgcataacatcttaagtatggtgtcgttggttggtgtcgtggcttatgtcattgccttctgcttcggcatgggtgccattccatggatcattatgtctgagatccttccggttagcatcaagagtgtggcaggaagctttgcgaccctagccaactggttgacatcctttgggataacaatgacagcaaatttgctcttgagctggagtgctgcaggcacatttgcctcctacatggtcgtgagtgcgttcactctaatgttcgtcatcctctgggtgccagagacgaagggaagaacccttgaggagatacagtggtccttccagtagtgagctgcagcagcattcatcagtaaatgcagtcatcagcaaggtctggtctgagctgctgtatgtggtgtggcggcatttcttcttctttttgtactgcaatctcttctgtggcatcatttggtgtgtaagtttcctgcatgacattgatagtagggattaacttgcatttgtgacaaattagttgatagtgataggatccctttttgacgtccccatatcctccgtgtggcggcatgggatgtcaaaaggaaagggatggagttttctcgcttttggtgtagcaggcctccctttggtcaagtagtcacagacccattttttttttgtcattggattggatacgttacagggttcgctcaccacccacactcgagactgttcattaagtttactcttatggagatgatcgagtggaagttggataaggattggagtcggatgtatcaggtgccaaggaatccttgtattcggtaaaaaatctatgctaagaatcagcatatcccttgcgcaagcaagagcgttccccttctttctaattcaaaaaagaaagggacggtaag

SEQ ID NO: 23431 - DNA, 2053 bp, Zea Mays
cgtttttttttgactgcctgtgatgaggaccacatttggtgcatgttcttcagctttgtttggagatacgtgctgtcagaccttccgtcagacatcgtcgtccatgtcgacgacgcaaggttctacctgcacaagttcccccttctctccaagagcggtctgttacagaggctgatagtagaggcgagccagaacggcagcgacgaagttgccatacaagacgtccctggcggagcgaagaccttcgagatctgcgcgaagttctgctacggcatggtggtgaccctgaacgcgtacaacgtcgtcgccgcgaggtgcgcggcggagtaccttgggatgaccgaggacgtcgagaagagcaacctggtgttcaagatcgaggtgttcctgagctccggcatcttcaggagctggaaggactcgatcatcgcgctgcagaccaccgacgcgttgctgccgtggtcggaggagctcaagctggtcggcagatgcgtggactctgtcgctgccaaggctaccgtcagcgcgtcgaacgttgtgtggtcgtacacctacaacaggaagtctgcgtcctcggacgagatcgtcgaggctcgcaggagctcccaggcggttcccaaggactggtgggttgaggatctgtgtgagctcgatgtggacctctacaggcgtgtcatggttgcggtcaagtcgagggggaggatcccctccgatgccatcggagaggcgctcaaggcatacgccgctagatggctgcctgagtgctgtgacgcgctggtagacgacgcctactctggagcgtacaagcacctgctcgagaccatcgtctggcttttgccctcggacaaggggtcttcggggatctcctgtcgtttcttcctgaagctgctgaaattcactgtcctcgtcggcgctggggagctcctgaaggaagagctcatggacaggactgtgttgcagctccacaaggcctcggtcagtgatctcctgatcccctccaggcctccggcgcagaccgtctatgatgtccagctggttcagacactcatcggcaggtacatgagccatgccggggtatctcaaggtgggatttttctcaacgaccttgaccaggagatgtttgagacgaacgtggacggtgaatctttgctagcgttgtgcaagctggtcgataggtacttggctgaagttgcctctgatccaaatctctctgtttcgagctttgtggatttggcgacttccatgcctgaaacagccagaccgacacatgatggattgtacactgccattgacgtatatctgaagttgcatcccggcctacccaagatggagaagaggaagatttcgaacctgatggacgtgaggaagctgtccaagggggcgtgcatccacgcggcgcagaacgaccgactcccgctgcgcgtggtggtccaggtcctcttcttcgagcagctgcgcgccgcgggagccgccgccgccgctgggacgcccagcgccagcgtggccaaccagagcagccggatgtcgctgtcgtcgcggtcgcggaggatctttgacaggctgtgggtcggcggagcgaagctgcccggggaggccgccgccgcgggcaaggggtcgtcggacacgtccgggagctcgcagagcccgcggtcgtcggcgaagccgccggagtccaagtcgtccagctcgtcgtcaaggaaccggcggtactcggtctcgtaggccggggccgggggccggccggtcggcggcggaggctgtacagagaggaaggagagcctggtccaagcctaaacgtagctgctgctaactttcagagttcatgttgatctcgtgctgcctgcagtatgtggcatgcagctagaagaaatctttgttctgtcagtccagttgttctatctaatcttgagataatccctggtttctgtaacagacttggaaactatgattcagtcgaattctccatgaactgggcaatcctttttggcggctccaccactcgtgtcatgtgcttgatgtaaaatgccgtaatagtctaaatccaggttttaaa

SEQ ID NO: 23432 - DNA, 5751 bp, Zea Mays
ataggaataaccgaacaagcccttaggggcgcgcggaaattaccggagttactaaggccttgggagttcggtcccgggagctcctccccatcgaaaataagcggaagcgcgtcccgcagcttctccgtgctagctgtaacggacgcgcgctgcctgtctgtgcatgggcgccgccctccccgctggatctgcagccacccccactccccgtcgcgccgattccatgagaggttgacaactgggcactgacgaagtggatactctgctctgctctgctctgctcgacgagttttaacatctgagtatggctgcggcgttggcgtggcggttcaatggcaccaatggtggcgcccatggcagcgcagatctggaaagacacacggacaaagttcaagactcagagccacaaactcctatgtcaatcgtgaaaatgggcaagaaccgagttaatgtggaggacgaggagacactttcaagcgttgctcaatgtattgagcaactacgacagagttcttcatcctcacaggagaaagagagctctttgaagcagttattagatcttgttcaaactcgtgatactgcattcggagctgttgggtcacattcacaggctgttccgatacttgtatctctccttaggtctggaccatctggagttaagatgctggctgccactgttcttgggtctctttgcaaggaagaggagttaagggtgaaagtcttacttggtggttgcatacctccattgcttgctcttctcagatcgaagtcagctgaaagccaaactgcagctgccaaaaccatatatgcagtttcacagggtgggataagggatcatgttggatcaaagattttctctacggaaaatgttgttcctgtactgtgggagcaacttaaaattagtctcaagaatgagagtttggtggatggccttctaactggagcactgaagaatttatcaaagaatacagaggggttttggtcagcaactgtgcaatgtggtggagttgatatacttataaagctggttagttctggacaaacaaatactcttgcaaacacttgctatcttcttgggtctttgatgatggaagactcttctgtttgttctaaagttttatctggagaaacaacaaagcagctcttaaagttacttggtcctggcaatgagacttctattagagctgaggctgctggggctctcaagttcctttctgcacagagtaaagaggccagacgtcagatagctaattctaacggagcgcataattgaagctttggctagcttgtatggtaacccggttctctgcaagacactagcagattctgatgcaaaacgcttacttgttggtttaataaccatggcagctactgaggtacaagatgacctcacgaaatcactttttgctctctgcaagaaggattgtgatctatggcaagctctgcaaggccgtgaaggtgtccagctattgatttctttacttggtctttcatcagaacagcagcaggagtgtgctgttgctctacttgcgcttctttcaaaggagaatgatgagagcaaatgggctatcactgctgctggtggcatacctccacttgtgcaaattttggaaactggatcttccaaagctaaagaagattcagcaaccatccttggcaatttatgcaatcacagtgaagacataagagcatgtgttcaaagtgctgatgctgttcctgctttactatggcttctgaaaaatggaagtgataatggcaaggagatagcttctaaaacactgaatcatctcatccacaaatcagatactggaactatcagtcagttatctgctcttttaactagtgatcagcctgagtcaaaagtttatgttctggatgctttgaaaagcttgctttctgttgcaccacttaatgatattctacatgagggaagtgcagcgaatgatgcggttgagacaatgattaaaattctaagctcacccaaggaagagactcaggctacatcagcaactgctcttgctggtctatttcattgccgcaaggacctgcgagaaactcatattgcagtgaagacactttggtcagtcatgaagctgcttgatatgcagtctaacaaaatactaacgggggcctcatgttgccttgctgccgtttttctttcgatcaaggaaaataaagaggttgctgcaattggccgggatgccttaaacccacttgtctcacttgcaaattcttcagttatagaagtggcagaacaagcgactagagctttggcaaatcttttccttgatcaggaattgtccctccaggtgccttttgaagaaattctcttccgtgtaacacgtgtactaagagagggaactattgatggaagaactcatgcagccgcagcaatagctcgtcttttacagtgccgaactattaatcagccactttcagatactgttaaccgctctgggtctgtccttgctctagctgggctcttggaagctgcaaatggtgaagctgctgcaacatcagaagttcttgatgcactggtgctgttgtcgcgatcaaaggcgtcaagtgggcacaccaaggctccctgggcaattcttgcagaaaacccccacacaatacttccccttgtttcatgtattgctgatgctgctgcctccttacaagataaagctatagaagttgtgtcaaggctctgttccgacctacatgatgttgtcggtggtctggtttctgaaactccaggttgcatgtcatccatcacacggcgcatcattggctccaacattcttaaagttaaagttggtggttgtgctcttctcgtctgtgctgcaaaagagtattgtcagaagcaaatagaggttctgaatgatgcaagtctgtatattcaactaattcattctttaattggtatgatccatatggcaaacacgcaagctgaaaatgtcagcagtgaaagcatatcagatattagaatttccagacactccaaagaaaacaacagtgatggtgaaactctgtgctgtactgctgtcatctcaggcaacatgattccactatggctacttgctatcttttctcgtcatgacagcaaaacaagagcagaactcctggaaatgggagcagttgaaatgctcatcgagaagatttcacaaaatgcattccaatatgtgggtgaagaagataacacctcatgggtcagatgagccagcatacaggtactttgcggcacaagctttgtcaagtctggtctgcaatggtagcagaggaactcttctggctgttgcgaattctggggcagccattggacttatatctttgcttggatgtgctgatgttgatatagctgatcttttggaattatcagaggaattcatgttggtgcctaaccctgatcaaattgcattagagaggctattcagagttgatgatatcagggttggtgcaacttctagaaaatctattcctcttcttgttgatctacttaaacccattcctgaaagacctggtgctcctttcttggccttgggtcttctgacccagttagccgttgattgccccccaaacatgctgctaatggctgaagctggaatcctagaagcacttaccaaatacttatctcttagtccacaagatgcaacagaagaagctacaactgaattgctgggcattcttttcagtagtccagaaataaggcaccatgaatcagcacttggtgttgttaaccaacttgtggcagtccttcgtctaggaggaaggaattcacgttatagtgccgcgaaggcattagagagtttattttgtgctgaccatgtgaggaacagtgagtcaactaggcaggctatccaaccgcttgtggagattctgagtactggcatggagagggagcagcatgcagctatatcagcccttgttaggcttctttctgacaatccttcaagagcacttgcggttgcggatgttgagatgaatgctgtggatgttatgtgccggattctttcttctgattgttcagtggagttgaaaggaaatgctgcggaactatgctgtgttctatttaccaacacaaggatccgttccacaatggcagcagctcgttgtgtggaacccctggttggtttactggttagtgaagctaaccctgcccagctttctgtggttcgtgcattggataggcttctagatgatgagcaactagcagaattagtggcagcaaatggagctgtcattcctcttgtggggcttttgtatggcaaaaactacatgcttcatgaggcagttgctagagctttggtgaaacttggaaaggacagaccagcttgcaaattggaaatggtcaaggctggtgtaattgagagcattcttgatattctccatgacgctccagattttctttgcattgcattggcagaaatgcttcggattttgacaaacaatgctaccatagcaaaaggtccatcctcagccaaagtagtacaacctcttttctctttgctttccaaggcggacatgggtcctgaagggcagtatagcacattgcaggttcttgtgaatattttggagcatcctgaatgccgtgctgattataacttgacacctcgccaaactattgagccagtgataaccttactgaattcatctccaccagctgtacagcaattagctgcagaactcctatcacatcttcttctagaagaccacctccaaaaggacacagtaacagagcaggcgattactcctcttattcaagttctttcttcaggtttgccaaatttacagcagagagctataaaagctctagctaaccttgcaatagcttggccaaatacgattgccaaggagggtggtgtttttgagttgtctaaagtgttgttgcaatctgacccgcctttgccgcatgttgtgtgggaatctgcagcatctgtattgtctagcattctacagtacagtactgagtttttccttgaggtacctgttgcagtactagtgcaattgctcaggtcaggaactgaaagcactgttgtcggtgctttgaatgcccttcttgtattggagagtgatgactcaacaagtgcagaagcaatggctgaaagtggtgctgtggaagcattgcttgatctcctgaggagtcatcagtgtgaggaaactgctgccagactaattgaggcattgctgaacaatgtaagaataagggaggcaaaggctgctaaaaatgctattgcaccattgtccatgtaccttctggatccacagacacaatctcaacagggaagattgcttgctgctcttgctcttggtgatcttttccaaaacgaaggtcttgctcgttctactgatgctgttgcagcatgccgcgctctagtcaatcttcttgaagatcaaccaactgaagagatgaaagtggtagcaatatgtgccttgcagaatctagtcatgtacagccgagcaaataagagagcagttgcagaatccggtggtgtccaggtcctgctggatcttatcagttcaagcaatcctgacacttctgttcaggcagcaatgtttgtcaaacttctattcaataatcacactatccaggaatatgcgaccagtgaaacagtcagagttataactggtaaacaatatccctttcttgttctgtcatattcatttgcatagcaaattcatatttgtcaatgcctgtcatagttcttaaggcggtaaggcgaggcacggcgagtgacccctgcctggacgcctaggcggacacctagg

SEQ ID NO: 23433 - DNA, 1591 bp, Zea Mays
tccccgacggggacggggatgggagaaaaagctcccccgtgagcgttcgcgggaacggggacggggaatttttgtccccgcggggacggggatgggaagccattccccgacgggaaaatccccgttgccatccctaaccatgggtggtacgaaaatagaaatgcaaaattaccatagtaagaagaccggcgaccttcatgaccagaatcataccttactctagttctgctgcgcatttcttctggcctttttcgtgactcagcagcaagaacaacagctatttcccgaccaaagaaaacttggcgattcatgtgatactgggcttcagaggcatcgtaaggatcaacaaactctacaaaggcaaatcctcgaggctcccatcaaattcaaatattcactgtgccctctatggttctcagcgaagcacagtcaacaacttacaaacattccatcagaagagaagcaagtgttgcaaaaagcagtaagatgcccaggctctagtgtccaagtttcttgtatacaactacgtaaggtgatcctcataaagagtatcttcataaaaatcgttcgcttcaagttccccaacatttgaaaaagtcacaaaagtacttgaaattgacttgactctcttttatcttctcatgtaccagccagtatatatgtctctcatcttctcttcatgaaattaattttctcaaagtatcaaatcttgtcttcatagaagaacttcattggacaagactctatcttgccaagcaaatgaattgttagtaatgttaaaaggcattctttgagaaacaaagagtatgcttatacttcaaactaacacaaccctgggaatcattaagaaaatataatccacatagtgcaatgatgaattggctatgggaaagcagagtacaagttcatactccatcatgttgttagatatcaattgatggtgcaagtcgattgcaaaaaaaataacatgagactcatcagagcttaagcgcaccaaacacattgcaaattagacattgcactgaaactgaagtatgcactagtgttcactttgttaaatataggatgtcagttctataattcatgcctctagaaaattagtttgacgattatgaccaagaggttgataggctagggacaacaccaattgaagaaaagcttgttcaacatcggttgagattgtttggacatgtccaacatcggttgagatcaaggctattaaggcgtccctaaagtgacgcttaagaggtaaggcgggcttggactcataaggcatcctgtcaccttgcccgcgagagtaaggtgtgagtgtgaggaggctctgcggcgcgcatggctccgggaaatgcacggcggcagcgcgggggagaggaggaggagagctgcgagagagggagagataggagagtggctgaggctagcagcgcgaagggctccggtagaagtgcggcggcggcgcaggggagagggagagaggacagctgcgctggcagctgagagtggagagcggctgaggctggcggtaggtttatcataaaactagtgtgttgggctggacagctggttgtgggcttttttctttttctgtttt

SEQ ID NO: 23434 - DNA, 2947 bp, Zea Mays
gagaagccgaaatgtaccccccacggccggcggcgcgtttgccaccgtccagttccatgtcggccaccgtgttctttctgcccgcaaatccaagctcgacggctagtcccgctaacactctccggcaacttacgccggcttccacctccggaaagctccacttcgcggcgttcccgctccgcctcccccgccatgcctgcgcaaggacctatcgctccgccgcattcgggaggggatcgcctgtggccgggcgtagagagaaggactactacgccacgctgaacatccgccgcgactccacgctccaggagatcaagtctgcctaccggattcttgcccgcaagtaccatcctgatatgaataagagtcctgaagcagaagaaaagttcaaggagatcagtgctgcatatgaggttctatctgatcaagacaaaagatcattatatgatcgctttggagaagaggggctcagcggtgactacagaaatggagatattggcacacatgggattgatccatatgaactcttcaatgctttctttggtagttccgacaaactttttggggatagtatggggtctgggggatttcattatagtgcagaagcaaaggacaatagggcacttaacatcagagtccatcctcggaggcaaacgtgaaatcaatgtttttcgccatgaaacatgtggcacctgccatggaactggagctaaatgtagcaatgacattacagaatgcacccgatgcagaggtcaaggcaggttgatgaaaactcaaaggacaccttttggtatagtttctcagatatcttcatgcttaaattgtgaaggcagcgggaaggtaattactgaacattgcacagaatgttacggttcgggcagagtccaaattgaacgcattatcaaagtagatatacctggaggtattgatgatggctccaccattcgaattagtggtggaggtaatgttgataagcaaaggggtgcaagtggtgacctgtatatatttgttcgcgttaataaaaaacaaggcatccacagagatggtctcaatctgtactcagatgcttcagttgattatactgatgtgattttaggtaccacagtgaaggttgaaacaatagaaggactcaaggatcttcacattcctcctggcacccagcctggagagaacttaaaattttctcagctgggagttcccgacattaagaagcctaatgtcagaggagatcactacttcatgataaaggtgaaaatcccgaagagtatcagtggccaggaacgtttgctagttgaagagcttgctgcactaaagaaagctcagaatatctcagttccagaacctacaaagatagaaaattttcgggagagaaaccatcatccatctgcaaagagaagatcattctggggacgtgtctggaattttttcagggatgataaaggtgataaaagatttgcttcaatcagtgtgcaacctattatcccaggatggaattcttgccgaggaactgatacggctgtccccttgctattaaaaggattcctcatgaccgcaatattcttatttgtaatcagaagtaaactcaggtacactgggaagcgcattgaccgtccaactcaagctgaaatacctgttgagccagagtgaatttctgtcgtcttcatttctgaacgtttgcgacatcacagttttgatgatgatcataaatacgtaactttgccgcgcaaagcttcgtcctgggaaaagaatccggctttgcttgcagtgtatggtatccagacgcagcagtacaggttaacagaatatgggttgcttctcattagtcatttcttgattcattattccaatatgtagaagacacctgcagcaattccgagttttgacgaaagccacatgaaagacatgaagaaacatggccgtaggctaatgtacactgtatgtatcttgtctgcacaaagttttgtaaccatcccggcttgatatcgtttaacgattttgttgcaacataattcataagcactgaatttatgcaaacaacagttctgacgcgagacgaattggaataatcacaattcacaaacacaacaatgctcctattcacaaaaaaaatgctcctatccatacagttcaaatgcctctgtcatgttcaaatggaaacgattcgtttcgctttgagacgaagcagttcaaatgcctctgccgtgttcaaatgaaaacgattcatttcgctttgagacgaagtagttcaaatgcctctgccatgttcgatcgatttccagaccgagacaagcgccgcagcccgcagcagaaggctcgcgacatcagctcgagccagctgacgggatccacacggtgccatgtcttcccggcggccgtcgcatccgtcccaccggaatccacggcgattcccgtccgcctgctatcttctagtactcacccttgccctcctcgtcgtctccgccgccgccaagtcctcccgccgccccatctccgacaacgagatccggcagaagaaggaggcctgctacaccgacgtcgagaacgggctgtggggatgggtgtgcaggtactcgccgacggagaaggagaactgcgtgctgcgctgcctctcgccggagtgctacgacctcatatacggcggggatccgcttgaggaaggggagttggactatgttcgaagccaggagtacaagtattgtatgcacaaatcatcccttggagaaagcttggatggtgtgaagggatccttcagctactcatgaaggaatgagaagaaaaaggttctgttagtctgctgtaaattttatttacaatcttgaacagacatgcatctttttagataatggaattgtaattccagactttgctttttctcaaagcatcaccggtgcatcatcttatattaaacttacaaatgcaaattaaacattggattcatttgttggcc

SEQ ID NO: 23435 - DNA, 2464 bp, Zea Mays
cggaggaagaggaggtggtgccggtggtcgtgctgctgctgctgctcgtggtggtggctgtgcaggtgcggagatcgtcgatcgatcgctgcggttcgtcggcggcggtgtcgagatgtcgatggacttcggtgccccggcggatgaccccaaggctttccgcaacatctgccgcgaccggatactgaaggacctgcttaagcctgacaaggataaggagaccaaaagctcatggaaggttcttataatggacaaattcacggtgaagatcatggcttatgcttgtaagatggcggaaattaccgatgcagggatttcgcttgtagaagatctgttcaagagaagggagccaatgccttcaatggatgcaatctactttcttcagccactgaaagaaaatgtcataatgcttctatctgacatgtctgggagatgcccactttacaggaaggcatacatcttcttcagctcaccgattcctaaagacttggttacttacataaagaatgacagtagtgtaataccacgcatcggtgcactaagagagatgaatttggaattcttcactattgacatgcagggctttgtaactgaccatgatactgccctgattgatttatacggtccaagtgaacaaaattccaaaaagttcaacgatactataagcacaatggctactcgcattgcgactacatttgcatcattgaaggaatttccatgtgtgcggtatcgggcgccaaaaggagatgcttccacaacaactaaattcgatatggttccaaagtggcttgctactgctgtttgggaaattgtgtcaaaatataaatcaactattcctgaatttccccagaaggagacatgtgaactgctaattgtcgacaggcccatagatcagatagcacctgttattcatgaatggacctatgatgcaatgtgccatgatctactcgaaatggatggcaacaaatacatttatgaggtatcaaagatgggttcggaacctgaaaagaaggaatctttattagaggatcatgatcctctttggcttgaacttcgccatgctcacatagctgatgctagtgagaggttgtacgaaaagatgaacaattttgttgccaagaataaagcagcacaactttcaagagatggtggtgaagtctcaacacgggatctgcagaaaatcgttcaagcattaccccaatacagtgatcaagttgagaaattgacgctacatatagagattgctggaaaaatgaacaggtgtatcagggagtatgggctccgtgatattgggcaattggagcaggatttggtttttggagatgcgggagcgaaggaagtcatcagtatcctcaggtcaaagcaggatatgagcccagaaaacaaaatgaggttgctgattatatatgcaattgtatatccagagaagtttgaaggtgacaaaggggaaaagttgatgcagttagcgaagcttccacatgatgatatggatataataaattgtttaggatacttggatggttcaaatacaaaaaaatcatcaaggacgggtactttctctctcaaatttgatgcccaaaagaagaaaaatgctgccagaacagacaaacaagatggtgaggaaacatgggctttatcacgttttttcccacttattgaggagctgattgagaaactgagcaagggtgaattacctctaaaagagtacccatctatgagtgaaccaagttctgcttctgcttctcaagatgccacacaaactgcatcatcaactgcacgaccagcacaaaatccacaaccgatgtctatgagatcaaggaggacaccaacatgggcaaaatctcgtaattcggatgattcttcaagtgattcttcagtcctgagacacgcatcaggtgacttcaagaggctaggcaaccggatttttgtcttcatgattggtggagccactagatctgaactgcgcacggtgcacaagcttacaatgaaaatgaagcgcgaaatcgtcttgggctcttctagcatcgatgatcctccgcagtttatttcgaagctgaagtcgataggtagtgctaccaagacctagcttgtatgccgagcgataaaatgaattctcaccttatagtactcagtataagctctacattttactaggatgttgtcggctgtcaccagcgacccattgattatcgtcgaactgatcacagttattattctcttaatttttttttaattgaggaagtgagctggcttgtctggatgtaaaataagaaatacgtacacaacgttttgtttgttatttgatgttcttgttgacaaacagataaagagagaagtcattaggaggttttgtaaaaaaggcctaaaattgatggttatatgatatagaaactgtattgcacggatctataacagaatatggataaaattgattatggagggacacaacttcctttgcttgctc

SEQ ID NO: 23436 - DNA, 690 bp, Zea Mays
cgctctcatgtgcatcccacacaggtcggagcggcagccacccgtgatgagcaaagcaggcagcggccccgggtccgacggggcgacggctgcggcggcgtccgccgcggtgcagaagcagaagtcgctgatgtagaaggcgggcccagccgtctccagcctcgtcgacaatttctcctccctcatcaacatcgctcgagtcaacgatccgccagtgcacaactcacaggaggcctttcagatggagatgcgcgctgtccgcatgggggattgaagtgctgggtcagcaagctaagggaactgagagaatgctggaaaggattgggcaggaggtagcagcgagcctcaaggagctagaggcacactactactcatatgttgtgcgatcaccatcctatgattgaggttaatcttatcattccaggataaaatttcttgtgtttccaatatgcactcatttcacatatggtttaacagcgactgtttgttctatcattggagtatcactaagttgtagcagtgttaatgttatgtggaatgatttaatctcagtgctagttgtatcgtgctttacatatatatatatataggtgcatgatgcataattcataaagtcgtatatctatttgattatttatctagcataattttttatttgttcttaataatttaaggataaatagtttacag

SEQ ID NO: 23437 - DNA, 3709 bp, Zea Mays
gcagacctgccgtttccatgtgcttgcttcacggagcacggcagctctgtaaacggcagactcgacgtagcttgcacgcacaggggttttcagctaaaaaatcctctagcgacagttcattggttgcccagttcaccgactgcctttataaacagggagctcgagctcgagtggtagcagcacaggcacaagtgcggtgccataagtgacagccacctcagtctctgtctgtggagctctctctcgcgcgcgttgccatctcgcaggtacaaagcatgctggcttccgcttcttgacaagcacactaagggtgtggttgtagatggtccattggttgttcctcttgattgtgagtggatatggcactgccatcgccttaacccggttcagtacataagggactgcaagaaagtgtatggcagaatactgaacaataacaacgttgagtcgtccactcaaacaaagtcgacacttgagtcagaaaaagtttggaaagagctgtatcctgaggagcccttcgaattgttgttcacaagaacctttgacactgccgtggatgtcaaccctgcaggtgcagaggaggacattacctatgatctggtctcggctgttaagagacaatcctctttctattatcaggttggaacaccaacaatgcatgatccacggtttctccaagaagctctagctcgatacaaggcgtttctttacctgatcaagatgaatcaagaaaaaggattgcagcgcttccgtgtaccaacctatgatgtggatctgttgtggcacactcaccagctgcatcctattacctaccgcaacgacatggtgaagcttcttggaaaagttctggagcatgatgacaccgatgctgatcgatctgaagggaagaaactcgatgttggatttaccgagactactgaacagttcgagagtacctttggtgtaagatactggaaggctggatgtatgtaccgtggcaacgtgccatctcctgtgacatccactcctcagacattcagtgctgaggttggtactgggtcttacatctgcaaagcccagaaagatcttaatgcccttgatgtaacagttgtagagttatatttacaaattgtagacatcaagaatttaccatctgctgttcaaaaagaaaatgtgtatgtacggttcgccaagaatcaatcagatatgttcatcagtgacggcggcaggttggatatctcaacagttacagggaagaacaccggagtttgtttacagtgtgaacctaccggagaactcattcttgcagtaatggttgatcaattatcaaagaaaccagaaccgatagggaaggtttctttcccactgcacgatttgacagggcctgattctaagctctccttcgagaagtggtttgaactgaaagctcatggtgggcatgccgcttcacctcctgttagtcttcgtgttgcagcttctgctactgtcccaagcagcgctcagaaggtgttcaccatggtcaggatggagccattctctctcaagtcatgtcttttgccacattccatcaaggatcagaacacgggcagctggactcgtttcgtaaatgattgtggtaccgagcttatccgtctccagataagagagcacaaggcgaagaatagcatggccgtcgttcgagaattggttggagtattgaagtcaacaaaaaagcaaattcaacttgcagaattcaaggaaaacaagtggaccctaaaagactccaacttgccaataagtcatggcactgatggcagtctactcgatctcaaaggtgacaaccatctgatcaagctttatcggggaaggaaactggaatacgagcgcaaatgttgcagcgctcactctgaggacgtatcagctgttactgctgtaaagttctgtgctgaacatccatatggcaaagccgttgccttgctagacactgaagctcagcttatcatggtgaacgaggattggctcctacttccatggatctccatatcagtcctgtttatggacggcgatggcggtacgaaacttggcggcggtgccatggttcagaaaggtacagtgtttggatccgacactagcatggtgctagagacacagaccgtcggagcagggagcgtggcatccaatctagcacaatgtggcacttgcagcgccgtgttcggtggtgatgataaagaaatggcgaactgcaaggttgagcatgcgagctctggcgcttctcgcacggttgttgcaagtggtgagaatgggcacactgagactgctggctgtggaggcggctgtggtagcaattgtggacccatgatggctgaagaccccaaggccggcaatgccaagtccggaggctgtggttcggggtgtggtggtggctgcggtggcgcgggaggttgtgggaccatggccaacgaaggccaatccaggtccggaggtgttggcaccttgttgagctccaacgccatgggtggtgagggccagcaggcccattcagctggctgtggctccggctgtggtggtggctgcggcagcggcatggtcatcgaaggctccaaggttaacaacgttaacgccatgtccggcggctgtggctctggttgtggtggtggttgcggcagtggcatggtcatcgaaggctccaaggccaacaacgccatgtccggtggctgtggctctggttgcggtggtggatgcggcagcggcatgctcatcgaaggctccaaggccaacaaagccatgtccggcggctgtggctctggttgtggtggtggttgcggcagcggcatggtcatcgaatgctccaaggccaacaacaccatgtccggcggctgtggctctggttgcggtggtggttgcggcagtggcatggtcatcgaaggctccaaggccaacaacgccatgtccggcggctgtggctctggttgtggtggtggttgcggcagtggcatggtcaacgaaggctccaaggccgccaacaccatgtccggcggctgtggctccggttgcggtggtggttgcggtgccctgttcaacgctagcactgctgccggagagggcctgcacaataagtcggctgggtgcggcggcggcgggtgcggctccgggtgcggcggtggcggcggctgtggtagcggcatggctatcgaaggcttcaaggccaaccacgccaagtctggtggctgcggctctggctgcggtggtggtggctgcggcaccctgttcagctccagcgctgcggccagccaaggccagtccagatccggcggctgcggctctggctgcggtggtggaggctgtggcactggcagcatggtcgctgaaggctccaacggcgggaacgccaagtccggcggctgtggcggcggttgcggtggcggaggtggctgcggcggcggaggctgtggcgggggttgcggcgccgtgttcaacgcatgatctcggtggagtggaggcatttgtgcagacatgcagtcgtcgtcgtctactgctagataccacatgctacagcatactgtgtattgctgtgcataatctactaaataaaaggaatgaataaacaatggatggatcggctgcctccgtggcgtttctgcaaacgaaaaatctcggtgttgttgggtgcagggatgaggatgaaaacgatttcaaacggtccgaaacgatatcgtctatttaacggttggttaagaaattacctgattta

SEQ ID NO: 23438 - DNA, 3974 bp, Zea Mays
gttctgccgcgcgcgcatccgcatcccgcaaccgccccagccgtgtatcccgcatacgcccgcagccgccatcaacgcccgcggacccctcagcctcctccttaccgccgcgatccgccagaccaccgccccccccccgcacccgccgcagatctcgccatggcggcgcgcacgccccccagcctctccgacgttacaggatgcgaggttcgcgcgtggactcggcgtcatctccgcgtggtcctcgccccccccccccgagacacccgctcgcaatgttcgggagtccgcgcccgccgtcgagaggtacgcctagcccccctcgacccaccgagacaaccgctcgcgatgtcctccctatcgagacagtcgccgggacgtacgcccagccgcctcctccaccgcccacctacagcgtcgagattgtcgtcgtcctcgcgtctgcctacccacccccgttgtgcccttgggcccggatctggcccgacgaacaacgaatccctctcgcgcgcgcagcgccacagtcgtcgatcgcagtggcagccgcctagccagacgattgagccccaccgctgctgccgtccgtggaatggagctgactgccgacgagttgagccgctcgtggaatggaactggcagcctcctcctcctcctccgccgccggctgtggcgacctcgaagtgcacgacgccaatgacgctccggggaacaggtcgtatctgatgaacaaggcgcgagcgttcctggagctcttcttcgcgatgtggttcgtgatgggcaacgtgtgggtgttcgacgcccggctggggtcgttccagcgtgcgccgaggctgtacgcgctctgcgtcagcctgctggcctggaacaccgtcgtctactcgctcacgttcctgagtgctgcatctgccttgcgtagtacggggagaaggaggaggttcggcagctgccgtgcacacacgtgtttcatctcaagtgcatatacaggtggctcaggatcatctcctcttgccctctctgcaagcaagagctcaagtgaactttatattcattacacacatgacattctcgcttattctttggatcaaggtgttagtatcctagacacaacagatattttccagctaacaagggaaatcaaggaagaattgatctttatattagcaggcggatgcaatcactaatcaaaaccacgatgcaaggtaacctaaatggattttaaattttattttggattgttaaatctttatttctgactactattgttttatgtcgtggatgccctcgtgaggttctacgccgacgccttcaggagggattcacagaggccatggtgaggatggccagcttgagtcggctcaccgggagcagcgcgagatccgctacaactaaatgataggaggtttcgctgccatttgcagcgactgtgttccagttcgaccgtttggggaaaaggtgagtcctcccatttcatgtagatgcatgggttgataaacatttgggagaaatgtcccctctttaattcgaaaaatagttgtgtatttgttcgacttatctgcggcgatgtacctttgtacgcgtacaaacatctatagacaaaaacaaaatgacacttcatggatgtagcaagagcgggctacgagaaactagcagatcatgcctaaaattcaattagcattagggtcagacaaaatactacattttctggattacaataatgtataggtgcatgaaaaaaacttgattccaatgtgtgacaaagtgtgaagatgaaagtgcactttcacgctgtcataacgcggatttgttttccttgctcatggaatgtgcatttgtgtgtttgcgtctactgtgcggctacaggcaaggaaacaggatctgtcacggaaggtatgtacacattacagtaaacgttgttcgtagaacatgcactttgtggagtggtctttgaatgagatgcgtttagaattaccttttcatgcagatctcttgttcagaacctggttgcttagtccattcttgttttgggttgctactacaaaaaagcggcaatgctttatatgaatcgcctcttactaatatccagggtcaaatggtggtccttcagtgaccagactaatatttgagcattaatcttatttgtttcacagtcatttcttgtttatcaatatgaatgctatttttttgcgagtggacttgttaactaataagctcatagatatttgaacaaaaaatagtgttttgttctaaaactgtcataaagagtgcatacatcatagctatggtttcaactgtgatttgatgtcctataatattgagtgtcctatagtgtgttgttctgaaacagtcacaaagagggcctaagaagctgatggaatcctcattcaccgccgctaaggagtttgagcgggatcggagaggagacgtcagttcttcctcctctgctcaatgcggccattcgccctgtcccccaaccctgaactccacactgccactccgtgctcattttttctgaaggggaaatattcatctccttgttgttttgtaccatggatactttagcatcattctcatactactaggagtgtaggtaaggagtccacacacgagtttgcaaacaccattaagcctattttgcttgattagtgccctgcaacacttcatatgttcaagacaaaatccatacccatgtctattgttgtatgatattatttgcattgaccgttgctgctcttcttgattgcagtcactaacattgcattaatctatgtgatacatttattcaggcgattcccatttctcagtgatgtcgatgtcctgtactcctgtatatttggattcaacaatatgccattagtatgctgtcaagcgtcctatttgcaagagataaatggcttacgcccgaggggcttattcttccttatcatgcgttttcaggtcggtcgtgactttggttatccactgaaaagatatgcttggtggtgctttcttgtgttgaagaacaagtatcccacggaaccacaaccgtttgtattatctggtgatttcctacattattagctggcctaactaaaccatgcgctcagaccctaaaccagctgtaagtctgtaacttaaaagcacagtgcactagcggaatggggttccttgctttttggagcgtttccccagtcagatcggcggcagggcaggtcacgtggacggggctccttgttgctggaactaaataccgtggagagtttgaagtgagactaaagaaacttatggaggaaattaagcaaaatgaagacattattctctttattgattaagtgcacacactgattggagcaggtgcagcagaagtgcattggtgccacaacactggatgagtataggaagcatatagagaaagatcctgccttggaaagaaggtttcaaccagttaaggttccagagcctactatggatgaaacaatacagatcttaagaggacttcgtgagagatatgaacttcatcacaaactgagatacacagatgatgctttaattgctgctgcacagctgtcttatcagtatatcagcgatcgttttctgcctgacaaagccattgacttgattgatgaagctggatctcgtgttaggctgaggcatgcgcagctccctgatgaagccaaagagctggacaaagagctgcggcagataagcaagcagaaaaatgaggctgtacgtggccaagattttgagaaggtatactgttgtttggcacagcggtgacaaagccgatccgctcccacctctctagcaacgtcgatatggttaataccaagcattatgttgtttccttttgagataaatattttgttactgattttaccttttgtctcctcttcttgttttttgttctagaatctgtagcaaatggctaacgatgaggatatccattactttgtttatgacaataaaactgatatgttcaagattccgtagcaacgcac

SEQ ID NO: 23439 - DNA, 1163 bp, Zea Mays
gactgctagctcgatgtgatccattggttattctttgactgtttgtagatgtggtgcaacttaaaaccacttccaggagctaatcgactgataaaacatttaaagactaacggggtgcctactgctttggcttcaaactcaccaagatgtaacatagaagccaaaattttcttccaacaagggtggaaagagtctttctctgcaattgttggtggagatgaagtagagaaggggaagccatccccgaatatatttttggaagctgcaaagagaatgaactgtgctccttcaaattgcttagtaatagaggattccttggattgaaggtaccttaccaatagaaccatggtttattggtgggcctgtgatcaaaggatttggccgtggttctaaagtactaggaataccaacagcaaatttacccgcggagaatttttccgacgtagtgtcagaacatacatcaggggtatactttggctgggcaggactttcaacgcgtggtatatataagatggttatgagcattggctggaacccatatttcgacaataccgagaagacagtagaaccttggctgcttcataatttcggcgaggacttctatggcgaggaggtgcgccttgccatcgttggctacataagacctgaggccaactttccttcgctcgagagcttgatagagagaattcacgaggatggaagagtagcagagaaggcactagacctgccaatgtatgccaagtacaaagactcgccttatctgagaaacccttcgaagcacgggagtagtactaccggtgggacccagtctgagatggattccaagtgacaacccccctacagggccactagataatatgttacttattttctctatggtaaatgcgtcggtgttgatgcagaaacaattggactctctgtgagctaactcgcttcttaattttcggaagtagatagtattcctcgaagtggtgtttttactttgtaatatagaaaaaaataaagtggggttgttgaaacttgagagtcaaattccgagacgttatgcacgttttgatttctgaattaatcgattggtatcacttgtactgtttttatacgatgatgcttgaaccattcatttgtcattttaatttgatatacttgaagtcaacaatatgctt

SEQ ID NO: 23440 - DNA, 1757 bp, Zea Mays
gttacactcccctgccaaaagtcgaggacatatagccgtcgcgcgctcttcttcctgggtggagcgtccatgaggtggaagcagcagcgtccctagtgccagggtctgtcggctgagtgcgggggagaatgaaaggagtgtccgaaggcctgatcatcgggaccacggtcggggtggtcataggcgtgctgctggctctcgggacgctgctgtgcctgaggcggcgtcggcgttcccagacgcagataaggagcagcagctcgaggagggcgtcgactgtccccatccgcaccaatggcgttaacgcctgcgccatgctctcgaactcgaccacggggcaggagtctccgactccgcgggagctcgaagagcgtgggagttctctgtggatccaagggccaggtagaaagagcgtgatctctgcttctggggtacccagatatgcgtacaaggagctacagaaagctacaagcaatttcacaacattgttaggccaaggagccttcggccctgtctacaaagcagacatgtcttctggcgaggtactggctgtcaaagtgctgtcgaacaattccaggcaaggtgaaaaggagttccaaaacgaggtcttactccttgggcgactgcaccacaggaacctggtgaatttggtcggctactgcgccgacaaagggcagcatatgctactgtacgcgtacatgccgaacgggagccttgcgtcacacttatacggcgaagacagtgcgccactaaagtgggacttgagagtaagcatcgctctggatgtcgctcggggtctggagtacctgcacgacggggctgttcctccggtagtccaccgcgacatcaaatcccccaacattctgctggaccaggcgatgcatgctagggtcgccgacttcgggttgtcgagagaggagatggtcactcgcggcgacggcgccgccaacaacatacggggaacctacgggtacctcgacccggagtacgtgtccacgcggtcgttcaccaagaagagcgacgtgtacagctacggcgtcctgctgttcgagctgatcgccggcaggaacccacagcagggcctcatggagtacgccgagctcgccgccatcaacgccgacgacgggaggaggaccgggtgggaggagatcgcggacgcgcggctaggaggcgcgttcgacgcggacgagctcaacgacgtcgccgccgtggcctaccgctgcgtcagccgcgcgtcccgcaagcgccccgcgatgcgggacgtcgtgcaggccctggcccgcgtggcgaggcgcggccgcggccgcggcaggaagcagcagcaccacccgccgcaggccagcagtgccgccgcgggcgacgagtccgccgtcgacctggaggcggaggaggggtccgaggcaggccggtcgtcgttctctggccttcttcagagagaggagtcggtcggcagcgtctctgatctaccagatgtctgagcctgacggattcttttgtttttgttgcctagagatgcagttttgagcagtgagggtgggtgtaacttgtggtggtgcctagtcaattgtaagtgtgttgtatagagtgcattgtgagttgtgactacttttgttgatatacacaagctgattgttaccatgtcatttgtcattgcctttttcagcttatgcatgcatggcgcatatacatcacagtgtaaaaagttgttttgcactatagactcctttgaaataaagaaaaaatatgaagaatttttt

SEQ ID NO: 23441 - DNA, 3627 bp, Zea Mays
  misc_feature (1)..(1): n is a, c, g, or t
nagtattcagcacaccactttaccttgtttgcaagtgggcaatcagcaaagaccaaattatctgcctatggaggtctgtaagatagttgaggggcagcgctactcaaaacgacttaatgataaacagatcactgctctactgaaggtgacttgccaacgtccccaagcacgtgagaaggacatcttggagactgtgtatcacaatgcctactccaaggatccttatgcccaggaatttggtataacgattgatgagcgtcttgcatcggttgaagctcgtgttctgcctcccccaaggctgaaataccatgatagtggcagagaaagggatgtattgccaaaaattggccagtggaacatgatgaataagaaaatggtcaatggtggtagagttagcagctgggcatgcattaacttctcacggaatgtgcaagatggtgctgccgggagtttctgtcatgaattggctttgatgtgccaagtatcaggaatggattttgtacttgaacctgtgctgtcaccttgctatgcaaggcctgaacttgttgaaagagcactaaagggacgctatcaagatgcgatgaacatactcgggcctcagggccgagaactcgacttgctgattgttatactgcctgacaataatggttctctttacggggatgtcaaaaggatctgtgagactaatcttggattggtctcccaatgctgtctgactaaacatgttttcaaggtgaacaagcagcagtatcttgcaaatgttgccctgaaaataaatgtgaaggttgggggaaggaatactgtgcttgttgatgctttggcaaggagaatcccccttgtcagtgacatagcgactattatctttggtgctgatgtgacccatccccatcctggggaagattctagtccttccattgcagcttggttgcttctcaagactggcctgaggttacaaagtatgcaggattggtgagtgctcaagcccatcgtcaagaattgatacaggatcttttcaaggtatggcaagatcccgaaagggggactgtctctggtggcatgatcagggagcttctcatatctttctggagggcaactggacagaaaccaaagaggatcatattctacagggatggcgtcagtgagggacaattctaccaagttctgttgtatgaacttgatgccattagaaaggcctgtgcgtcattggagtctgactaccagcctccagttacttttgtcgtggtccagaagcgtcatcacaccaggttgtttgctaataatcacaatgataatcgtgctgtcgataaaagcgggaacatactgcctggcaccgtggtggactcgaagatctgccatccaactgagtttgatttctacctgtgcagccatgctggcattcagccgccctgcccattaccatgttctgtgggatgagaacaactttacggctgatgggttgcaaactctcaccaacaacttgtgttacacgtatgctaggtgcacacgctcagtatcgattgttcctcctgcatactatgctcacctggcagccttccgagctcggttctacatggagccagatacgagtgacagtggatctatggcaagccgtggccctccaccaggggggcgcaacaccaaggctgctggtgttgggaatgttgctgtgaggccattacctgccctcaaggaaaacgtgaagcgggtcatgttctactgctaagactgatgctgttaaggcagagctaccttttattattacagtatatcgtgaagactagagtattttttccatgtacttgatgatgctgagctaccttttattatgtcgtacgatatatatgcgtggtactggttacagtaactttagttgtgtgttccatcgtcatgctggtctctagctggtgggcaggtggtgttacgtgaaaaacattctctaaaattcatcaaatttggacatagacttgaacatatcaagaaaaagagtggatgtatttcacttaccccatcctcacttcttgggctcgtgatgaaaagagcttgattaataaattccgaaggaaatgatattttgaacggaaagaccttggcatcgtcagcggcggggtcaccgtaccgttggtattatattatactgatttactgaatacgtaattaattaggtgactgaaaatatgacgatgaggtgacgcatgttcgtctcatctgttgactgcgaatagccgccggctgtcggcggcgtgcagcttcctgccttcttcgtcttcctcacttcatctttcttttggctgcagcatcatcatcgtcgactctataaattaatgtaatgactgtccatctctcctcccattgcttaccttccttgctccattctatacgtacatagtagtactgaatcatcagatcacaccgaccatggccatggagacgcagacgcccgagaccatcgtccctccgaccaccatccctcctcttctgaccccctacaagatgggcgcatttgagctggaacacagggtggtgctggcgccgctgacgcggcagcgctcctacggcaacgtcccgcagccgcacggcgccgtctactacgcgcagcgcgccacccggggcggcctcctcatcactgaggccacgggcgtctccgacacggcgcagggctacaccgacacgccgggagtgtggacgcccgaccaggtggcggcgtggcggcccatcgtagacgccgtccacgccaagggcgccgtcttcttctgccagctctggcacgtcggccgcgtctccaccaccgcgctccagccgggcggggccgcgcccatctccagcaccgaccgggccgtcgcgccgcagctcagcttcgacggccacctcgagaagttctccccgccgcgccgcctggaggcgcgcgagatccccgccatcgtcgacgacttccgccgcgcggcgcgcaacgcgctcctcgcgggcttcgacggcgtcgaggtccacggcgccaacggctacctcatcgagcagttcctcaaggacagcgccaacgaccgggacgacgagtacggcggctccctcgagaaccgctgccgcttcgcgctcgaggtcgtgcgcgccgtcgccggcgaggtcgggccgggccgcgtcggcgtccgcctctcccccttcactgactacatggactgccacgactccgacccggaggccctggcggggtacctcgtccgcagcctcagcgacgtcggtgtgctctactgccacatgatcgagccacggatggccatcgttgacggccgacgccagatcccgcaccgcctgcgcccgttcagggaggcattccggggcaccttcatcgccgccggagggtacgacagggcggagggggacaaggtggtggaggaaggctacacggacctcgtcgcctacggcaggctgttcctggccaacccggatctgccccggaggttccgcctccccgacgcgccgctcaacaagtacgaccgcaccaccttctacacctccgaccccgtcattggatacacagactacccctttctcgccgacgccgacgccgacaaataaatgatccatctaccgtcgccgacacgccggcctcccctcccctcccggcctccccagtcc

SEQ ID NO: 23442 - DNA, 2608 bp, Zea Mays
gtgcatgtttgacgaagtttatctctatgttgctctaattttctattgatctttactgaattgacacatgttgtggttagcgatcatggcatgactgatgggggtaatcatggaggatcttcatatgaagaaactgattcacttgccttttttataggacacagcgttgagagcccatattgttcaccctatgaccagaatgaagcacttcaagtggatcttgccccaactcttgctcttctatttggtgtaccaattccgaagaatagttttggtgtcgtgcttccaaagcttttaaattcgttgacagatgaccagaaactaaggatgttagagcttaactcatggcaaatcttaagattgctgcaagcacaagtgtctgctttctgccttgaagattgtattaatgtggagagcagtattgaacttgacatccttcctgaatctattgagcaaaagttatgttttttactttctaaagccatttcttctcatcagtcttcacgtcttcatcgaggttctgatttcaagtctgttgaagccgggtactatgggactgctgcagataactaccacaccttcttaagaaatgcgaaaaccattatatttacttgtctctgcaatcatgttgatgacaatgtcatgccttttcctcatgggtactgtgtcttacctatttaagggacgatctctgagtcaagctgatcaccattcagagtcatatttggatcaacgctggcaccttgatgaggttctcgttcttgctgggatgtttctctatgtcatcagtcttggctcaagttcttttgtggaagaagagcagtatacatggcacttcctcacttctactctgtatctaatatttctggccaaggcagttcagtcaatgctaaaaggatcaaatccaacacttggtcataaagcagaaggaaatagctttgacagaagtagctttttctatgctacaagctatgaattaacaccaggcaagagaaatggttacaagttatgtactatccttgttgttcttgttgctggaagagttataagagcttggcatcaaggtggaatcaactgggttcactttcctgatatttccaagttactggcgcaagctgacccttctgttgtaaagtctcttcagattatctcagttcttgcagttgtggtattgttttcaatttcactcactttactcagagcaagaccagagtttgttataggagtatggttgacccacatttcttgtggatttttggtcctactgcatgtttggggaaatcatattggtacttcattaccaattaaccataccacagcatcggtagctcgacaattttatgtcattgctagtgtttcagtatctgtcactgttcttgcttcaccttgggtatttccaatattttctagggaagcaaaatcaccgtcctctggttctagtcctgtaaaggcaatacatggcatcagaaaatcacttgttctcactggaatgacatacacagcgttctggggccttctgcaattgcttcttcaacaaccaatcaatgcaattcctcttttcctcattttattgcaaacagtctcgagtgcagttcatttttctctggacaaaacattacataaacaatgggtacaggttgtggcaatgcatttcttgggaatggctggtcacttcggtcttgggaatacaaatagccttgccagcattgatgttgcgggagctttcattggcatttcaagttactccacagttctttctggtatactgatgtttatgataacatatgcatcacctctcatgttataccttgggttggtccttcatgcatcggtgaaagatgtcgatgatgcctccaatctacggcagctgaaatggagctatattctagacaaaattgtcacattgccatgtttgtttcctttgctcatcaattctcttgcgttgacttcatacaccattgttttgctagccatgaggaatcacttatttgtttggagcgtattctcaccaaagtacctctatgcctgcgcagcaacagtgtgcacatatgtcggagtatccatcatagctatgactgcattatacagttgtgctgttttcaagttcagggcgagaagctacagggataaatccctgtaatcagactaatgattagctgttctgatttaatggacatttgtaagaattcagaaagggagggtatcttggcctattctctcgttgtacaacaacatcgtactcacatgtttccagaccaccatgcaatccctgcaagggtctatacacatttctcgttctctttgctaatcgtattggattaagtttgtcctggacacatgacgtaagcacgttcaagatgaacagggggtatggagtacattgtagcctgagtcctgtttcgattgagagatccatgttaaccatttccgcatatggatctgggcattaagccctaaatacgtatgccgtgtatcatctgttaagaacaatgctaggaatttctgatagcaattagagcattgtatattcctgcgaaggggtgaaacacatgcgagcgaatttattcaaatgaatcgaaatatttacaatcacactgatataccaatg

SEQ ID NO: 23443 - DNA, 6640 bp, Zea Mays
  misc_feature (6639)..(6640): n is a, c, g, or t
gatcatctatttgttctctcggaatatgcatgattcttctttgacccttataattcatacaacatctgcccgcttgatgctgaacctggttgagcccatatatcaaaaaggtgttgaccagcaaagcatggacgaagcacgagttttattggggcgcatattggatgcattcgttgggaagtttaggaccctgaagcgaacaatccctcagttgcttgaagaaggtgaggaagggaaggaacaaccgaatctgagaatgaagcttgaagtcccattacagactgtgctgaatttgcagcaacctttggagtatactaaggaaatcaacgattacaaaagtctgataaagactcttgctgtcggaatgaagacaataatatggagcataacccatgctcactggccacgcccccaggtgcggaagacatctggtgttctgaagtctggcgttcactgtctggctctttttaaggaaaaagacgatgatagggaaattctgcaatcattttcgcagatgctggctataatggaagctcgtgatattatggatatgttctccttttgcatgtctgacctctttgattctatgataaccaacaaccagctattgcacatattttcaacccttttgcaagctcccaaggttctgcggcctttcacagatgtattaattaatttccttgttagctcaaagcttgaagccctgaagcagccagattcacctgctgcaaagcttgttttgcaacttttccggttcttgttcattgctgcagctaaagctccagaaagctgtgaacgcacacttcagccacacgtgccggttataatggaagtctgcatgaggagtgccactgaagttgagaaacccctaggttacatgcaccttcttcgaaacatgtttcgtgcattgaacagtgctaaatttgattcattgatgcgtgatcttataccatctctgcaaccctgcctcaatatgttactctccatgcttgatgaagtcattcttgctttatggtctcatttaaggcctcctccatacacatggggcacaaagtctttggaacttttagggaagctggggggacgaaataggcgatttttgcgggagcctcttgcacttgaatccaaggaaaatccggagcatggattacgtttagttctgacttttgagcctgcgacaccttttttggttcctctggacagatgcatacaccaagctgttggtgcagttatgcaaggcaatggcttggaagcattctacaggaagaaggctcttcaattcattcgggtgtgcctcgattctttgttaaatctgagggaaaatgtacctggcgagggtgtgagccctggtgttctcggtacattgctaatctctaacctggatccctcaagacgtcggaatgatgcttcagatatgaagggagatttaggtgtgaagacaaaaacacaactactggctgaaaaatctgttttcaagactcttcttgtagctatcattgcagctaatgctgacaccagtcttcatgatgagaaggatgattatgttgtcgatatatgccggcattttgctatgcttttccatgttgactcaccatcctccagccaatctggatttatgcatcctattggttcttcactcccatctatcatcatgggatcaagatcaagatgcaacacttcatctaatctccgggagctggaccctttaatatttttggatgctttagttgaagtgctatccagcgaaaatcgtcaacatgcaaaagctgccctatctgctttgaatatttttgccgagacattaatctttcttgcacggatgaaacacactggtatgctaaggggaggtcctagcacccccatgctagtctctagtccatctttaaatccagtatattcacctcccccaagtgtgcgggttgctgtatttgaggaattgttacctcggttattgcattgttgctacagtagcacatggcaagctcagatgggtggtgtaatgggtctcggggcattggtcggtaaagtgtctgtggataccctatgcatttttcaggtcagagtcgtgcgtggtcttctttttgttcttaagaggttaccagtgcatgcaaacaaagagcaggaggagacaaatcatgtcctaacacaagtacttagagtagtaaacaacgcagatgaagcaaacagtgaacctcgacggcaaagttttcagggagttgttgaattccttgcacaggagttgtttaacccaaacgcttcaatggttgtgagaaagaacgtgcaggcttgcttatcactgcttgcaagcagaactggcagtgaggtttctgaattgcttgagcctctctatttgccattgcttcagcctctgatttcacgacctcttcgttcgaagaatattgagcaacaggtgggcaccgttactgctttgaacttctgtcttgcactcagaccaccccttctaaaactatctcctgaacttgtcaattttttgcaagaagcactacaaattgccgaggctgatgaaactatatgggtcactaggatgatgaatgcgaaagtagttctcacatggaacaaactcagaaccgcatgcattgaactactctgtactgcaatggcatggggagatctaaaagctcaaaatcatactgaattgcgagcaaagattatttcaatgtttttcaaatctctaacatgcagaacaacagagattgtcaatgttgctaaggagggacttcgtcaggtggttcaacagcaaaggatgccaaaggatcttctacagagcagcttaaggcccattctagtaaacttagcaaacacaaagagccttagcatgccattgctacaaggattggctcgcctgcttgaattactgtcaaattggtttaatgtcactttgggtgccaagctattggatcacttgaaaaaatggctggagccagaaaagcttgtccagactcaaaaatcttggaaggctggagatgaaccaaaaatagcagcagctatgatcgagctgtttcaccttcttcccccggcagcaagcaaattcttggatgaccttgttaccttggtaattgatctggaaagggcacttcctgaagatcagttttacagtgagatcaacagtccataccgtgctccactggcaaaatttttgaatcgttatgttctggaggctgttgactattttcttgctcgattaagccatccaaagtatttcaggaggtttatgtacataatctgctcggatactggggacctaagggatgcacttgcaaggtcacctcagaaaatacttgcaagtgccttttctcagttttactctcaaagtgaagcatctgctgctcaattatcttctgtaaaggatgaagcccttactggggctgtatctgagagtattactgtacaatcttcatcaaacatggttactacttctgagagttactttaatggattagagcttgtctcagcccttgtgaaattgatgccagagtggctccgtaacaaccgggttgtctttgacaccttgctacttgcttggaaatcacctgcaagacttgcgaggttgcagaacgagcaggatttgagtttaccccaggtgatggaaagcaagaggctgatcaaatgcttcctgaattacttaagacacgatcgaactgaagttggtgcactctttgatatgttatcagtattcttgtaccgcagtcgtatagattatagctttcttaaggaattttatgtcatagaggttgctgaaggatactccccgaatttgaagaaaactatccttaatcattttctgaacattttccagtcaaaacaatatggacaagatcatttagttgttaccatgcagattcttatacttccaatgctagctcattcatttcaaaatggacaaagttgggaagttgttgatcctactataattaaaactattgttgagaagcttcttgatcctccagaagaggtcagcgctgaatacgacgaaccattgaggatagaacttcttcagctagctacattacttttgaagtatctacagactgatcttgttcaccatcgaaaggaactcataaagtttggttggaatcatctcaagcgtgaagataactcgagcaaacagtgggcctttgtgaatgtttgtcatttcttagaggcctatcaagctcctgaaaagattattttacagctgaagcttattgttcgccatgcggacctcttctatagttgcagagcccactttgttcctcagatggtcaactctcttagtcgccttggattaccatacaacacaacagcggaaaatagaaggcttgcaattgaacttgctgggttggtagtggcatgggaaagacagagacaaagtgagatgaaagtggcgcaggaaagtgagagccagaatcaattaggtgacatgcttaatccttctgttattggtggtgatccaaaacgctcctctgatgttccgtcgtttgctgatgatttgagtctacctgatgaggagtataaacctaatgcagcaatggaggagatgatcattaccttcctaattagggtatcacttgtgattgagcctaaggataaggaatctagctcaatgtacaagcaagctcttgatctactgactcaagctctggaagtctggccaaatgccaatgttaaattcaattatctggagaaattacttgggaatctgtcacccactcctcagtccaaggaccctgcatcagccctcgcacaaggacttgatgttatgaacaaagtcttggagaaacaaccccgtctcttcatccgaaataacatcaatcatatttctcaaatactggaaccttgctttggcaacaaaatgctggatgctggaaagtcactttgttccttgctcaagatggtgttcagtgcttttcctcttgaagcagcaacaacgccacaagatataaagttgttgcatcaaagggttcaagaactcattcacaagaatcttgctgctgttacaactcagcagatagcacttgagctcaacaatgctcactcaatcattagcttttcattgtttgtcctcaatgcacttgcagaagtacagaagaatttcattgacccgttcattggcttgcttttccgtgttctgcaacgtcttgcacgtgacatggggtcttctgctggcagccatatccgacaaggacagaggcctgaactggattcatcagttaactcacggtctaccatagattctactgtcatatctaacatgaagactgtcttaaaacttataagtgagagggtgatgtcctcttctgaccacagaaaatctatgggccaaatacttcaagctcttctttcagagaaaggcactgattccagcattcttctgtgcatgctagacatgataaaaacttggattgaggaagattgtaggcttgcttcatcaactggttctgttagttcacttaacccaaaggaaataataacttatcttcataagttatcattagttgacagaaaaagctttcctccagctgcacaagaagaatgggatgcaaaatacttgcagcttctttattcactgtgtgcagattcaaccaagtatccgttgtcttttcggcaagaatttttccataagattgagagacagtatatgcttggacttagagctaaagatccagaaatgaggaagcgattcttcaagctttaccatgatacagtgggaaaaacattattttctagattgcaatttataatacagttacaggactgggaagctgtgagtgatgttttctggttgaagcaaggtcttgatctcgttttggcaatattagtagaaaatgaaccaattacacttgcagcaaattctgctcgagtaccaacgcttatgatagctgggcctgttccagatcgcatcaccatgccacagcaggttcctgatgctcaggaaagcatggatggtacaacactatcgtttgactctcttgctgcaaggcatgctcagttcttaaatgacgcgaacaagcttgtggtggcagatatcatggctccattgaaggaacttgcatttgctgatcccaatgttgcatatcatttgtgggtgcttgttttcccaattgtttgggtcaccttacataaagaggaacaagttgccctagctaagccaataatcgcgcttctatcgaaagattaccacaagaggcagcagggctgcagacctaacgttgctcaggcacttcttgagggtcttcatttgagccatccccaaccacgcatgcctagtgagcttatcaaatatattggaaaaacttgcaatgtgtggtatattgcaattgcattactcgagagtcatatagtgcatatgaatgaggccaagtgctccgagtcattggctgagttatacagacttcttaatgaagacgacatgaggtgtggattatggaagagaaaatcaatcactgcagaaacaagggctggtctttcacttgcccagcatggttactggcaacaagcacaaaatctattttaccaggctatgattaaagctactcagggaacatacaataataccgtcccaaaggctgaaatgtgcctttgggaggaacagtggttgtcctgtgcgtctcatttaggtcagtgggaagtcttagctgnn

SEQ ID NO: 23444 - DNA, 2617 bp, Zea Mays
cctggcccctgtgctccccttgccaccgaacgagagccaaaagcctcccgccccacgacgcgcccgccccggcggcgacgccccggaggacgtttcccgcagcgaccggcgaccaagccttgattgcctccgccccatggctacccgggcgcgggcgtagccgccgcctcggccgcagcaggctcggtccgcccccctcggcgatttctgttccagtcgcatcgcgcgacagctcgtcgtccgattcggatccccgccaccgcggcggaacgaggcgtctccggtccccgagggtattcggggaatttgagactgataagtcgggatcctgtcgataatgcggggctacgtgtacgagaccaatggttaccaccaggaagtggaagatgagtacggagatgagtactatgatcaagatgagtatgaggaggaaggttcgggtgctggggatgggtatgctgaggaggaagagcctacagagggacaaaaggagatccttgaattgagagaaagattaaaagagcagattaggcgaaaggcaaaggctgctgctgcctgcacagctggtcgatcatcttcttcacaaatacctcaagccagggacaaatttggctctttttttgggccatccaagccggtgatttctcgtcgagtgatagaagaaagaaaatcattgaaagaactgcatagcacggttgcaagggagccaaggccttctggagtacataaggatattccatcgtcctctaaagtgcaaagtagagtaaatggacatcagcataaacaaaagattgttaatcaggtaaagaagaaggctgaggcacttaaggataaccgggattattcatttctactctcggatgatgctgacctgtcatcctctccaaaggagaaacctgctgctagatcttccttgactcaaagggctgatcgtgaggtgacacaatcaacagtaaagaggaaggcaccaacaagtcaacctgcacgcttgtcaaatggatatggacctaagaacacaatgtcaactcaaaggcatgctgaaggtaaggtaaattccatgagaagggaggatttctcgaatacagaaagggttgtttcacgtgacaatgagaggatgtatgaaagggttgtttcacgtgacaatgagaggatgcatagtattgcaagaaatggatccaaccaggcaagtactagcaaaaccacaatccaaaagcatccaagcaggggtcccattgctaataagcaaccgtccaaggattcgaatgatgcaactctgaggaagagcagtgtagcctcaaagcaccatcccttagagattgacagaccaaaatcctcgcaaagtcagaggatgcagtcagctggtcagagaccacagcattcttcccatggtcagacgccacatcaatccatgcagcataggacgcagcagtcattgcagagtcggaggccacaacaaatgacacagggtcagaagccacaacagtctttgcagagtcaaaggactcaacagtccttgcagaatcgaaggccacagcagtcctcacatattcagaaatcgcaatcctcacaagcacacagaccacagtcattaagtaacaggtctcaggctttacaaggacaaaggcctctttcttcacagggtcaatatccggagcaaagaagagtacatgcaagtgacagagtcaaacaagctgaaaggcagattcggcctccttccaagtccatgccatcacggccagtctcttccaatggaattcgtgatgatcatgcaaaaaggaagcaagtggcaaaaagaagatttgatgaagatgatgaagaccccttagcaatgatcagaaatatgtttggatatgcaggcagagatgaagatgtcagtgacatggaagccgattttgctactatagaaatggaagagaaaaggagcgcgaggattgctaggcaggaggatgaagaacaacttcgcttgattgaggaagaagagagacgcgagcaggagagaaagaggcgaaagatggcacgaggccgatagtcgaatacactcctatttggatgttataatatactaccttcgttctcgaatatttgtcgtccgctggttcatttttgaactaaaccgtgacaaataaaaaagaacgcaggagtatctggcaggcctgattgcctgaatacgaagccccatggcggatcagacaggcacttctcttgcagtcctgtttacccttaccacgatgattatctggaggcaaatcaagggaaaacgacaggtgaccaacactgggcacgtgtaacagcagactgtagttgtagtggtttagttctcgaagctgacatggactatatttaagttctcgtcagattgtttggatagcagaaggtttccattgttgcagcgcctcaccagattgtttcttcatatgatatactgattctttcagtcaagcctatataaggatgcgtaatacaagtgcccctcttgtatatctttttcgggtgtaatagtgttgtaataaacgatgttcgaattttcggatatgattttgagctttgtcaggcgatcactgcaccacggtccacagagatgcgcttctggccgggagccaatcgaaggaagcgggaa

SEQ ID NO: 23445 - DNA, 2780 bp, Zea Mays
ctttagtgcctctgcctcgaatggtggaggcatcgacgaaccagcttgccgagcagcagggcacgcccctctacaacctgccatggaagattccctgcaagctcatgaacatcgaactgaaggttgagccggatactgatgaggtgtacgcccagctcaccctgctccctgataagaagcaagatgagaatacatctacaacagtggaggaagaggaggtggtggtgcctcctgcgctaccagccacaaatgagggtcctcacatccattccttctgcaagacattgactgcctcagacacaagcacacatggtggtttctcagtgttgcgccggcatgcagatgagtgcctcccaccattggatatgagtcaacatcccccaaatcaagaattggtggccaaggacctgcatggggccgagtggcggttccgtcacatctttcgaggtcagccacggagacatctcctgcaaagtggttggagtgtttttgtgagcgccaagcgtcttgtcgcgggggatgccttcatatttctcaggactagtccagctgaatttgtggtttcgcgagataggtactatgaatcactgaaacgaaattattcaatagggatgagatttaagatgagatttgaaggtgaagaggcagcagagcaaagattcactggcacaatagttggaataggtgcttctgatccatctggttgggctgactcaaaatggcgttcccttaaggtgagatgggatgaaccttcttctatttctcgtcctgaaagagtttctccttggcaaatagaaccttctgttagcccatgtcatgtgaaccctcttccagttagattcaagaggtctcgatcaagcgttaatgctttgccatctgacgtgtctactgtaaccagagaagtcatggcagactcgcagcaaaatagtctcacaagagccttgcacaatcaaggaaggacacaattgacagttcgataccatgataacagtgatgtgaagactactcaggatcttaccgtgtggtcttcaggaactgagcaacagagaaacaatattgctgcccagacaaagctatgtctggagggttggacgccaactagaagtcctgaaggctacaatcagatattctcggcatttaaaccactgaaagatatacataacccacttggtccttttcctagtcaaatatctgggactcactcaaatagctgggacacagctgatgctcgttatccagtccaacaagctaattacagcatgttacctggcacatggtctttgaggcctcataacagtggttttaggatgaatcaacaaaattatctagtgatgcctgaaggtgcaaattttacggggaaatcagctttcacttcacttcaggaccatggcactgataaatgctccacaggctgctttggtcatattgagtcaagttcccacacagaccatgcatcctcaagtttgatcaggccccagcctttggtccttggaaatggtgttcagaaaagcaaaggcacttcatttaaattatttgggattccccttggcagcccagaaaaatctgaacctctggtatccccaccaagtgtcgcatatgacgggaaacttcaaacttctccatcagaaaaagggaatcagctagacgtagttgaagtggataattgttctcatccttctaagactgtgaagccacttgatggtcctcagtcagattctattacagagaataatcagccttctccagaagctacccttaatatccagaacaaagtgcaaagtagttccaccagaagctgcaagaagggatatggcgtgcctcggttattacttcatcggactccactcaagtgtgagccgcctgttcataagcaaggtagtgccctcggcaggtcgattgatctaacaaagttcgcttgctatgatgagctgattgctgaactggatcagatgtttgacttcgatggtgagctgaagagtccatgcaaaagttggttagttgtctacactgacaatgaaggcgatataatgctggttggtgatgacccctggaatgaattctgcgatatggtccacaagatcttcatctacacgagagaggaagtcgaaaggatgaacccaggtgccctgaactcaaggtctgaagatagtctatctgactcgctgggaagaggggtagcttccagagatccccgaggaggcgggtctacttcggctctcgattccgagaactgctagtttgttcagtcagtgaggcctttggaagtgaagcagacaaaaggcgtgaatcttgcggtgtagagtgtagttggtacattgtgtgtatgcctccgggtaagccctgcggtacccagtttgtgtcctggcgccagtttaccatttaagctaagtttttgggtgtgccctgtgctggggtctgggctctagttattgtagcagagcaggcaatgcatgcaagaaactgatgatgcgcctgtttggccctctttcccttcccaagccatgtaaatagccttggctctgaagcgtagtattgtattgtcgacagccgtacttgagatagtactccaagaggcgcgcttgctcctgtcagttgggtgtgcgtatgtagatgtgcgtgtgaagccatgcaagcaagggtttgtggggttgatggcttttcatggtagcggatctgctttcatggtactgacgtgcaggtggcaggctggtgttggctgctatgttttgctgcacgatattggcagaaaacagtagtactaaggggtgtttggtttctag

SEQ ID NO: 23446 - DNA, 1010 bp, Zea Mays
cttcctttgaatatctcacataactggtcgttatcccctgccgcaattatctcactgccgctcaaggactcagcctcatcttcttcaaaatcgttgtgcccgtctccagctctctccactgcagcaccttgcgcgcgccctcctcaagctcgcttctctctgctcacctctaccctgctggccttcgttgacacagcgctgcgcgcgcagggcactcgtgttccggatcacgccgtgagcctctctctcgccgcgtcactctctctctttctcgctgcagtcgctccctgtgcagcgctcgtgttccctccgagtctgctgctccttgttcctcccactcgcccagtccccggccgcatgcatccctgctcggcgtccttcctttgctcgcccagccgctcctctctcccctgccgcgcgcgaagctcctctgcaggtcgcgtcctccgctcagccggcgatggctacctcgccattgtcctatgtgcgtcagcacgaaaccgtggtcgtgtttatcgaatttgtcaatgctctgttaccgattcgattgtcgtcgctgctgcgtgcctcaccactgcctgctcgcgtttgccgtcgagccgttgaaaccgtccttgctcgtgacttcgtcgtcgccagagcctacgctaacctgctcaaccacacctcgtcagctcgctccagacacaatctcatcgtcgttccacgcgtcagcaagaaatcccaagaatcaggtgaagacgaagctagcagcgcgatatttcccaagcgctcgacaaattgcttggatcagaaaatcactaccgatctcgcggattcgagtcagctgctgaaacagtaagctgataaattattcagaatagttcaatcgttgaataattaatgtgctagtgcgatacttattaaggttctcgataaattgcgtgagtcacgaaactctcgtcgacttcgcagttcttgcgattatcgagccagattcagctatggcgaattatttcgctattccggtc

SEQ ID NO: 23447 - DNA, 3897 bp, Zea Mays
acgtactctgtcaaacgatacgccgcgatgcttccagacgagcgccatccccttcctcgcctcacacgccgtcctgttggtcgtgcctctcttcaacctttttttcttgagcattagcgagagccccttacatggtgcagtgctagcatcgttgctggcgacctcggtgaggtcggatctgcaaaggttgcagctagcgcgcctacactacatcaacatggtgtggcatctcctttcgcagatccccaacatgctacgccgccggctgcctcattggaactcctgtgcaccgcttgcctttcttctcccattcaacccgcaggcgttccctggctcaatagcgcaactaggggatgtccgccgctacctccatataggaaacgacagatttagattttcaggtgatgcgtggtcgggatcccggatcaatcaaaataagtgtgaaataagtgtgaaatttgagaggctgttgaacttccagatcaggtaccaaccaaaaaaagtgacccttttgacggcgtattgcgtgggcaaggcatgccagtgcgacaatagagaaactaacggggagctctgttcgttctgctgattgcttatgattaggctcgcagtggtggtagctgggagagcttgggactggccagacgcgaccaactcacccatgtaataagacaacttttatacatagccgacagtacgcaacctcatgcgcaagatccttaatgaaaccaaagagctgcagcagataaccaacgacaagcagaaaaatcaggttgtacgcatccaacattttactttcatatttgctgaagatgtcaacaaacaaaatagacaagcagcccagacaatggagatgatgtatacgataattgcagatgagttcaagtcaatggacaataaggacatgcgccctgaagattacttgaacttcttttgtcttggaaaccgggaagaaccaccatctaatggcagcccagaatcagagaaatctacatataaaagtgcagagatagtctgtttttgcattttccttattcttaagggtatggcttagctcaacccttctgattacaccaaaactgaatatggttttggcgcacggaccttatgggaagctagaggtctgagctattgggaagctagaatttatgtttttatcaatgtttagtcattaactaattaattgcatatcgttttgttgtatatttattaactaatcgagtgttgcatacggttttcagaagcatttgaagacgcagaaattactcatgttgacgatacagtagatcctgttagagacatggaaactattagtgaagagctcagactaaagttttcgttggattttgttgatttacaagatcagctgtacaacacttaaaccttttttcgacactattctgtttctattttctgcaggatatagagttcatgaaaaagaaacttgaggaccttgataagccaatgaagaggaggaatgataagctgctcaaaattgagcatgaattatgtgagaggattgatccagcacaatgccgaggagactggagactaaacttggaggtgctactgaaggatgtgactttgagtcaaagggtagcacatggagagcttgaattgaattcaagcttggatatgattggaaaatatttgtattagatcacctagaagggtgattgatgcttgttattggccaagcaggtagtcagatgaagattgtaaaaaacaagcatgcttaacccttcaagaatgcacagtttgagcttgaatttggaaaggggatatgccacagttcagagttttttgaacagaatttctggagcagttgttcctataaaataatattttaggtcttgaagccaccaccgtttggattgacatgatctgtggtattctggtgatctcattatagcagacttcatttcttattgtgcttatacagtagtgtagcgggaagagaattcacattgcatgaaatcatgttgatagctaagaggtggaagttgaagtaagccgggaagggtgaggtattgggaactgtggcatttaaagttcagtaggcagcagtaaactgtagtggtgtggtcgtgtacataagatgtgcacattttgaactcaggcattctttattgagtgctgctagaattacattgagctccctccacttctgatacttgcctggttttgcgtcaattggatctgtttgtccgtcctcaacactgttgtctgtttttgctaatttgggcattatctatgacagaagaagaacgattatgaattatagattaaattgaacataatgttgttctaagaacaaaaacagattatttcactgaatattttctcatcgcaagatgtactaaatagtaggttcactacagtcttacagaagccaataacccacttgatcttgctataatgatgttcttagaatacttatagatgtgttggctggaacattagctctgacaagatagaagcttgtttgttctgttatttagtcatgtctgcccctcaaactactgaaacctaaaatctgaaactgaaaatctgaaaatataaaactaaaaatatgaaactgaatattgtatgtcatgtttgtgtcatgttttcttagactgcattgaactccaacagagactgagaaacatggaattatagctagaacttggatctatggctgtgatattcttgcttgcggaaactgggaattatagagagacggaaatactttttaaattagaatctaactacaattcgatttagttcaagtcaatattcagagttctactttctggaattattcagagttcagttattcaaagttattaatagctatacttagccacccatgatgtagtcaagaaaaaaataactgaactcttctgcttataatttcaactatattaatagatattgttatcaggtgtttaaaaagaatgtggtcatcttgtgtgacatttgtgttcttaaattgttgctctgcttataaccttttttacaatgtactcatcagttctatactcgcagccaaaatctatagtgggaactcctgcatacattgctcatgaggttcttctgaagaaggaatacaatggaaaggttttatgcgtagtgtcgttaattattctacacttgacatactgtttttgtttagtgtgcatgttattattctccacttgaacaacatgtttgtttgtcaaaacattttatacacgcacgatttgtagtcatgcataacagggaactatgttggaaggttcgaatgctaaattagtcactaactctttgttactgaactaaggttgctgatgtgtggtcatgcggagtgatgccatacgtgatgctgacgatcaccatccctgagataagaaaccatccatggttcttgaaaaacctcctagctgaccaaatggatgacaatacgatgagtaagcagtacgaggagcctgaacaaccgatgcagagcatgaatgagttcatgcagatcctggttgaggcgaccattccagcagttggttcacgtggactcaatcagtttctgaatgatgacattgacctcgacgatgacatggaggacctagactcagatgccggtcttgacctggaaagcagtggggagatcgtgtatgctatttgacaacattgaatactttgttgtgtcgtaggttaccaagataattagagacaaggggcaggttgttgtgcttgcaagtatctgttgcagctgttgttcatgcctgatgttgatgcctcttttcatactgttgtgtttggatggtgtaccaccagtgttttacaacagtttggcccttggaattgctattgctaaaacttggttcctctgagaagaccttttgtttttgtattcccagtcgagggacggtgaagtactta

SEQ ID NO: 23448 - DNA, 225 bp, Zea Mays
acctagttttggcgacccgatgatgccggacacagtgtaaggcgaggattgaccacgacaaggaattgtggcgtgtcagcggcaaatttcgagtagcacaaccacgaccgactctccccacgcctgaggaagaccccggtatcaccgacgacgcgaacaatagctcaatcgaggatttctatggcgatgcggacgcggcgacacgatggtggctgtggagtagtg

SEQ ID NO: 23449 - DNA, 1346 bp, Zea Mays
tctatgaaaaggacagctatttggaaatatctgaacagaactctcccaagttgctgaacaaaaccaaagacagaaggaaccaccacaatccatacagaaatggtagggttcttcggcgcctctgctgcatctgatcactgtcgtttgctgacaacaaatggatcagttcaccatgaactgattagacgacaccatggcagaccaagaagtgcgatcaggtgctgcagcagcacggcaaggggaaggaccagggactattactaccaggtgctgggcatcgcaattcaatccacacctcagcagatcaaggaggcttacaggaaactccagaagcaacaccatccagacatcgccggctacaagggccacgactacacgctgctgctgaacgaggcgtacaaggttctgatgcgggatgtttccagttccaggcacgccgatggaaggggcaggagtagggtggggtcaggagccggttacaccggggacggatacagttcttgggaagggcccgtgagaagccaagctctcttcgtggacgagaacaagtgcataggatgccgggagtgcgtgcaccatgccgctaggacgttcgccatggacgacgttctcggcagcgcgcacgtggaggtccagttcggcgacctggagcagcagattcagctggctgtggagtcctgccccgtggactgcatccactgggtcgagagccacgacctgcccgtgctggagttcctgtcccggccgcagccgaaggaaggccacggcgtattcggcggcgggtgggagcgccccgggaacgtgtttgcggcggcgaagaacttcgccaggagactggagagggagaagcagcgggaggagctggaacgggatcagccctccgggggcctcgacggccgcgaggcggagacggaggcgcaggccgaggcgaggcgcagcgcgtgggaggagctcaggtggaagcccctgcttgatgcttggaatgggctgataggtggtcgttgacgctgcaggaggttgaagagaagctcagcgctggaagctgaacccgtaacatctgcagctgcagaaatagtggatgtgccaaggacaaaatagcacctttgtggccgtgggttatcaaacagtaggtgtcgtcgtaactcgtaaatgatcatgtgtaattacagattacaaaaaatgtgtaggaatagtagtcaaatatatgtgtgtagatgttggcatattgcacaggattatgtcccctttatatatatggtggttaatggaaatggcagggtggtacatcactgtatactacagacactagtagtttccggagaaaatctattcaacggtatcgaaac

SEQ ID NO: 23450 - DNA, 1499 bp, Zea Mays
cttcattctcacaagaacggtaaatgacactagcatgtcacatttggattgacatactgccattctttccactgttgttttttacttaaggggcctattgtggaaatattaataatatacacacagttaaaaatctgattactcgggagtcgggagaataggttcctcgagcatcagctagtgcagtggcatttgggttgggactactttctgggaaaggaaagcttggacaagggaagaaccgagccttttctgttctgagtgagagtcgtgcaagtgatatttgtctgagattctttgacagctgtgagacatacaaggcatacaggaaaaggaaggagcctgatgtagagaagcaaaaggaaccaattctagagcatgtcacagctgcacttgtcaatcgttatcacctaaaatttacaactcgcgatgtttcttccctctggtttctttgtaagcaggaagcatctttgttgaatacaacaaatcaagcttgtgggctttttaatgaagctgaggttcgttttctggagtggacagatgatttggagggttttgttctaaaaggctatggtgagtcaattaactacaggatgggactgccattgctcaaggatgttgtccagtcaatggaagaagcaatcatagctagagaagaaaaccgtgctgatggtacgtttgaaaaggcaaggctccgatttgcacatgcagaaactgttgttccttttagctgccttcttggtctttttcttgaaggtccagaaattgagaagatacagagagaggaagcattggacctaccccctttgccgccacagggaagaaactggaagggcagtgttgttgcgccttttgctggtaacaatatgctggttttatatcaatgtccaagcaaaatttcggatggcagcacaatctctggaggccgaaacaactcttacttagttcaagttctacacaacgaagtcccagtttcaatgcctgggtgcggcaacaaagatttctgtccgttcgaggagttcaaggagaaaattgtgaaaccgcacctgaagcacgactacaacatgatatgcaaggtcaaatccccagcggcaagcgaggagcctgcctcgttcgcctccagggtgtccagtttcttcctaggactcctctcgcagaaagggtaccgcggtgtgggcgccgagggcgtcaagaccgagctgtaggcgtcaagacctagcttagcacggtgccgtctcctctcaccgtctgcgagcacgatcaggaaccagactaacccatgcactaacccgcagtgtttttgtacggggcgagtcgaatgtgtaggacaccaccacaggaggcgccagttcggttgtctccagggccagacgcctctgatactgtagtagcaataacataaataataaatgtgtttcgattcggactccctttcgcgcagaaagaaacaaatgcatgaatgaatgaatgaaatagtacgtgataagcatcttctgggg

SEQ ID NO: 23451 - DNA, 2624 bp, Zea Mays
cctctctcgagtcttgagtaacgccccacctcctccccactgatgagagaggagaaatttgaaatcgggaggaagcccgccgacaaccccaaatccccgttgctcctgctcgtcttgtcggcaggccgccaatcactcactcctatcctatccgccgatggccgcggccgccgccgaggatgagaaggggctcctgtcgtcggtagtgggcgacatccggtgctactccggctccgaccccctccgcccgtggctccgggggatgcggaggatggagagggcgctgccgccagcgacgctgcgggagaagctgcccaggttcctccagaagtgcgcccaggagttccaggacaactcccgctaccgcgacgacccgcggtacctccgcgtctggatccagctgatggactacgtgacggacgcaaagccattgctcaagacgatggagaggaatggaataggcctcaaaagggcttcgttctatatggcatatgcactgtattatgagaagcacaggagattcaatgatgcagagaagatgtaccgtttgggaatccagaaccttgcagagcctattggggagttgcacaaagcacatgaacagtttcgtttccgcatggattcatacaagaagaaagataaactgcaggaaagaatgcctaggaaagtggggtctagtgctacatctatgaaccaagtcaaaggtgaaagcagacactataaagaactgaaatccaatataaagcaaacatcagaaagcagttctaatccttcattagggccaactaaagttggtgttctctccagaggaaactcaggagcaaacaataatttgccccgttgtaatagtgatgatactgtcgttgtacggtttataggctctgctttggttgggaagtcagagactgaagatgcctgtcaccacggcctagttgagccaactataaacactaaagaggctttggatgccattaatagcatgtttatggagccactggaacctgaaactgttctcaagagacaatcaaagcgtgagaacccaaatcataatcagcaaacaagggcatttggtatctttgttgatgaagatgaacctagtgggcaataatactagcatgctccagaacaacagtatgaagcaaggccatacaaaattgagtcagcaaacaagtggatttgagatctttgttgatgaggatgttcctaatggcagctaccaaaatggaacgcaaaacaggaactcttcaaaggaacagagtgggtttgagatctttgttgatgaggattgcgctaatggcaacaatcaaaatgcggggcaaaacaggaattgtaggaaagaaaacacgaagttaaatcaggaaagaaataagtctgaactctttgttaaagaagatgaggctaatgacactgtccagaatgctctatgccacaagagtaataggtatcctccaaggccattattatctgattcatctaggcatcaaggcgaaagtgacttccagaagccatttgttggagggtttgcgatattgccagatgatgaagaaccatgtgagaaaagttatggtggtgctaatataaattgcagaactgtgcagcctactcataatactaataatttgctctgtccagttcaagatgattcaggaacaaggaatcgtgaaggtcctcattctgtgacttctggacttcaagaagacactgtcattcgtaggtttgttgcatcctctattgatgatgagcccaaggtggaaaatgcatggcaccatgggttagtcgacccaactgttaatctaaaggaagcaatggatgatataaacagcatgtttggaaaaccactaaacttcaagggcgaaaaaacaaagaggaaaactaatgcacactcagatggaaaagcagctccgatttctggtttctctatattagctgatgatgacctaaaagagggctgcaccagtaaagcgagtcagagcaattctttcaaatttggggatgagaatggtctatttgaacccacaatcaccactcgtgatgtcatggcagagatcaacgatatgtttggaatgccactggatttgtaagatgcatgtgtagagtgaactgaataattcaactgctagttggacaactggctttacctttccactctctccttgagaaatatgcagtgtcttgctgacgtgaagagcttggaatcagttctcttatttggtgtataagtgaatgttaggattctcaggtcgtcacacttcttgtggagttgcacctgccactgaataatttatcttctcaagtgaagggaagggggagtagtctgtcagaggccaccaggtgattgctgtagtgttgtcacataacgctgatctagtgatgttggctcaagactcaattttttagccagaaaaaaactgagacttgtgtgttttatggaaattgtagcaagcacaggtgcacttgttgctctgttcatcttgtatccatagttgtgctcatcaaaaacccattgtctgatgcccctatcaaattatgaaatgtaatggaataatagaaaggagtaagtgaaagaacgaaagaacttgtgttttgctttgatctgaggaccgaatatatacacaaggtgagtg

SEQ ID NO: 23452 - DNA, 3004 bp, Zea Mays
aaattttatcccattcgagcccacaaacatttcttctgcagcgccgtcgccgctcggctcgtctccgcctgcggcagctctcctgcactgcaaccaccgccaaagccgtggtcgcttcccgacgttcgagctcgcgccatggccgctcctcgacgcccgccgccgcgtcgtcactgccatctgcactccctgctgccaccgccgcgtcgtcgccgccctccccgccgcctgcgcgttccacaccggcgccgcatgcaccctctccatgtccactgccatgtttaaccgctttggagctaatggagaaaaatgtagttgctgtgattggcccacaatcctctggaataggccatgccatctctcaagttgtcaatgagttacatgttcctctcctatcatttgcggcgacggatccaactctctctgcatcagagtatccttacttcttaaggacaaccacaagtgattatttccaaatgaatgctgttgctagcattgttgattactatcaatggaaaagggtgactgctgtatacatcgacgacgagtatgggcgaggtggcgtctcggctctcggtgatgcgcttgcattgaagagggcacaagtttcatataaagcaactattcctccaaattcaaacacagatgtgatccgtgatgtactgtttaaagcaaacatgatggaatcaagggtcatggttgtgcatgtcaatcctgacacgggtttgagggtattttctgcagctaagaagctccagatgatggccagtggctatgtctggatagtaactgattggctagctgctgtcctagattcttctgcatctagaaatcctaaatatatgagtaatattcagggagtaattgttttgcgtcagcacactcctgattctgatgccaagaacaagttcatatctagatggaacaatgtggctcgtaatagaagtatgactcctggactgaactcatacggtttctatgcttatgattcagtttgggctgttgctcgttctgtggatcaatttctcaatgctggaaaccagatcaacttctcaacagatccaaggctgcacgatccaaatggcaccactttgcgcctgtcaactctcaagatattcgatggtggtgaccagatgctgcagcagcttctcctcacaaacttcacaggtctaacaggtgcagtcaaatttgattcaggtggcaatttgctacacccagcatatgacatcctcaatgtcggtcgctctggcacccacttgatcggctattggtccaactattcaggcctttctgtggctgctcctgaaattctgtatcagatgtcaccaaatgcgtccacaagtacccatcagctgaacagtgtggtatggcctggtgactccactgatatacctagaggctgggtgttcccgaacgatggccagcctctaagagttggggtcccggttaaaccaagcttcaaggcattggtgtcaggcagcacccctgattctgtgaggggttactgcattgatgttttcaagtcagcaattaaactgctcccttacccagttccttaccagtttattcctattggggatggcacaaagaaccctagttatgtcagcatcgttgggatggttgcttccaatacacttgatgcagctgtaggcgactttgcgatagtgagaaatggaacacggcttgcagagtacacgcagccttacattgattcagggcttgtgatagtggcgccggtgaaacacataacctcaagcgcttgggctttccttaaacccttcacatgggagatgtggtttatcacaggcgctcttttcattttggtgggaattgtggtgtggctacttgagcatcggagtaatccagaatttcgaggccctccatgtaatcaagtcataacaatattctggttcagcttctccacaatgttcttctcacaccaggagaataccagaaccgcgctcgggcgtttcgtgttgatcatatggatgtttgtcgtgttgatcatcacttcaagctacactgccagtttgacgtcaatcctgacggtccaacagctcgcgacaggaattacaggccttgacagtctcatatcaagctctttacctattggataccagaccggaaaattcaccaagaaatacctgatgctaaacctcaacgttcctgagtctcgattggtgcaactgaacacgatcgaggaatacgctgatgcccttaaccgtggaccaaaaaatggtggggttgctgctattattgacgagaagccatatattgacatcttcctgtcacactactgcaacttcaagattgttggacagcagttcacaagggaaggatggggatttgcattccagaaagactccccccttgctgcagatatgtcgaccgccatccttcagctttcagagagtggccagcttcagagcatccatgacgagtggttcacacagccgagctgcgccaccaatgatgagagcaatgtgggtgcaaccaggcttggcctcggaagcttctgggggcttttcctcatctgtgccctgatctgtctcttcgctgtggtggtgttcttcatacgagtctgctggcagtacaagcagtactccaattctgaagatgctgacgagtccaatgaagctggcgctgatggtgctggcaaaagacagcggaagttgtcacgccttggcagcttccaggagattctaaagtttttcgacatgaaggaggaggaagtcatgaagagctcgatgaaacgacggccaggtgagaaagataaccatgctgctggattctagatgcgcaatcagtggcttcagcatagaacatgcatccccgatcgacttcaacgctattttttatacgacgatccgagaatctgtcttttatcacggttattagaattttgcaaagatatacatgcttgggaaaggctactcatgaccgctattttttatgattacctgaatttaattatgaagagtttactaatttacgagatttagta

SEQ ID NO: 23453 - DNA, 1768 bp, Zea Mays
atccattaggcccgtttccagtttccaccgtcaacagaggatggctatcgccgccgttcgccggctcttgtggcgcgaggtggggactgcggccgccgccgcggccttggggacggacgggaatctgttcgctcgcctggtctcggagccggagtgccgtgtcaaggcgaccatggaggaggctgcctcctccgggacccaccgcgacggcgccttctgggagccccccgtcaccgcgctcctccgcgcgtcgtctcctaccaaggcgcacctcatattggaatggaaactagagaagctgctgaaggaagacattcaagattgcgagccctactccaggataattcgtttctgtggtcagacaaggaatgcaacgtttgcaatgagagttttcgaatgcgtggaggcgaagggaatccagctgaacactaacatttgcaatgcccttgtcgatgctttcttgtcagccggagacctcctttctgcaatgaccttatacgagactatggaaagcatggacgcttgcagtcccaattccgctacatatgatgcattcatctgtgcattttcgctgcttggaagtggccatgctatgatgagctggtatgtagctgcaaagaacgccgggtttacgccaagtattcaagcttttgaatctttgatcactgggtttgttcggttgaacatgctagacgatgccaaaacggtgtttgaggaaatgattgccttggagattaagccaaactctactattttggaggccagccttgagattctctctagaaaggaggagaccagcagagtaggagactttttaaaacgtgcaagggatggcaattgggagttgaacaaagccacagttgtgaggttgacaagaatatgcctagatggaggggtaatagatgaaatggagcagctgcttgccctaatacaaaagggaacacacttgaattctgaaacacaactgcaccatggaattatcaggttctatgctaatgcagatcgattagcggatatggaggatgcaatttatcggatgttggacaatggtgtgatgtttacgtgcccggaggatgttgatgtcataatctgttgttattttcgtcacagggaatttgataggttggatctctttttgaatcgcatccgaagtttgttcaagctcaataggtctacatatgacatactggttgctggataccgaaagtttgatttacatgaaagacttgattcaaccatagctgatatgatgagggaagctggatttgcatgagatcacaaagaactatctgtgcaccatgactttccacggtaaggccatctccagcggaacgtggatatgggcgtgcaaaacactgtttgcactgtagagtgcactgtttacagagcgaagtttgaaataggaagtgagataagaagtgttatagagaggctgctggagatagcctaatatttccatagccttaagtgcattgagcctgaaaaatgaaatccagggtgggatattttttataacagttcagttcaaaattgtttgatcagttctgtgtttgacttggaaaatatctcagattaagatacattatcatgtcatggatgcatttgactttgagaagccgtaagcgtgaaattacatggatgctgtgctcaggctgcagaagctggcaactgtattgactgggacatgtagaatatcaggggtgatcaatgacttcagttcatctagttacataagaaatgtagaacacatacattaactattgtatga

SEQ ID NO: 23454 - DNA, 3057 bp, Zea Mays
ttccgatgcgtccgtccatcgtcgtcgatggggttctgctccttccgcggcctcgcctcccctttcgtcggatatcacctgtcgcgcgccctactagaatactaatccggaccccgatgctgcagtgtcccccctcgcccgcctcctaacactcgctgaaccgagttcgttccataatctcgacgcaccagtgtgcagctcatggtgaagaaacggaggttggggtcgattacgtggcgttgctccgcaacggatgaatcaatcagtggggagacaggtgcttgctcccggttcctggtagcggcggaactcggaggttcgcccggtgggcgtctacagaaagctaggtgatctcttgaatcgattcaggaaatatggagttttcttttctgctgatacaatgctgaaggtggggtcaatgtcactgcagtgacttgggtgacctataagcactgctcatattgtgaggttctcttggatattcaggaaggagccgcagatgttcccgccaagatctgggaatgtggcacacccagacagaggattcaccttgcccctggaatcgatgctgacggggtacttgagcaggtggcccttcatctcggtcacatggctggagatgaatttctcccagttctgctgtccgatgtgacgcacctgcctcgtgcactctaggctctccggtctggtgaagctctcctcaatggctccaatgtgctctgcccatagagacatcctgtacccgaaaatctgcagaaaatatgatatacaaaacaaggtagcaatgtgacagtactgcaataccaagttaccaacttatcagaactgaggcatattacctgtccacgaggagcagaaagcatatttgcccatgtatgctggggttggtatgcagccattgcaatctctgtatctctagttccttccatggatctctggttgatgttagcggatccaattatcacatattcatcatccacaatcatgcctttcgagtgcacatacaccatgaatctcctattcttccgagcttggtcctgattggatatccaagttgcagcataattgtattttttggggaaatcagtacgtccttcagttttgggcatttctaaagtgtaccggaatcagcagcagaaaacagaacaatagtctgcagtctaacctgtgggttactggctgagaatggtccactagatgtgcaagtagtgtcctcagcttcacggttaccaaggcagaagaaattcaggtgaaatttgctcagggctcgaccatgaatgtcagaattatttattttgcagtgagttatggagccctttggtagacttacctgcacgtcccatctctctggatcatcgtcgtttgaatagatttcgtcgtcaatagcgataatatcagtttttcaggacatcgtatgctgctggaccgtcgatcttggaatgcaagtcatgccatggctctcttgggccgcgagcatcttcaacctgagagtaaattatcggcacatgaggatctaacaaaatcgcgacaagcttcctgtctcctaataaaggaaaaacaaaatggaacgaagttccagaacaacaaggatggaattctttttgtggccattgcataaggttcttagtaaattcagtttgatacggtaaatgtggaaaaactactctcaccgcaaaatttgggttgtagtagtcttccttgtgaaatgtctgaagagttcgaaatagagtgtgctttggtgtatcatatcggcctccacatagatcaagtcctcccacaaaagcaacaatcttccttctatgattcccagcatcagcatccaagatcactgtcttctggtgatgagtaaagatagtgcctgtttcctggaaacgatggttattaccatcagtgcagattccagatggcagtgtgcttatgtggttgtcagatatcacaatagtttaagctgaagtataagacctgttgcttcacccagctgtgcctcttccctgcagatcgtgggcaaagcagtatctggaccgaagagtgcttgaaaaatctccgggtctcctcatcccttgtgcccatgtaaccttcctacaggcaagaatccaataagcaaacagtgttgtacaacagcatgggtactacggcgtgtaccatcttgatgccaaggagtctccgggacgtgggatcgtcccacacgagcagcagcacccgcacgccctcctgcgacttcctcctgagcaggtcgccgagcgccatgtcgtcgtggccgtcgcgcaccaggtggatggtgtggaacacggaccacccggtgatgtagatgagcctccgggcctggcatatggcgtcgtagacgtcgcgccagcactggccgtgccggtagcagtcgccgttgccgagccttacctccggcagcgttccgtcgggcacgtgcgcgtcctggtacagcgtgaccttcccgccccggcgcagcgggaagtaggtcctgggcacgccggcgaagtccgggcccggggtgacgccgtggtggtacatggtgagcctcgccacgggcacgtactgcacggacagccggagcacggcccccggcgcgcactccttgccgttgcgctccaggaccgggtacgcgccctcgaccatgtccccggcctgcagctggtcggcgcggacggcgacgacgccgatgagctccgcgcccacgacgtcgctgtccttgacgacgaagttgacggtggcggcctcgtgcgcgacgggcaccaggaactgctgcgcccacacggggttctcgtcgtcggggatgacgaaggtgcgcgccaccaccgcggaggcgacctgcaccgtcacgtacgggtcgctggtcatgccctccgacggcttgcacagcaggtcccgcatcctcttggacaggatgtccttgttgggaaggttcctcgcctcgtggatccagatgtccaggctgccgtgcagcagcaccgccggcgcgtccccggcggagccatgcaccaaccaagagacgctctcgtcgtcgtcctgcacgggcatcgtctgcctcgatccgatggcacgggg

SEQ ID NO: 23455 - DNA, 253 bp, Zea Mays
gttcgtcagagtcaaccctgtcctccctgcgcggatcgcaaccacatcgcacgaaaagctcgccggcagactcagatttcgtggaaccgcctcgcacctccacgctttaaggcctcatcatccgaagcacttgaccatctcccgtcacctagcactcaaaagaacctggccgccatcacctgagggagctcgagaaggggggagccgagggccgcggacacaagcttcgccgccaggaccaccgaccacccct

SEQ ID NO: 23456 - DNA, 2805 bp, Zea Mays
ttccagtccagcacagaaggccctgcccgccgcggcgccgcccactcgttaaaccaccaaaaccaaaacacttcgagacatgcagcttccctgagatctatcgtcacgtcgccagatctaaccaagccccaaatctgcgcgccggcaatggcggtgcgcgcgagcctcgcctgcttcccctccgacccagcgctccacgcggcttgcggcatgccgtggggcgtcgccatcaccccgttctctgccacagatgagcgcggcttcccgccggccaccggcaccgagggccacctcctcccgcgctgccagtcctgcttcgcctacttcaacttgctctgtccgctcgaccgctggtcctggaactgcgccatctgcggcgccgagaatgacctctccgccgacgcagctgcgcgctacgcccgcgacggtggccacgacccgcccgagatgcgctccgcgttcgtcgacctcctcctcccagtggaggagggcgaggcggcagcggcggcggctccgacgcccgtgtacgtggcggcgatcgacttgtcctcttcagaggagttcttggagctagtcaaaagtgctcttcaagctgctcttgaagctcttttgccaggatcactatttggacttttgacatttagcagcaaaataggattgtatgatgtccaaggtccaataccaatcgtgaagaatgtgtttatccctcctgattctgatggtgccttacaagtcgaccttgaagatatcatgcccctttgctcatttttggcttctattgatagctgcaaagaccgcattactgaagcacttgaaacaattaaaccaatgtcttcctgggaagtagcagcaaatgcgcacgatggacaggatcatgtattgcatcacatacgtggttttggtgtagcgttggatgttcttatcaactacctaagttcagaatatggaaatgcatttgagcttgctaggatatttgcgtttttatctggtccacccaattatggggctgggcagctggatataaatgaggaccaaaattctggtaaagcaaggggtgctgatcatatattgcttcaagagcagacaagtttctacagaaatctggtgtatgcgtggacctttttgcaattacaaatgaatacactgatcttacttctctgaaagttctgagtgttgagagtggtggatcactgtttctatattccagtacagatgaatcaacacttccacaagatatatacaagatgttgagtcgtccttatgcttttggatgtgtaatgcgattgagaacatcgtcgcagttcaagattgttgattcttatggccatttcttcccagacccccagtacatgcatgttcagcacataaattgttgcgactcttttgctacatacagttatgactttgagtttgaaaaggattcccaattttccaggaagtcaagccctcccattattcaaattgcatttaagtacactgtgcttgtgcacaatggtgatatatcagatcttccaaattctgggtgcagatttaaatacttgttagaaaggaggctaagagtgcggactatccagtacaacacaactgctaatatctgggacctttacgattttgttgatccagatgttgttttgacaatattggtacaccaggttattttggcttctttaagtgatgcactggaaacaaggctgtggctccaagattggttggtggttgtcatcgctcagtacaacaaagcatacaagaatgtcacatctggaggtggtactgagatttataatattgatgtcaatttctcacactgctcgcaactgcagcctttgtcacggtttgtgtttgctattctgttgagccccctgcttcaagtcagcagtgaaggcattcatccagattatgtgacatatttgcaatgcctcttgagtgcactggagccagcttcgcttcggcaggctatttggcctacgttgatttcatactcctcccccgatgtagaagcagaagtacatcaatcactaagccggactgtgttcaccagtgagaggccaatatatattcttgatgcatacaaagaccttctggtgtattactcacctacagctagtagcgaaatcccttttcctcctccacgaaactgtctactgagatcaacagtcgatagactaaaacaagaaaggaatataacacccaaactggttttcattcacggagcacatgatgacactacagaatttgagaaataccttgttgaggatcagaccttggatgggtccccgttatctagctccacaggtttcagctcattccttgatgaggttagaagtaaagtggctgagcatggcatttgaggaccagtgtcacctgtctcccgattgctggactgtgatgttaaacgggtgatgactgatgacccatgcaacccagaaatactgtcatgaatagaaagagtttctggcgctacctcagacatttgctacctgatgatcttgaacgcaccaaccaatctcgattttgtattagttagacgtttgctacatgaaaaggaattctgaagcgaatacattcatttcggcagaaagcctgaaggcacgtatacaactcaactactgcatcctgcatgtataaaaagtctgtgtgtgtgggaggggggaatgtaaggatgtgcttctttctcatgtgtgggaaaattgttaaaaccctatagcttgatttgacctttttgttgaggatcttgcagcaatgccgctgaggcagtctgccgttccctccggcagacggccttcgataacgttaacggatttgttg

SEQ ID NO: 23457 - DNA, 1151 bp, Zea Mays
tttcaagctaaaccacgagcgggcgcggggcgactgggcgaggcgagctgccaaggattcgaccgttgcgttctccgcccaaatcttagaaatcccaatcccagatcgtcctccaatttcaaacttctcgactcgcccctccccgtccggccgtcccacccacgcttcctccccctccgcgccgctcctacaggctctaaccatggcggtcgccaccgagtcgcgcggcagcgaggacagggcttcagcccatgcgaaccaggagaagcggtgggtgctgtctgatttcgaggttgggaaacctcttgggaggggcaagtttggccatgtttatcttgccagagaaaaaaggagtagtgagattgtggctttgaaagttcttttcaagagccagctcaagcaatcacaggttgagcatcagctgcgacgtgaagtggagattcagagtcatcttcgtcatcctaatattcttcgcctgtatgggtacttctatgatcagaccagggtttacctaatcctggaatacgctgccaagggtgaactgtataaggaactgacaaggtgtaaacatttttcagagcgacgcacagcgacttatgtcgcttcgttggctagagctttgatctaccttcatggcaagcatgttatccatcgggacattaaaccagagaatcttttagttggagttcagggcgagatcaaaattgccgactttggctggtctgtgcacaccttcaacagaagacggactatgtgcggaactctggattacctgccacctgaaatggtggagaaggcagaacatgattaccatgttgatatatggagccttggtgttctgtgctatgagttcctttacggggtcccacctttcgaagctaaggagcactcagaaacctacagaaggatagtgaaagtcgacttgaagttcccactgaaaccattcgtttcacctgccgcaaaggacttgatttctcagatgctggtcaagagctcggcgcagcggctgcctctccacaaggttcttgagcacccgtggatcgtccagaacgccgacccttccggcgtgtacagagaaggacgaacaccattaaactcctcggtcctcacctctatgccgacgacgctggagacgccatacatatcataca

SEQ ID NO: 23458 - DNA, 340 bp, Zea Mays
aagcttcaaaccacttgcagtgctaaaataagattgtgcattcaaaagttgctccatgtctctgaataacttttatttggtagggtcaaattgtgtgaaatgatcagcattttgctacctcctgaaggctacatcaggagatgtggtttggcatgctactattttcaccaaaatctgttcgcactatttctaggactgaatgacttgattgatggttcatattattagacttaactaaacagcttgctgtaaccgatgtccgacataaactgcaacttgaactttccacgatttctcatcataatttttccacgattcattatccaagcgagaagggagc

SEQ ID NO: 23459 - DNA, 140 bp, Zea Mays
acgtgcaaatcgttcgtctgacttgggtataggagcgaaagactaatcgaaccatctagtagctggttccctccgaagtttccctcaggatagctggagcccacacaagttctatcgggtaaagccaatgattagaggca

SEQ ID NO: 23460 - DNA, 1657 bp, Zea Mays
tcccctcgctttcgcttcgccggcactccatccgtccatcgtggcccaggctgtcgttccgttctataaagggcgtcgagaggaaaccggtggaaccctacactgagaaccgcagagacaggcgtcttcgtactcgcctatctccgcgactcaaagctttccccaattcccccccttctcccatttctcaccaccgccgccgctccccccgttcaacaacaccatgagggagtgcatctcgatccacatcggccaggctggtatccaggtcggaaacgcgtgctgggagctgtactgcctcgagcatggcattcaggctgatggccagatgcccggtgacaagaccattgggggaggtgatgatgctttcaacaccttcttcagtgagactggcgctgggaagcacgtcccccgtgctgtttttgttgaccttgagcccactgtcatcgatgaggccatctatgacatctgccgccgctcccttgacattgagcgcccaacctacaccaacctcaacaggcttgtctcccaggtcatctcatccctgacggcttccctgaggttcgatggtgctctgaacgttgatgtgaacgagttccagaccaacctggtgccctacccgaggatccacttcatgctttcgtcctacgctccagtcatttctgctgagaaggcctaccacgagcagctgtccgtggctgaaatcaccaacagcgccttcgagccatcctccatgatggttcccaaggacgtgaacgctgctgtggccacaatcaagaccaagcgcaccatccagttcgtggactggtgcccgactggcttcaagtgcggaatcaactaccagcctcccagcgtcgtcccaggcggtgatctggccaaggtgcagcgtgccgtgtgtatgatctccaactccaccagtgttgtggaggtcttctcccgcattgaccacaagttcgacctcatgtacgccaagcgcgccttcgtgcactggtacgtcggtgagggtatggaggagggcgagttctccgaggctcgtgaggatctggcggcgcttgagaaggactacgaggaggtcggtgctgagtttgacgagggtgaggacggcgacgagggtgacgagtactagacgctctactggcgcggcgtcgtcgggcttgtgtgccactgctatcctgtgatctgccctgagtggctcctatcgtgttatgtttctgtcggttcttatctatctgtcgttgtgtggtttacaacttacgttgtaagactttattcccccgctttgctactgggttattaagtttggcgttattgttttcttgatctctgagatgctttgctttcaccacctgttttttttttgtcatctgtgtaattgagtcgacggacaatcattttcttgcttcgagcaggcgagagcagcacacgagttgcagacagatcttactgtggcagcacagtgcacacttcaccctccggttccgcttctgttttgtgtccggttactctgcggcgcaaagcgagcgctggtggtgtggcgcgtcgtcgggctgccacgcagaccgctatggtgcagtggcggtctcgcggccgaaacccatttgttgtacctcaatgcttacttacgccttatgaaggcctcatcgaggctttggtgttt

SEQ ID NO: 23461 - DNA, 2057 bp, Zea Mays
gagaagcaccacgcctcccaggctcccagcgcgcacgcaccagggtccaggagaggaggacaccgtcgcctcctggttggttcatctcgtcagtcgtcaccgcctcctgcagccaaccggcggggattcctgtcctggatgcgacaaggccagcaggagagaccctccccctctccttcttctccctgagcaggaagcggaaagccttccgcgcttttcaaagatcgtaggccgcacgcctgcagcagccgccgactcagggcgagcgttgagaggaggacgaagaagagactgaagaagagcagaccgaagtgaggccggaggaagggatcgggccttgcgggattcggcagtccatcacgagactcccagacgaaaatcattagcagaagagaaaccatcgaataaggatgacagtaagattctgactccacccaggaagagctcagcgagtgctcctgcagacgattccgacaaagttgtgaacaacaagctttcttctcctataaggaggacatcaggggttttaaataacccgaatgtcactaatctagtgaaggttgctgcaagtaacaggaaactgacagatgctagcgcttcgtggacaacgcttcctccatcactcgttaaactagggaaggtatttgccagctgagcccctgtgttgctgttgacgttctacgcatatacattaccaaagaaaataatggctgtgataattattttagaaaaaaaagaaggggacgatagtatatcatttcaccacatggtaggggaatgcttccggttattcatttggtgtttaagcttaatgagatgtctgttgtcataggagcttctgaagtacagggatgcagcacaaatggctgctgttgaagccatgcaagaagcttctgcggcagagagcatcgttcgatgtttaagctcgtacgcggaggtgagctcgtcggcggaggagcagaacccacagcaggctgtcgagcagttcctcgctctgcatggagcaatctctcgagccaccatcgtcaccgagtctctaaccaaggccacgaccacggtctccaccgcgacttcaccagatcaatcagcagccggcgatgcgtcaacagccgacgaggaaaccatggctgtcgcggcggagcgccgccgccgggcagcctcctgggtcggcgccggcctcgccaccgatctctccgccttctccctctacaacctgaaacccgccccagccagtgtcatctccccgctggccgtcgtgctcgtggacgagtcagccaagccggcggcggcgaaggcagtgccgcccgcgaagtcgcggctgtccccggcgaaggggaggttgaaagctggttccgcggccgccgccgccgccgccgccgctgcggcggcggcagcagtgcctccgcctgaatgggagcggggaggcggcgcggaggagcggggcgagcttgcgcggcggctcggggacgaggcacgggcgtggttcctggcgttcgtggagcggttcctggacgcggacgttgcggcggccgcgccgtgggaccgcgaccgcgccgcgaggatgctcccgcagcttaagcgcgtcaacgactggctgagcgagatcgggaagtcggcagagatggcgccgcatccgccaccggaagcggacggcgaagcggcggcacccactgccaacggcggcgcggccagcggcgtgccggaggagacgatagagaggctcaggaagaagatctacgagtacctcctcaccaacgtggactctgctgccgccgtgctcggcggctgcgagatggcgccggcaccggtggcgaacgggaagaaggggtgacgatagtgggccgcgaaggaaggcccaattgggccgttaacttggctgagccaaaacatgggccggtctggatttaaatgtaaaaatgggctggattgagattgcagtggttgttttggtacttttttctggtgttacagaaagtaaaaaaaatatatttttgtccctctctccttcaattctgaaaccgaaaatatctcctcccttatctctcaaaaccagtcag

SEQ ID NO: 23462 - DNA, 1237 bp, Zea Mays
tttcgatttcgagaactcttgcgcggcgcctgacaagaaatccttctcggcctttggtggcattggcttatcctttgcttcctttctggccttcaatgaaattgatctttatttgctggcttgtcttgccatacttcaatggcgcagcctatgtgtaccagaattatgtgagacctgccttcataaagaaccagatggtcaacatttggtatgtccctcagaaaaaaggccttcttgggaaatctgatgacttcctcacagcacttgataagttcattgaagaaaatgggactgacgcgctgaagaaattggcgaacaaggctggcaagccatttaaacagtctgggaaatcatctaaggatcagaaagagacaaaatcatcaaaggattccaaagaaccgaagccatcaaaagatgcaaagcaaccaaagccatcaaaagatacaaaggagccaaagccaccaaaggtttcaaagtcacccaaggactccaaagaacagaagaaggcaacgctgaaagatccgaagaaagcaccaaaggattctaaaggactgaagaaagcgcttaaggatccgaaagaacaggaatcattggaagacccaaaggaacatacagcaaagaaggccggcaagcgtgtgacgttcgccgaggtggagcctgagaaggagctcaaggcctcgaacagtgactggcacccatcctctgatttccacgcggcgtaccctgagcagaacccatgggctagcggcttcatgatctttgaggatgaaaacagctactggaaccgaggacccctagactgctgagatcaaatgtatcgaggtggacactttttggtccgctagcagtgcaaggtcccaccagttcatcttcagccgaggagatgggtctcactcgcattatggcgacttgcgcctggtgtctgactctcggtcctgtaacatatttgtccgacgaatacctgtaggttgtagtgtagaattatcaattatgcagtgtggatggtgaaccggtgatattgtgtttcaggcggtgaaccttgttagttaggagaattgagatagtagcagtgtggtgctaaaccttatctggtttctggttgtgttgcttgctgtgctccctggtgcgtttccagtatctgcacaagtgccacaaaagtctgaccgtgatgaaaagatccgtaaaatcgtgcgaacttgccgttaccaatgccattttggaacctgaaatcttcttg

SEQ ID NO: 23463 - DNA, 366 bp, Zea Mays
gttccactccttccacccggtggccaccatccttagctacctcaccaaggcaccactggttctgcccggcacactggtggtgaatgctctggcaaagcagagggcgatgctggagaacatcatgagggcctgtgttggcctggccctagagaacaacatgatcctggagtacaagtgagtgaagtggcgtggcctgcagctagatatgcaggaggttgcacgaagggaactagagaggcgagattagctgtgggattgtgttggcttctcgtgttttcttttgcgttttttcctggtcatcgttgtcgcgctgttgtattttatttgttggacccgtaactatcagggctctcctattctctatga

SEQ ID NO: 23464 - DNA, 3017 bp, Zea Mays
gcgcaaattggcacacgggcacgcacgagagacatggcgacggaagaggagctgccggaggcggcggccgcgcctgcgccagcaggtggaggaggcggggacgacgcggagatgcccgatgccgccgtgccgtcgggctcccactcggactcgtccgactccgactccgacgacgaagccgccactgccgccgccgagctccgcatccaggccctagagaaaaccctacaggagcagccactggactacgagacccacgtgcagtatatccagtgcctgaggaaggcaggcaacattgagaagcttcgcgtggcaagggaagagatgaacaagtactttcctctaaccccgaagatgtggcaggagtgggccaaggacgagatctcattgagctcgagtgaggaatcttttggtgacattgaaaagatctacgggcatggggtgcaggaatacctgtccatcaagttatggcgggattaccttgattatgttgaagagcatgatcattcagtgtctcagtgtacaccttctggcctctccaagatgagaaatttgtttgaaagtgctattaccgcaggtgggctccatgttactgagggcagcaagctatgggcagcctatagagaatatgagatggccattttgatcaccatcgctgatgccaatgatgaggagagggaaaagcaagttcagcgtatacgcatgctattccaccgccagttatctgttcctttggctgatatggaatctacacttgctgagtataagagctgggaggctgagcaggggaatgcaaatgatcctggtgcagattttgatggtgtcccctcaaatgttgtatctgcttacaaaaaggccaatgatatgtacaatgaaaggaagcaatacgaggatcaactaagcaatgcaggcacatttgaaggtgacaaactgcagcaatttatgaagtacatcaaatttgaggaggcttctggtgaccctgctcgtgttcaagttctgtatgagcgagctgtttcagagcttcctgtttcaagtgatatatggatgggatatacaagttacctggatagaaccctgaaggtgccttctgtagtcagaagtgtttattacagagccacaagaaattgtacatgggttggtgagttatgggtccattatttgttgtctttggagcgtattcgtgcttctgaagaagagctgcagcatgtatttgaacgggcaatacaatgtaccttttcaaccatacaagagtatttcaatatttatcttactcgagttcatggtttaagacggaggatttctgatggcttggattttcaactgattaggcagacattaacggatgctgcagaatttctctcatctcaactgagtaccaaggagttactgcgcttatatgcttattgggccaaactagagcttagtctcggcaaagatctttctgcagctcgtggagtttgggaaaacgcgatcaagaaaagtttgggagcagtacattttaatggagataaaaatggaccatgtacatgaggcgagatccctttataagcgttgttatagcaaaagatttgctgggtctggatcagaggagatatgctactcatggataagatttgaagaggagaatggcaccttggatgattatgatcttgctgtaaagaaggttacccctcggctaaaggagcttatgacattcaagtctcaagaggaggctaaagttgaggcttaccctaacctcaatgataattctaatgcaaatgattcctctcagaaaagaaaaccaagtaacaataaacagcagccccctgctaagaaaagaaaagagaatccaccaaaaagtaccatgccatcagatgaccaaggatcaaatgtgcaaagtgggcacagtggtgctgttactgatgtagaagtcggaggggccagcagggagaaggtcatggcatctatcgagatgaaagtggacagtgacagccgaacagggaaatcaagttcaaatgaaccaaagccatccttttataatgacaactgtacagtttttgtgtcaaatattgacttgaaagcaaatgaggatgatctcaggcgattcttctctgatattggtggtgccacagcaataagattgctgagggacagattcaccaaaaaatcaagggggttggcctatgtggactttttagacaacaagcatcttgaggcagctattaagaaaaacaagcagaagctgcttggaaagaaagtgagtatcgcgcgatcagatccaagcaagggtaagaagagccgtgaagcaggtcaaacaagccaggataatttacctccgagtggtggtgatgatgcaaaagcaacaggatccagtggaccagacaatgaagtacccaagggtgatgcaaaaaccatagggaagaataccctttttgcaccacgagctctggttaaacctcttggatggacaaacaaggatgagaagaaaccagatgttgcaggggagttgaaatcaaatgaggagttccgaaatctgttactaaagaagtgatatcagttggcaggtgtggatctccatgccccaatccagtgccaagatttgtggtgccttcatctctatgttagaatgatggacctgtagtagcagcttgaactggggatctacaaccgttatgtcttaccccgatgtagacatgaatatttctttctgctagggagattatacaagccatgccgaattgcagggtggtgaaggtgaaaacgggacgttgcgttcgagcagaaaaaccctgcccatgtgaaaagaaaacactgaccttataatatgtgctcactttctttttgaaccatacgtacgcattgctggtgaaacatcactgcatctcaaaaatgtgtaatctactctacgcggcttgattggagatgcagatttatttgattgtacgttgggaccttttggaccttgcaactgcatatgttgagaggctaacatcttttcagagcggcagcccaacgacactttgcatacacgttttaaa

SEQ ID NO: 23465 - DNA, 1985 bp, Zea Mays
cgtgtctcgtgcccgtgcctgtgaacctctcacgtgccgtgccggaatctcgcagccatcgatcgatccagcagatgtgccagccgccgcggccgcgccaagcccaagccgagctgacgatcctgatgcggttgaaaatttccacgaacatatagatcctcatcgtcgaccccatccgtggtgctcccggtgcgccaggctaccagagtccgacgcagacgtagctcccggccacagcagagcccacgccttgagcccttgacgcgctccgtgtgagtggagcgtacgggcgccggccggcggccagagaggaaacggatctaggaggctcagctgagtcgaggagatggaccgcaaagatgtcgggatcctcgccatggacatctacttcccgccctcctgcgtgcagcaggaggcacttgaggcccatgatggggcgagcaaagggaagtacaccattgggcttgggcaagattgcatggccttttgcagcgaggtggaggatgtcatctcaatgagtttgacggttgtcaattctctgctgaaaaaatacaagattgatcccaagttaatcggtcgcttggaggttggaagtgaaacagttatagacaaaagtaaatccatcaaaacttggctgatgcagatctttgaggaaagtggtaacagtgacattgaaggtgttgactccagcaatgcatgttatggcgggacagcagccctactgaattgtgtgaattgggtcgaaagtaattcctgggatggccgttatggtcttgtcgtttgcacggatagcgcggtttatgccgaagggccagctcgtccaacaggaggtgctgctgctatagcaatgctcattggtcctaatgctccaatttccttcgagagcaaatatagagcttctcacatggctcatgtctatgatttctacaaacctgatcttgcaagtgaatatccggttgttgatggtaaactatcccaaacatgctacctaatggctctagactcatgctacagacagttctgcaacaagtatgagaagattgcgggtaaacaattctcaatttgtgatgcagaatattttgtgttccattctccatacaacaagctctgttgatgatgatgctaaagagaagctccagtctttttcaaatttgactggtgaagagagctaccagagtcgcgacttggaaaaggcctcacaacaggtcgcgaagcacctccatgacatcaaagttcagccatcgactctgcttccgaaacaaattggtaacatgtatactgcatccctttatgctgcattagcatctgtgctatataacaagcatgatagtctgaatgggcaaagaattgtgatgttctcttacggcagtggtttgacatccactatgttttcattgaggctaaacaatggccagcatcccttcagcctatcaaacattgcttcagttcttgatgtcaccgagaagcttcagtcaagacatgagactttgcctgagaaattcgttgagacactgaagctgatggaacaccgatacggcgcaaaggacttcgagacgagcagagacacgagcctactgcagccgggcacattctacctcaccaaggtcgactccatgtaccggaggttctattcccagaagctgtccgaggaaacaggcggcgggaaaaccaagtgctgcaacggcctcgcaaatggccactagtggtcgcccagcactgttgctcatcattctcagtattttgataatgctcatggttagcgtttagtctagcgtgtttctgaaataatataattgttctttgaagctgtcccaccccacctagatcagctagttttttattttaatattttattcttctgaacattgaaattcatcagtctctacattgtttctctttgtttcttcttttagtactctcttcgttccaaattctaaattacgtacataatgtttgctatgtctaatagtaaaaaaaaagtcaac

SEQ ID NO: 23466 - DNA, 833 bp, Zea Mays
cagactgttacgcgagatcattgcgaggtgatctccgagaaatacgttctcgagtacgggaccgattgcttagagatgcatgtcggagccatcgaacgacctggtgagcgcgtgctgatcaccgacgacttggtcgcgacgggagggacgctctgtgctgcaatcaggcttcttgaacgtgctgaagctgatgtggtcgagtgcgcatgcctcattggcctcccaaaattcaaggatttctacaagttgaatggaaagcccgtctacgtgctggttgagtcccgggaatcagataaataagaacttatgggtcagaggaaagctggcggttcattccttgctgttgtgattgagcagtggagggacatcgacaagccaaccatgggggtgctttagcgttactaaggctagctactaagatcgacttggtgagaggagaggttagaagtgctgggggggggggggggggggtgggggcgttagtcttgtaggctgagtagattttcagagtactgaagagcttgtagttctgccaggaacatgcttattagttgaagcaagtgtgttgatggtccattgcttgttggattttgtggttttgatttgaagggcgcaaaaacatggctggatcagcttgacggaagaacttggacatcaatacgcttagcatcaagtactagcgaagtaggaacttgctacttgtagcgtgttattcctatctttgaactcgttagcttattagtgacaaaattcacaaaaaattggcacgcgaaacggacacaagtcgtagcagaaaaaaacgtgaatatactatctaaaaataaaaataaaaa

SEQ ID NO: 23467 - DNA, 613 bp, Zea Mays
ggccgattggtttttgtggggaactcccccatgctttttggggagagcaaagtctttaaatctgccaactcacataaccatagacgctggaagaacacagattgctccaaattcaaggacagtcatggctattctggggccagctgatatggttgatgatgttactggcggtctgaagcttttgtagaaaaccaccttgtcagcattttcaacttgggtcttcatagagcagtgctgggactttgcaggccacagtggtctctgcacttgtactgatgtgcggcagaagaatgaaccttggccccgttggttgacctgagtttcttgtccatgaatttatttggaaggagagcttgcattcttttttcacttgtaccgaccgttatctttggagttgtgatgttagcagttcgaattctggtgttgacaacttatagaccatcatttcttctgtaacatagataagaaaatactatttgactattgtccatttccccttttttattttctttttaataattcgtgcagtagtggacacaatactgagttgctttggagaagtcatcttgattgcggcagtgcaccgggaatcataggccctgtttgtttcggc

SEQ ID NO: 23468 - DNA, 2550 bp, Zea Mays
gccgcgctgtatggtcttagcaagaaacgaaggatatatgcggcccaagttcgggctaaacccctccttctcccacgacgccgatccccgtcgccgccgcctcatttcctatcagtccgaaccgttcttccgtcctgctcaggcgttccgaccagcgttgctcgcttctcgtcactcccgccggctgctgctcttgtctacgccacggtagaatggctttcctcttcaacaagttccaagaggtacacgtcctgtctgttgctattcacaccaaccaaccatcacgggatctcgatctgcctgattcctcctcgtcgcgtgcgtcaaagccaatcatggcgttcgtcatgaatttgttgacacgaggaaaattctgtcctgtactgcactctttgccccgataggcagatgctcggcacgcagtgggaattttgcgctttcaatatgtggggattgattcagtgtttctcgtccttcttacctttgttcttagcttcgaagctgtctgcatcctcgttcagatgactatttgatttctcagtattttatgtagtgtaactgttacagcactagcccacgaaggttgatttgattttatgtcaatatgtaatcgccgtaaatattatcaccattttaattgattttattgctaaatgttcaggcaatcagaacaattgccaagagccccatgtttgctcgtgatccaaggcatcttcaatttgaagctgatgtgaatcgtttgtttctctatacaaggtttgctaatatccaaagaaaaagcagatctggttttccactttttattgttgtcatttctttttacgaagtattgtgcttcttgcctgtgattggcggagaactcaaattagcacatcagcacttgcaattttgtgtacttggattctttcaagcttttgcctgccaatttgtttcttttaaatagttgtcatttcattctggttgttcataagtgaaagccatttgtgtgaatgtctggttagatgagttacatcttctcaactcttcatttaggctggtacccctaatcaaactgcaggaagtgtcgggatctccgagctcatggagattttgttatacctagttctcttgcaaaaccatttgtgaaggtaccatttcctgaatttcttctgctatgcacttagctattatcgtctcggggagaatgctgacgagaaggacgctgaggagattattgacttggctagcaaagcttctattgctgatcagcagaaacaagtgcaggataatgttcattatgaacttacgcatatgtgccaagcaatggatagcattttatgtcctgatacaataaacgacccatcaaaaggaccttcagaagcacataatcattctcagcgtagtggcttaagttttgccgttggtggtgctgcatctgcaaacaagcaaagtgcaattatccctgctacacgacctttaactcgagcagaattgtcaaagaaattcagggatcattttgggtacacacttgacatcggaccatctggaattcctcataaagacgcaggtcaaggtttattcttatcaggacaagcaaatgccggtgctgtcctagccatctatcctggtgttatatattcacctgcttactatcgatatatacctggatacccaagaattgatgtttgcaacaactatctaatcacaagatatgatgggacaataattgatgcaaaaccatggtgttttggtggtgaaacaagagcattatgggatggttcagatttggtggattacaatgctatggcacctaaaggctcagagaacaactctgatcgggtgtggagaatgctaagcaagcctctagaaaaaggtgtaagggaaaattttggtgaagtgcttgaacgacgaaatccccttgcttttggtcattttgcaaatcatccacccaaaggttcaagtcctaatgtcatgatctgcccatacgattttcctttgacagagaaggacatgagagtatacatccctaacattacgtttggtggtcaagagaccattaggatgaagaggtttggctccttctatttcaagtctggaggttctgataatcaggctggtgattctctagtactgaagacgctagtgctggtgagcacaaggtccatatgtgatgaagagctctttcttaattaccgttacagtaactcaaaaagacgaccagagtggtacagccctgtcgatgaagaagaggataagaggagatggagctagtttagcacttctgtatcattctggttgtgcatttttttggctaacttttttagttctttcccccctggaaattgcaactgagcattggtaagctcctgagatcgagatgacagttttgacttaattcgtcatttggtattacatactttggtgtcccaattaccatcatgataaaagttaagctactcatgtaagttctactctcaggtcctttgtggtgcttaaaggattacatttgttactccttttatgtgtgtctatcccaatgattatctatgaaagataaataatttatgcata

SEQ ID NO: 23469 - DNA, 1073 bp, Zea Mays
agccactggtctacaagcaaccctccaaaagagttgcgctattcctataaggaagctgacaagatgtggtcttttgagatgggttaagaaattagtgaacgaattgcctagctggaaggcttctctcaatcttgctggaaggactgctatggttgttggcggtgatccacttctagagctacttgcggtcgattggttcaaagttaatgaacgctttgattcagttgccttacatcccaaaagccttgtgcaatcagaagctgcaaagaaacttcctttcatattggttataaatttgcaggtgccagcgaaaccaaattataacttggttatgtactacgctgcagagagaccagtgaacaaagattctttgttgggtagattcattgatggaactgatgcataccgagatgccagatttaaacttataccaagcattgttgagggttattggatggttaagcgtgctgtaggaacaaaagcttgccttctgggcaaagcagtaacgtgcaattatcttcgccaggataactttctggagatagatgttgacatcggttcatcatccgttgcccggagcattattggtctagtattgggatatgtcacaagcatagttgttgatcttgctattcttattgaggccaaggaagagaaagagctccccgagtacattctgggcactgttcgtctgaaccgtgtgaatcccgacagtgctgtatcaatctaattacgtttctagccgatctatgcaaatttactcttatcctcttttattctgagagaaacagcgtggcattttgaaaatgtgaaatagcattactatttgctgatccccaatcgagggtaacatatgtaaattggcatgaggcatgactacgtgacgcctttcgtaaatagaataaatcaatggttatgtaatattaatatcccatatacgcgtgtcataatctatgtggcttaaaagtggcatcaagtcatctagtttcctgtgttaacttcttattccttaggtagtcagacattaacagtgtgtttggtttgaggaatgaagtgatccatctttttctcac

SEQ ID NO: 23470 - DNA, 1890 bp, Zea Mays
gacgaaactgacagactgtagcaataattggtcgctccccgatccatctgggtttcgcctgccagcggcgagatgtccttcttcttccgggccgcatcgcggcagcgcccgttgccgcaggagatcgcgcgctccctcaaggactccctcgttgccctcgacaccaagaccggcgccaaggctctcgaggatgctgagaaaaacatacttacattgaggcatacgcttgctggcgatggagaagtggaaccaaatcaagagcaggttttgcagatagcccttgagatttgcaaggagggtgttctttccctctttgttcagaatcttccttcattgggttgggaggctagaaaggatcttgtccactgctggtgtattttgttgagacagaaggttgatgaaagctattgttgtgtccagtatattgaaaatcattttgatcttttggatttccttgttgtttgctataagaacttggaagtcgcgttgaattgtgggaacatgttgcgagaatgcataaaatatcctacacttgcaaatgctctttcagatatatattggagtcaagcagcttcgagttgtttttccagtatgttgaattgtcaaacttcgatattgcatctgatgctctgaacactttcaaggatttgctaaccaaacatgaagatgccgtctctgaatttctgagctcacattatgaacagttttttggactctacacaaaacttttatcttcaactaattatgtgacacgaagacaatcagtgaagtttctttcagagtttctgttggaggccccaaatgctcaaataatgaagcgttacattttggaagttcattacttaaacattatgatgggcctgctaaaggtattagagtattagttataaaattccttgcttatatttaaacgaatcagcaatgatattgatcacccttctcatttcttgtgtttcttgattttcccttttagtagtagttatgacttatgacattatagtgccattttctagtgaaaataatgatgaagggcaggtctagggcagtggtgagagctgtgtcattgactcaccaggttacggctttacgggttcaaagcagtctctccgtatttgccggggaaaggcttgtcacggtttatcccttctctagatcctgctcatgtgggagtgggagcctctggcactgtgtctgcccttttttatctagtgaaatgaacggtggatgttactaccatgatacatgagaggctctggtatcttttactggcttttatatatcttgccaagcaaaggtcatcctgagaggctaaggattcaagcaaaaatatcaggatatgtgccttccacatttttaaggtatttgttgccaatccaaacaagcctcgtgagattattcaggttttggttgagaatcacagagaagtgttgaagctactccacaatctccccacaagcaaaggtgaagatgaacagcttgatgaggagagagatttaattatcaaagaaatcgagaagcttgtgcggttgtcagtataaaccctcaggaaattcgagcgtatccttgaagacatactgtgcaatatgctgccttgtatagagcttgtttttcatgtatggaaaaaaagtttggccacaaattgcattcttcacgagaacacttagcatttctgtcagaaaattattttcgtgtagcagaatttgcaacaggaataatctgcattatggtgtggtgttgataccattaaggattggtgaaagtgcctgccatttgaaatgggtacgcttgtcatgtttgttttgatgtctaaagtttgcacattttttcttgacaacttgagggctgttttggtgaccaagaaaataaagggaggccataggaaggaatcct

SEQ ID NO: 23471 - DNA, 455 bp, Zea Mays
aaaccatctcaactaatattggacaagtttaattggacacaaggatactgtcggcacagtggctttcagttcagatgggaatttgttggcttgtggaagttttgatgggcaaataaatgtgtggaatacagctgcacgagctctcaagggaacccttgagggttctgggtcaggttttgagtggcttaaatggcatcctcggggacatttgataattgcaggatcagaggattgtaatgtatggatgtggaacgctgaccataatgccattataaatacatttgttggacatagtaacacagtgacatgtggtgattttactccagatggtaaacttatatgtactggatcagatgatgcatctttgaggatatgggacccaagaagtgcacaaagcaggcatgttattcgaggccatggctatcatactgtgatggattgacatgcttatcaat

SEQ ID NO: 23472 - DNA, 971 bp, Zea Mays
ctggttctgcgtgttctatctgcaatcaacgacggcgcgtctcgacggtactgctaattagcctcctagccagcctccgcctggaggtccatccccgacctcgacgcttcccggccaaacgccgacgcccctcaccctcggcgcagcgccgcagcgtcgcggtgctccatacccatccccctccatggtcggcgcctgcatcccccggcatcgcggtgctggatcccctccctctctcgcgttacgctagagttcgagaaggggaaaagcgacgtagggttcggcaacgacacctctgtgtcccctcctccctcgcgcactcattttccttcgtctcgttgctactcagagtgcgttccatccgagcggtgatgtgagatgtgtcccccctattcttcatcggtttgcttgcaatgattgagatagatgtgctcattcgccttgcagaaaatgaaaaataaagatatctttgtgcccagattcagagatggtttgactacctaatcatatatgcatggtacaacagccataaaactgaattttatttggctagaacctgaaatggcggaaactctcaggaatcatgtgcaaaccgtctaaagctgactgttggatggggttggcgaaggtgtgcttgaataaggatcacctgaaggcgtggagtccctggctgctggttgttgtgtgtcctggcgggcgacagtttgaatcccctgcaggcagtggcggctgtaatatgtactagtataagcatgcagacaacaattggaaattgtatgattcatgtgatcattttccttgtatcttttctattgttggttatatatcagattttagaagattcttgtgatccttttccttgtattcttttctattgttggttatatatcagattttagaagattcttgtgatccttttccttgtattcttttctattgttggttatatatcagattttagaagattcatg

SEQ ID NO: 23473 - DNA, 906 bp, Zea Mays
tattatacatgttaacttttctgcaacctctaaggtgctgaagaataccattatctgctgagatccatgataaattcactaataatttgttgcatcagtttgaacagaaaggggaaagggcttatcgaagttcttatggaagcagaacaggcacacacaatgtcatttatttaaaaatctctacgtctaggaggccaactaatcagatgctaaaagatttggcataagtaaaccaaatatgttggcagatctttttgtggagggggagggtgcatctgtgaaggaacgttacccctttctagtaaagaaaacaatgtgggggatgttccaagattctcctttcatttatttttttaattacatctccactgtaggcaatggttgatgttgccaaggaagttgatgcagattgttgcttgtggatgcaccgagaaaggcaatgatcaggtatcagaagattggcatcgtcgcaggtgttcctgtttgcatcaacggataagacgtgtcgcccacatccgtctcctcgctgagctcaatgaaattggtgggaagcatgggaggagacttcctcgtttgatgacggggaaatctataaccaggctgacgccgagggggggtcatcaggctctggtctcccgaccggggtccgggcgatgctggagaagggtatctgaatctttctttgtttgattcagagacaaaatccgttcttgggaaatcgttgttgggtcggtgatcacagacggatgggaatcatgtggaattttgtttacatgttgactaactatagttagttgaccgtgcatctgtttctatatatatcatatagctatacattggtttgatgggttatctaaaatatctatcttttatatatagtacaaaccaacacaggcttggtttaag

SEQ ID NO: 23474 - DNA, 1356 bp, Zea Mays
ctggaacctgtgatttctcatcctgagaagatgacgctttctggtactctgcctacggggtgaagtctctgtcggacgagcacagccagctcttgtccggcggcggcggcatggacgcgtcaatggacaactcgtggcgcctgttgccgtcccaaaccgccgccacgttccaggccacaagctaccctctgttcggcgcgctgagcggtctggacgagagcaccatcgcctcgctgcccaagacgcagagggagcccctctccttcttcgggagcgacttcgtgaccccgaagcaggagaaccagacgctgcgccccttcttcgacgagtggcccaagtcgagggactcgtggccggagctgaacgaggacaacagcctcggctcctcggccacccagctctccatctccatccccatggcgccctccgacttcaacaccagctccagatcgccgaatggaataccgtcaagatgaacctgagtaaccatgcggaccccaacatctcagagctgacgactctttgctgctggcctggcctcatcgtaccttgaggcgtcaaggaatacttcattaccactagtatcatgctcctggattttcgaacaatatatatatgcttatgtaccgctatttctctcatcttttacacttctttacccgtttggaattgtatgttctgcgtggcacggttgttcatttgacctttttggatttgattgaaagctccgtttcttgcttactccagcgcatcgtgagcaatgtccctgtctccgctgcatgtgaaagatctaccgctgcatgcatcagtagttcaaagatgttcagtgctgcgggagggaacatgatcctgatgggcacccgtcaggtccaagtcgtggcctcgtgggtgtttggagaagataaagcgtggcaacgctggatctgccgcaaagcttccagagttggtggaggaacaggctctaaccctggacgtgggtccttgcacgcactagttcgctggtccagtccagggacagggagcagagacgcaaggcagagccactgtactacgacggcactgcgggtgaaggcgcttgcctggtgcgattcgcatcacgtgttgtatcgggttccctccttgtcgctgacgcctttaccctttgggcttgcatggacacatggttttccatggatgcttgggttcacggtaccgacgcatcggcccgttggcgacaagggagaaaagccaagcctggttgcgtatcgcgccatggagcagtcagcactcggcagtggtggtggtctctccggtgtacggacgaacggtcccggcgttggaccatatgcaagtgtccacgacaacgagtccacgtga

SEQ ID NO: 23475 - DNA, 186 bp, Zea Mays
cttctccgatgagcaattcctatgatccagctaaccccgcacgtgattacccacatgtgcacgttccccaaggtgttgcatgtaactttggcccgatcacggtcacctgttgacacggacggtgaagacgcacgacggtggctcaaacccttcgcttatgtcggtaggggggtttggttataggcg

SEQ ID NO: 23476 - DNA, 207 bp, Zea Mays
atacctagggtttccccaaaaaatcttcaagaagagatggggaagaacatctccttgatcctctcttcctcttcaattcaacgtgccccttcttttctcgatccttgctgcgtagggggagatcttgggggaggaagcaatggatgatggctgccatagggggagggggcgtccagccaagggggagaaaagggggtggcggccaag

SEQ ID NO: 23477 - DNA, 3114 bp, Zea Mays
aaaaaataaactaaaataaagggagagaaaaactgtcttttgctacagctgagctagaaaaggaacctttttccgcgcgttattcttcttcttgtattcgaaagcccaagcccaactgataaaaggcccatgctcaagcgataagacgagaataaacaaccaccgatcccccagggcccaggcccacgcgcacacattctgattccgaaggcaagggcgtgtacatggcggtgagacgaggagccaaaacccaacggcgacgagaaatccacggcggctagttcaccccatccggcgcgagcgactccctccgcctgcaccaaaaacgagggcgttttcgtgtcccctcctccaaactccggagcccacatcctccagtccccactcacctgcgccactccccaccacgctcctcaaaaccctaggtccttcgatctaatgccgtgagctctcgaattctcaattcccccagcctctccatggaagaccccgtggcggtaccctcctcgtccttgaccgaccctgccgctgccgccgcagctagggttccgggtgcggtggcagcagcccctggcgtcacctctgcgccgtccgctctcgctccgacgcagccgcctgccaccgcggccgcggtctctgaagccgcgacgccgtgccagaggcagctgttcacagtggagctgcggccaggggagaccacaatcgtgtcgtggaagaagcttctcaaggaggccgggcacaccgccgcggcaccgccagtggcggtggagccagcgttcgccgcacatgcgggcccatctggtccggcacatcctgcagaaaatgacccaaaggatccaacacagccaaatcggttcaatgcagtgattgaaaaaatagagcgcctttacatgggaaaacatagcagcgatgaagaggatcttaatgatgtaccagatgatgatcagtatgacactgaggattctttcattgatgatgccgaattggatgaatatttcgaagttgataatttgaaaactaagcatgatggctattttgtgaacaagggaaaattggaacagattgaacctggtacagcggcaaatgttgctccaaagaaaaggagaagaaaggatgcatcaagttcttatctggagagtaatcaccttggtccaattgattattttgatattggcgatgtacctgaaaaatcctctgcaagaggtactgtgcagacgggaaaacagttagttagtagcaacgtaagttcttatggtcaataccatgaggacaatagagtggtgaagaataaaatcagtggtcctggaggagcccctaaaagaaaatcttctgaattctcgggtgacgctgcagcacgagctaagattattaaggatgtctcgcatgctcctttggagctaagagacatggaaaagcataaagctgcagcactacctgttgactatgcacataagtcaaaaatcagcgaaacatttgattatgcatatccagcttatagggataaaggcacttcagggcaacttgatttccaacaaagaaagataagcagggaaaatcaaggtccatcaaatagaacctatcgcaaagagaaacatggaacaaatgaatatcctggcatcgctatggctactgcggtctattctacacaaacaatgcacccagttgttggtagggagggttcaggaactaaacccaaaggcaccaggcttgagcgagctattcgcgatctccagaagatcgttgcagaatacagaccaccaacaattgatattaatgaggtagatccaaatggccaggtagcagttaaaagacggttgcctcctgaaataaagcaaaagcttgcgaaggttgcaaaggcaaataacggaaagatccaagaacatgagctaatgaatcgcctcatgggcatagttggacaccttgttcagcgcaggacactgaagagaaacatgaaagaaatggtagaatctggtatatctgctaaactggagaaggctgacaggtttcagcgtgtaaaattggagatcaatgagatgattaaagagcgtatggctacaaagtccaaggtcaatgaacaggatggttcagctgatgattttcaggttgctaatgatgaaagaagagctttaaaaacaaagtatacaatggatactgcattggaggacaagatgtgtgatctgtatgatatgtatgttgagggtatggatgaagacaagggccctcaaagcaggaagttatatgtagagcttgccgagttatggcctcatggttgcatggacaatgtcgggatcaaagatgccatttatagatcaaaggagcgaagaagattattgtacagccagcaaaaggttcgcagtgaagagagaatgaagaggaagaggctggctgcaacagcaaagctgccagatggcctcgcagttgcaatgcaaagtggagttgccccacaagttgcacagccacccataacaaatcccatcacataccatacggctgattatggacagaacccggggttaaaatattttgatagggctcgtgaaacgagctccagtgcaatccctgatgacggcaacagaattgctggtgaggtcaagaagaagaaaagaaaacctgaatatgaccctgtagatacacaagctaacctaccaagggctcccatgccgcacgggagcgagaagcaaaagccttctaagcctgctgacgaggccagtgctggtagcctgccctccatggcgacaactcaaactgtgcttggcctaccgtcggtgcttggtcataaccaacaacctagctgattctttcggcgtagtgttggacatttggttctccttataggcctttttcagctgctgtaacaaattatggcctttccatgtgttcagcatcgattgttgagactaacatgttcccgagtagagaggatatttgatcactctttacttttccagcattgcatggttggtacccttgcccagattatctgtgcagcgctgatagatatgatctgcaaccccttcaaataccagttgtaattatgaatattttctcgagacatgtactgctcatattgtgcgaagcgatgtgcagattttcttttacttttgttcaagtgtg

SEQ ID NO: 23478 - DNA, 1441 bp, Zea Mays
atacaaactaaaaaaacgaacacccccgttcaccgaatcaccgcctcgtcacactccagcccttccccccgcgccggcgcggcgaggccaccgaccggctggcgggtgttgcttcttcttctcccggcccacccggcctgcccgcaccaccgacccctccgctgagcgcgctcccacgcccattgaatcatagcgcgccgctcagtcgagcgaggatttctctaggatagcagccgccatcacctcctcgcctcgccgcgctccgctggtgctgctgggtcgctgctgagcggagcgggaatcggaccggactcggttcgaattcgtcctcaccttttcgtcgttcggatgccagaagccgagtggaatgatgaacacactaggattgtctgcgaactctttgaagaacaagttcgggctgggaacaggccaaacacgcatctgaacaacattggttaccgccaagttgcggctaagtttcagcagaggacagagcttctctatacaaaattgcagcttaagaacaaatgggacaagtttaagaatgattacatcacctggaggaagttgcttgtagtagggaagggtttaccctgggacacagcaaaggggacatttgttgctgacgaagaatggtggaagaagatcaataaggagctgccgggtgcaaggaaatttcgacatggcggtctacatcatgaggataagttgaatgtaatgtttgactacatcaccagtaatggtgtggatccttcaccgcctgcgccggaaagcccgaagaatggggtgaatcattcgccaccggctgcaactggtttgccatctgctccagactgcgcgctcaatggagtggatcattcgcctgtgactgcacatggtttgccatctggtccatacagccccatgaatgggatggatcagttgccactacccgcacatgatttgcgaagtgttcaagaaatccccatgaatggtgtgaacctcgatggattggacaacaacactgaagataatgatgacatttatcaagagcctgtgtttcagtatacttcaaacaggaagaagagaccgattagtttcagtgctacaaagaagaacaagaaaaacaaggctgaaactgctctgctcatgcaagctcatttgtatcgcataactgagctggctcagaaagcacaggatactttcaaaaagttcagctcccaagctgacttggtgccatggcctagcatccaggatgttatgacacttgtctgggaatgcggagcacggtgtggaagcaatgagcatttcatcgcaactgaactgtttgtcagtagagaacagagggagatgttcctgaccatggaaacggctgaggaacggttccagtggcttcgaagaaagtacattgtcaagtatttgtcaggcgcagggccatgggtcggcatcgctcgctgcactg

SEQ ID NO: 23479 - DNA, 1004 bp, Zea Mays
catttctgacaatcccgttaattggaagtgactatcgagcacaattccaaattgggaacaatgcattctatggtgcaaattatattcagagtgttactccgaacctatcaatgggaactgaaatgttctggcttggtcaccaaaggaagtctggaattggttttgcctctcgctataacacagacaaaatggtgggcactctacaggtcgcaagcactggaatagttgccttaagttatgtccagaagatttccgagaaggtttcccttgcgtctgacttcatgtataaccatatgtcaagagatgtaactgccagctttggttatgattacttgcttaggcagtgccgcctaagaggcaaaatagactcgaatggtgttgttgccgcatacttggaagagaggttgaacatgggtgtcaacttccttctatctgctgagattgaccattgtaagaagaactacaagtttggttttggaatgaccgtaggagagtaattctgccaaaacaattgctgtgagcgcacatgagatacttatgcagtcggcttcgcgcgtatgttgacttgttaaagatatttcaggtctcagttttgactgatcaggttttgccattgcgccgtggaaaaacacaggccgttgctgctttacagggttttgtatttcagtgttttttcagctacttgagcatgggggccatgattctttgttcatcttggatgtaactagctgattggtgttccaacaatgttgtattggcggaacaatttttacctttttaaatcactaccaatccacctcactaggccttttctgtaacatcatacacgagccgtacgatttcaaagcatatcaccatttagcacttgacatatttgatgctgtcatgtgcttttgttcatccattgcaagtaagaaagttcaaatcgttttttacacaagttcttgctgcataaatgagaatgtggaatcattatactagaaagaattagcgcgtgtttggtg

SEQ ID NO: 23480 - DNA, 680 bp, Zea Mays
aaaaaaattgctcaattcttaactggttgcacttgcatctgggaataaaaggaacattgaaaaagtcagaaatgctcaatttagtgttaatttgcccaatgttgtaactgtggatccgatgggtatggcactgaatgaagacaagttgcatcttaccaccgagtcacaagtaaaacttggcaaaatgctggcagaagcgtacattttgaacttctctacatcaacttgttaggtgaatacaagtgtctcaagatcttcaatccacaacaagtatatttgataaggtcgcctagtgacaagattactatgtgctcaagcacttaatcaatcgaagacattgtatctatcttatgtccgagaatacgctaaagtgcctcaattcttgtatagcatttcaaactcgcttcataacatttctttcatattgtaataatggttgcagcctatgttttctggtcgctcgactagctagtcgaacttagggaacgaccagatgactaatctcgattagtcgccgactaggtcgactaatcgacctctggttgacctggttgtcgtcctgttcattcaggtcattcaggacgtatatactatatagtatatgattatataactatatatgaatgatagggtaaacatgacatgaattctgcaatattgaatattgatttaagaaactg

SEQ ID NO: 23481 - DNA, 3068 bp, Zea Mays
ctaggaaatcagattcatattctgaattgtcacaaaaaggtcatccatttgaggaggaaatcacatctttgctaaagaacccccctggttttcatagctttatgctgtgtgaccagtgcccagaaatgagtgctacatataattgggttcatacagaaactcaactggaacatttggcgagattattgggtgaggaaagagcttttgctgttgatacagagcaacatagcattcgatctttcctaggatatactgcactaatgcagatctctacccagaatgaagactatctgatagacacaatagcactgcacgatgtgatgggcattctacgaccagtgtttgccaattcttctatctgtaagatcttccatggagctgacaatgatattctttggcttcaaagggattttcatatttatgttgtgaatatgtttgatactgctaaggcatgtgaaattctattgaaaccacaaaaatcactggcatatttgcttgaagtatattgtgaagtgaccaccgacaagacaatgcagcgtgaagattggagactgcgtcctctgactccagaaatgatcgagtatgcacgcactgatgctcactatctgttatacattgcaaattgtttggcatcagagctccatgcaaaagcctgtgatacttccagtgataaaatcaattttttcttcgaggctagtcatcgctcaaatatggtgtgcatgcaactgtattcaaaagaaattgaatcccctcctggagcttccagtgcaacatctattctctcacgaaatttgcaaactcatgggttcgactccaaaaagtctagtgaagtgaaggatcttgtttggaaattttgtgcatggagggacttaatggctcggatgcatgatgaaagcttacgatatgttctgccagaccaagctatagctgcccttgccgttagtcttccaaagggcccaacagaggtgtttgctgtcatagcagaaactgacctaagcatttcaagtatgtacccttccttgtcatcaccgtcacctcttgttgtggctcatgtcaaagaactctgttatctgctggatgacatcactaccagcatggacagcatctttaaaagtttactagagaagtataaagatccaagtggattatgtcgactatcagtttataattataaccttataacacacctaagtttgaagcaaacaagtatgttttccgttgctccaagtggaaagaagttgacagcactgcctaataaaaaggtttcacgggatttattcattaaaaagttttcctgcaagtccccggtatatcacaattgcaggatttatgctagtgatggaagactactttgctactgtgaccgcaaaaaactggaatggtttgtctcctaaatatatgctcattagctatttacatgcatgtagcatgaatgaagaattattttggcaaactgatgagctcttctatcccaggtacattcagcgtaatttggcgaaattgattgaaaatagtcctccagcaatcatgcttctctttgaacctaaaggtcgtccagaggatgaagataacgagttctatattcagagcaagaaaaatatttgtgtgggctgtggagaaaagagccattatattagatacagaataataccgtcatgctacaggatgcattttccagaacatttaaagagccatcgttcacatgatattgtacttctttgtgtagactgtcatgaaatagctcattcagcagctgagaaatacaagaggcgaatagcagaagaatttggaatacccctttttgtgcaaaagataatgaactcgggtgatataagtttgattaccaacacatcagtatctgaagataaattgaatggaacaggtgtctccccattgcagctgaggactgctgccatggctcttctacgtcatggatccactatgccattgaagagatgtgaagagctaatgcagattgtgaagtcatactatggtggtagagatgtgactcctgaagatctcgagatggcattacttgttggtatgagccctcatgagcgaaggcgtcttgaaaagaaaaagggatattcgtttagagctcaggctcaaactattattagaaagagcagcagcaataccatctcagaagacagtggacatggatcagaaaattgtcatgccttatctgcgcgatttcctgaggttggaactggtagtaatggtcagcaagagtttgatgagacagggaatcaaaaccagctagagaatttaaccctgagccagggaagctcaagtttgccagtcagcatggaggacaccacttctgatcatgacactgtgacactcgagaccgataccgagcagcaagcaagaggtgcctgtactcctggaaacagtcatgacgacaaggaacaatccatatgtgacaattctagtcaggtcatttccaagaatgctgagaagatatccctgttgggtcatgggcatcatggtaaacaagttgtggaacttttgttttctaatggtggagaggaatttgttaaccagttttgccaaaggtggaggcagatctttgttgaagctgttcacccccgttatttaccttctggctggaatattaaccacagtggacggcgggattttggtgacttcagtgtctacaagccaccaaggaaagatcctcaatctgcaactgcaagggattaggcttacgcgggtgtcatgctgtcgttggtaccctgaggttcaacttactttccagaattggttccattcccttaaacttgatcttgttgtacttgttccattcccttaaacctgatattgttgtacttgtatgtatctcaatctgtgtgtttgttcgagtaccttgaaataccaatttcatctcctatgtatttctttgagatgaactttgcatcagttttgttgagccgtttttttatacgtgaggatttagagtactaacaatttaagtccaagaaaaatcaacagtgaagttcaactcagcagattaaatcttcaaagtgccgtttttaactgggagttgagctcaaattggtttcttc

SEQ ID NO: 23482 - DNA, 1136 bp, Zea Mays
atggggagtgaggaattggaaactgctttgatggagatggtcgagcatgacaacagacgtatgttgagtgcaaaggttgagaagcttgaaacagaggcatatgaactgcgcaaagctttttcagacaagcaagagcaagagcaagtaatgcttcagatcttgttaagaatggagcaagaacagaaagtggcagaagatgcccgcatagccgctgagcgagatgctgctgaacaaaaacacgctgctcacttgctccaggagaagtatgaagcagcaatgacagcactttcacaaatggagaagagagctgtaatggcagaaacaatgctggaagctacaaagcaataccaggttgggcaggttaaagccaaccaatctttcacttcaagttcacctcgtgcagaccatgttcctgcgaagataaatcaagaaccaaaccaaactgcacctatcaggagaatcggcctgctttctaggggacttggatggcttgacaagggcaagcagggaaggcagaattccaatgaaacatctggagcctaaactcatctaaagtccaggatgaagtcatagctcccaacaagatctggattgttcattaacgcttggattgcttgatcaccgtaagagtgttgaaatcagcatcgatacatgttttctcgggaagattcagctggtatattccatgaagttttgcaggaagtgtatcttgtatcatattgagttcaattgtcagataaagttttgttggtaggtcagaaaggcttctgcaagtcatcggtgtaaattttcttttattagttccattaagattgtcaatagttagtgttccaaataggagaaagaaaagaacgacttactacacacaagaaaaatttctgttagattagttacagtatcatggagttgttctggagaagagcatgttttttttatctcttcagaaatgtcaaaaccaccgaagagattctctctctgtatttttgtctgatacgtgtggctcatacattcttcagtcacagttgacatgtttgatgtaaggcaattattgtcacgaggattctgattacgaatacaacagcagaaactccactatagggaggcgttttggaaagttaattgttgtcagttcctca

SEQ ID NO: 23483 - DNA, 4800 bp, Zea Mays
tataggtacactacttgtactccccacggggccagctccactcgaaatgtggcggtatctgtcgcctgtcgacctaacctatcgtcagtgccctgcggccggtggaaacgaaacctaggaggagcctagtggccacctagggtgaggaaaactgaggacgcgaggcgagagcgagatccaatctgcacccccccaccaaagaaagattcttccccgccggcctcgctctctcaacatccgtctcgctccttccaccctcgctgcgcctcaggcagcgagcgagcatatagcagcccaccacccacatgccgcagggccctcacccgtcgagccaattgagtggcagccagaaaaacccagagcgcgagcagcgagcgagcgcgggctcctgtgtgcagtgtgtctgcgctagagggcgaagggcacggaccgccttcgtcaataattgcggtacgaacggggcaaatccgtcgtttaaagaggtcgctgatagcgcctgctggtggcgagagagagaaagcagcagaatcgctgagggatcgtcgatccggagaggcaaaaaagccgagagatcaggcagggcaccatggggcgcgggaaggtggtgctgcagcggatcgagaacaagatcagccggcaggtgaccttcgccaagcgccggaacggcctgctcaagaaggcgtacgagctctccatcctctgcgacgccgaggtcgcgctcgtcctcttctcccacgccggccgcctctaccagttctcatcctcctccaatctgcttaagactctagagcggtaccagaggtacatctatgcttcagccgatgctgcagtgccatctagcgatcagatgcaggtgcgaggactatctattttactactattgcaaacttttattattaacattgtgcactcttcaggtttaactaagattgtacactctagcgatcagatcataccactttttttttatcatgtgtatttctcataacagcctggttttactaacattgttcaagttctgaaactatacataccaggtcaatagtttcttcaaatacgaccaattgtccccgactaaatacccttcatgtaaaaggtcctttagctgagttggttagatagtctaagtagcattcttcagattctaagttgatttaagagttttcttaacccatatgtgatgattttccttttaatataatgtctggtggttgtcttacccctgtatgtcgagtttttttaaatacccataataacaaacctataggtttattattattttcttattattcatcattgttttgtcgagaaaacaattgatcatcaaactgtgcatttctacttaatatttcatttctgaagcaatgattttcataaaaataggttcagtataaaactaagtactagtgaaatactatctctcaacttatttaattttgttgtacaagatctattgttacgccttttgtcccaatccttaacggcgaaaggatctctagtgtaatggttaagacttacgagtagcacctccaggtcctggatttgatcccctcggggacgaatttcgggtttggttaaaaaatccactcgttgtgtctcacccactctcggggatcgatatcctgcgcgtccccctccgacccagccgttacagagtggacggttgatcggtccgtaagtaatggaggccagagttcgggagttttcttggccaggactatatttcggtatcttcttaatataataccgggaggacggtctttcactcccggccgagtttgtcccaatctttaattacacaagtcaaacgcgctagaaaactgctgttgttttaatgcataagagtcttcttgaagattgttgttgttttaatgcaagagagtcttcttgaagatcaaccaatgcactgatgatctatcaattgacagtacagtcatgaagtgcaaaaatctgaatagtttcagtttgtttggattttggacagctggtctagaactatatcctcacaaaaataaggaaccatgagaaacattgaaagaaattgcaatatttgctatataactgaagaaaaaaaagtttgtactgtgtcagacatcaagtgtgaggtgcactggcccagttcatgagttttatgctagcccgtcatggtggcagtacttgaatgagtgttccagcacaccttaaaaaatttactggaatgtttcttgatccatgttgtccatgtcattaacattactttaaattattcagtagtttggctagttgcaaatccaatgaagcatccagcaggtgcacggcaaataataaactggctatatattatctgcatgtattcatattaggaaattgcataaagttaaactatggtaaacactatctgtaccaattttcaaatatttcgccaatgccgtgctatgaacaggccccgtcatagtgacaagcaattgttagacttgtagtacttgctttatgctgtactagtggtaagataaatttctacatacagctatcttattgtatgtattttactaagaacggtatatggtactagattaataacacctacatcttttgatggtgatatgtaaacatcatcattgtaaagtacatgcaatccatctgttaaaatactgaccactattttttctgaaaaagattttatcgtcaatagttcataacaaaaactattagggcaccaaggaaatactgaagtttcacatgaatctattatttttacagaataatgtagggataaagggaaaaaaacctgcaatccagagaacctatgtttctttttagaagcaggtcaagaccggggctaaaattcgtttctacaagtagtcgaatttaggacatgaggacctcctaattaacttagctagaggccgttttgcttttttaaagaagtgggccatatattcctcatgtatatattctcatatagatttgctatcatataatataactataaaagaatcatggtaaaatgtatactgaaaggattagtataaattgaaagagttaaatgcatgaatggtgtttaaacttgtcaaaggatgtcacttaggtccacgaattttaaaataatatttctaggttctttaatttgttaagtggcacaccgtagtggccggtatagtatagtaatggatatgtgatgcaacattttataagtttagggatgcgtggtatatcacttaataagtttaaggagctagaaatgtattttcaaagttcgtggacataagtgacagtggatctaggtgacactccttgacaagtttagggaccaccgatgcatttaactctaaattaaatatagtagatgagacatgttaaataacatgaatgttttgaatatcacatttagatagtttagctgcagaccgtatggagacttttgggattttctccatccagtgtctaatatctgaaagtgcagaataactatcaagaatatgtgaagctgaaggcacgagttgaggttttacagcactcacaaaggaatcttcttggtgaagatctggccctacttagcccaagtgaacttgaccagcttgagaatcaagtagacaagaccttgaagcaaataagatcaagaaaggtaaagtaagagaaggtattcagccattcaggatgaatgaggtcaatggtattttgtgcacaacagaactatagcgaacaataattcatgccatggcactttcctagtttatatctcgaccaataatccatgatattgcaattgtaaatgcattgattatttattcaataaattactagattaatctcacttgaaaagacagggtgccgtggttacgttgatttgtgctactttcgttttagttgaaatttggaaacgtagaaataaaaaaaatcgaggtgtatacaatttaggaggcatttaactggtatttaaaacttagattgtgctgcaatttaccattcttgtaatttagtattaaaaggctattcctgttttctcctgaaattcggaatgccgcaccatgtttctatccaagtaactcctttatgcatgtcttcatttgggtttggcagactcaagtgttacttgatgaactttgtgacttaaagagaaaggtaatatcactgcagaaatgttactatgactctctgtttcaatacagaaaatcagaaatccaataatatatgcctgagcatccggcctcatctcttgcaggaacaaatgctgcaagatgcaaacagggttctgaaaaggaagctgggcgagtttgaggcagaggcggcttctcccccgcagttagcgtggcaaggcgaaggcggcatgttgtcccatgaccctccacagccagaacacttcttccaggctctggagagcaacccatgtctgcaacctacataccatacgatggacatgaaccagcagccagtgccagcgccgggcggctgctatcctgcatggatgtcttagccagtgcttcattccattgccttgagaagtgtcctgaccttcacagatccctacgagctttattactgcttttgcctgcccctttgctgcttgcggtgcttactgaactgtccaaatgaccacatggtcatatataggttattgctgtctttatcttatgttgatcacggcctgctcagctgctttagcgccatgcaaaatggcttgggcgatgcacgcttgaatgggtcgaactgcttatgttttgggagtataaatcacttagcaataagcattggcatgtcctctgtctcaaatacaagtacactttactgttactaactagatactactaattctcaccaaat

SEQ ID NO: 23484 - DNA, 263 bp, Zea Mays
caggaacgtctcacccgtcttgcagacattacagaacatcggagataaagaaatgtggaagcagttatataaacttacatttatttcaaaagcaagcttgagttattttattacagcccagaccaaaggtgagtgcagagtagtaatattatacaaaccaagggaggcacaaactcctcccgataagtttaataaacaaaagatcctaagtggaggaccgagtcctcccgcacttcagtcttgtttttcctcgtttggtacca

SEQ ID NO: 23485 - DNA, 2188 bp, Zea Mays
gctactccctccgtcccaaaatgtttggtggttcaagctgacaatggttcatatctgtgttatcctctggggtatgaaaatggatatgcttcttatattccggttgttcctggaggcattgccagtgtggatggtcagtatgtcagcaaagaaccatattactccagtgcacttccaattcaggatcctagcacacctggcatttttgctcagccaattgcatatggaactgaactagtacctgcctactcatgggacccttttgttcttctggatggggttcagggacatccagttggtgtgcatcatacaaattatgctccaagaccaaaatattcttctaataagcatgttgttccttctttgaaagcttcccacagtgcaaaatccacagcagatactgtcaaaggatcatcatcagctctagaaactgtaccaaatgctgccaatagcagcacatcatcaaagggtgcaaataaggcacctggtgcttccataacaaaaggatatcttccatctagcaagtttgtgatgcacagtaataaccaagcaaaaagcagtgtttatcaaagcaaaggcatcaatctgaaagaaagtggtagaagctggcacagcagtgagaagcttaaagcgagaagtaagctaaatggacatggcgattctgaatctaatgagaacaaccacactgataactcgaaatatagtttgagctctcaatctgatgttgttggattgtcaagtgtaggggatgctaacgccagcataccttcacctgtcgtaataagaaaaactgcatacaatctttcagattttgttacaaagtatgagcaagctctattctttgtaattaagtcctacagtgaagatgatattcacaagagtattaagtacaatgtttgggcaagtactcctaatggaaataaaaggcttgacaatgcctataggcttgcacaggaaaggatggcagaaaaaggaaccaaatgtcctgttttccttttcttctcagttaatgcaagtggtcagttctgtggcgtggctgagatggttggcccagtagatttcaacaggaacatgaacttctggcaacaggacaagtggaatggtttcttctctgtaaaatggcacattattaaggatgttcccaatccacaatttcgccatataattttggagaataatgagaataaacctgtgacaaacagcagggacacgcaagaggtcaaattttcacaaggtacagagatgttgaacattttcaagaacttcacgtgtaaagcatcaatactggatgactttgacttctacgaaaatcggcagaaagtaatgcaggatagaagaggcaagccacttacatcgtttggtcacccattgccaaaagctgaaaaaactgcagaagttaaaaggcaaacacaattgataagtgccacggaagttggtagagccgatacaaccaaggaaaatgaggagaagagcagcagtgttccagaaatactcaacgcagcatgtagtaacaaggagaaacccaacaaaatcgcaacagacggatgatgccttggctagttgactgggaaaatgagatagcttctggaacggacttcaacttgaattcctgaaatcataagttcgatgtgcgcaatgtcaagaaaccacaattggtcatgggttctcttgcattttctcatggaagtgaagaaacgaaaaaagtgaagcaacggaactgtcttcccacgagaaatgttcaatgactgggaaaaaggttctaggacgcatttaggttgaggcccctggtgctaaggcattagagcgccctccttgtctgtttttcccccatattggagggtcgtttcttttcttttgtcgtgcccctttttcccctcttcttttgcctattattctgcagctgagattttgggaagcagtttgcacttaggtccaaagaaagggaatgtctgttgctttgtgggttgtcctctaggatgtggtaggtgttgactgttttttagaatctgtgcacgttctagaaactgacagaaaaaaagagaaaaaaggattgtgagggattagaaataaaaaggatcttaaaaagatacatggtatcttatgtttactgcttcttccattatcaagaaaactaacaatgggtctagatgctttcaatagtaagactatatttatataaagttcaatt

SEQ ID NO: 23486 - DNA, 711 bp, Zea Mays
ccactaggcacatgcatgaggttcctaatttcatgcagatccaaaaattatgacaggtcgtgagagtatccattgcatgcgcacaattttgaacgacattttcgttcctacagcatacacacaaaaactggatggctggtatcacacaaagcataaatcattatagaaaattgcataaatatatacaacgtacatcataatcataattaataaagaaggctcaaccaacagccgcatgcataaacaaaggattgcaggtcatcaccggaggacgtcaccgaggccaccagatcggaagagttcgtaaacgaaggatgcccaaaccgtcgtgtagaccgccaaccctcgcagctcgcgtctcgcgtcaccgatgtcgccgctggagccacccgtgcctagcgtggcaaccatcgctagagacggacgcgcctcatggggtgccaccgttgctcggtcgtcagggtcaccaccgctcgcccgcctcgggccccatcatcgattgccctacgtattagggagctgccggcaccacgcctccgatttgggaaccaccgccgccgcacctccaaatcgggtgtaacaccccaaaattttattttgggcacttttcaagataatacaaacatcttgaaacaaaatatctttaataggattttcctcactttgtaagccacgtctcctgaaataaatataactcatagtaaaggatca

SEQ ID NO: 23487 - DNA, 2212 bp, Zea Mays
gcgcccatcactcgcgtccctctcttttcctcttctccattccgtcgcgtactcgcgtgcacagaaattccttcctctgcctccctgttcagctctccttttcccttcctcctcctgtaattctgttcgtgtgcgtgtaatttccgtgcaaatacacgcacgccgattttcgaaagcaaaaaaaaaaaaaggcgacggcaaggaatcccccgattaggaaagattctccgctccccgccttcaaatcccccaccggccaccacgacccgcctggattcgcctacgctctgtgctgccgaggtcgggattggtgctggaattcggtgcgccgagttgttccttgctcgattagacttccggttcggttcgcttcgttccaatcggggtttgctgcttccgccgccaccggtgcgctccgagctgctcaagctgggcgccggataccctctcgggctgcccgatctgattcagtccccaacaccacccccgctccgccgctgtggctgccgctcccctccccgctgactccggcgccatttcgacccgcgcggccggatccttggatggttccgatcgatccgggaccaagagacccaaggcttcgtcacctcacccgggccccggcgccggtggatccatggccggggagaaggcgccgcgcgcgttctccatcgaggagctcccgggccacctcatcggggaggtcctgacctcgggtgggctcgctgccgccgacctcgcgaggctcgaggccacctgccgcgcgctcaggccgctcgccgagtacgccgcgtccaagctctgcgccgcgcgggcggcgttcgctgccatggggccagccgcccggggtgagctgctggagaggtgcgggggaagctggaagagggtgctcaggttcctgcagtccgtagagcagtcgtcaggcaccgtcgagacctcatcgggcagcatgcaagtagccacaggaagatatcacacacttttggtccatgactcttctgtctattcttgtggatccagcttgtgtggtgtgttaggtcatggcccagatactacacaatgtgcagcattcagtcgggtttccttcccatcactttcccgtgttataaacatctctgcttcacacaaccatgctgcttttgttacggagtctggggaggttttcacctgtggtgataattcatcattatgctgtggtcatggcgaagtggggagaactatatttcgaccaatgcaagtagaagcgcttaaagggattccctgcaagcaggttgctactggtctaagttttactgtgattcttacaagggatggacaagtatatacttgtggaagcaatacacatggccaacttggtcacggtgacaccatagacagggccactccaaagcttatagaattgtttgaaggccccactcaggtggtgcagattgcagccggcgcaagctacacttttgctgtaacagatgatgggactgttcattcgtttgggtcttgcactaatttctgccttggacatggggatcagcatgacgaacttcttcctcgtgcaatccaatcatttaagaggaggaacattcatgtagtccgtgtttctgctggagatgagcatgctgtggctcttgatgcactaggacacgtttatacttggggcagaggatactgtggagccttaggtcatggtgatgagaacgataaaactagcccagaattgatcggcagcttgaagggccaagttgctgtgcaggtatgtgcaaggaagaggaagacgtttgtcctcacggacgagggctcagttgttgcgtttggatggatgggttttgggagtctagggtttcttgaccgaggaacatcagacaaagtaatgaggccccgcgttcttgagagcctgcaggatcactacgtctcccaaataagcaccggactgtatcacactgtcgcagtgacaaataagggcattgtattcgggttcggggacaacgagcgagcacaacttgggcaggagtacattcgtgggtgcttaaaacctaccgagataatgttccaaaagagtatcgaagacataccaattgcggcgcctagtggttgacctcaaggccaagaggccaagaccaccattttggacactgttgcctgcatatatgttgtacttatattgaaattcttctcgccatggcatttgaggtacagttgtcagagaaggacgtgtgcg

SEQ ID NO: 23488 - DNA, 2606 bp, Zea Mays
  misc_feature (1)..(1): n is a, c, g, or t
ntgctgtcgattaccctccgccgaatcggagctagctcttgtttgccgcggaacggtttgtttccggtactagagctgcgtgccttttgtatcccaaaagcggcgatttagatatgagataattggatttttgccactcacaatgttgtcttcttgttataattatctgagtttcacaaaggggctaattagtctagaactgtggctgacgggcatatgacgtgacatgcccacaggcgtgcatagtgaattgctcgtcacgaccgatctatttgtgttactctgtcgtggaattctgtagatcgtgaagtatgcgcagatgtgtgcatgtgattgtgaagtgaagtcgtttcttgtaaaaggttcggaactgaaaaccaggagaaactattgcaacatccaactcttatttctttcttgcttattattgactgcacaatttagatgattggactttattactgaaagttgtcaaggacctccttacagaaagttgtcaaggacatccttacagaaagttgtcaatgaccttcttacagaaagttgtcaatgaccttacagaaagttgttagatactgtcgaaaatttatttaccgtgagaaacattatggtctacctggccttccttcaggatgatgcatcatgtcatggcgaggaaacacagagtctattggaagcaaatctagggtcacagctgaaaagtaaatgctctgattggagagcaccggcactcatcctgggattggaatgcttggagagcatggctttcaatggcattgccacaaacctagttgtgtatctccgttcagttctccatgggggtattgcttccagtgcagcaactgtatctctttggtatgggacaagcttctttgtgccaattcttggagccgccatagcagatacttgcttgggaaattataagaccatcttgatctcccttatcatgtacctatttggaatagtactaattacagttgcaacgttcatgccttctacttcagtcttgtgcgacgtcagttcatgcttgtcatcaaatggaactcaaaccgtgattttctttgctggtttgtatctcactgctgttggatgtggaggagtaagatctgcattgcttccgtttggtgctaaccagttcaacaacgagaacagtctagacataaaaaagagaagaaatttcttcagcttgttctatatatgtgtcatctttggtgtgattacttctgggacaatcatagtttgggttcaggaaaatgttagctgggctattggatatggagtcgccactacatgcataggtcttgctttgataggatttctggtgggaacaccaatattccaagaagatgagccttgtggttctccagtgaagagtattttccaggttattgttgcctcttttaggaacatgagcttggaagtacctgctgatagctgtcttctgtatgaggtcgggagcaaccacatacaaaggacaaaacttgctcactctgatgattttaggttcttagataaggcggcagttatttctgatccaagcctggtgtatggaggctgtcgaagctcatggagcatatgtacagttactgaagttgaggaactgaaagtacttatccgcttgctcccaatatgggtgactggaatattctttggtgctgcgatctcgcaaatgcacaccacttttattcagcagggaactgtgatggacaccaagatcggttccctgtccattccaccagcatccttatactcatttgaagtgatatgtgtcacgctttgggtacttgctgtcaacaaagtgcttgtgccggcaatccgaacgtattttgcaaatggggtagagctcacacagttacagaggattgggatcggtcgtttcctgatgatctttgccatggcaatggcagcacttctagaaaccaagaggctgcatattgttcaggagggggaactgctaagcattgtatggcagcttccacagtacttcgtcattgctggggctgagtgcttcggtatcatcactcagctggagttctttcgtggccaggcgccagactccatgaagagcattttaacggcatttgcattgctcaccactgcccttgggaattacttgagctcagctatcatcaccctcatcgcaggggtgaccagggtatggcatagccctggttggataccagatgatctgaacaaaggacaccttgactactactactggtgtcttactaccctctcattggtgaattttgttgtgtatctgtattttgctagtaaatacaaattgaagaaagttgtttgttaatactaccaaacactaatgaaatatctttacgtgtaacatgaaatataacgtttcaaatgtttatgtttattaatataaggtttcaaatgtttatgtttattaatataacgtttcaaatgtttatgtttattctctatatgtatagcagtataggaacatggaagccttaggctatcttagtagatcctctatctcatcttctatttcaaatttcactctctgcaaacaatgtcagtttcgtgtcccctattttatatgatccgctcaaaacagttttatgttccagaatactgccccttct

SEQ ID NO: 23489 - DNA, 7546 bp, Zea Mays
cgcagcctccccgcccatcgacgccatcgccgtcaccctccatctcaccacgcctagctagggcagccctcccccttcccgtacaccgacccgacaccaccaaccttcccatcccctcccccacacccccgccgccgcctcctcgtcggccggcggcgagggcgcgacgcctcatacccgcctcttccggtcctccggggggcccgccccgcgcgtgagagccccctcgcaacgggcttcgcctacgagctcgtgggttagggtttcatgcgcctcgccggccgccgatgtcgcaccccggaaagtttgtctccgtcaacctcaaccgatcctacggccagtccgctccctcatcacaccatggcggcggcggccgtccctcccgccctgccggcgccggttcctcagccggcggcggtatggtggtgctctctcgtccgcgcggagcctcctcccttgccaagccgcaagcgcccaagctctccgtcccgccgcctctcaatctaccgtcgctccgcaaggagcacgagagatttgacggctcggcggccgctgcggggggcggggtcgcctcggccccgcctcgatccggcgggcctgctgctggctggaccaagcccgcctcggcgtccgagaagcctcccggctccgcagcgcttcctggcggcgtccccaggccaccgtcatatgggtttgcggagaaagccggcgtcttgcgtggggaggacttcccgtccttgaaagcagctgttgccccgccaacacccccgcagcctgcgcagcggcagaaggatgctgatggggtccgggtcgtcacgccagaggcgcgaccaggatctcttgggatgcggccacaggtgacaacctcgcggaccactgagacgctggcctctggtgtcagcttgggacctggtggccgcacttccgctgagagggtgcagaagcctgatctggggccgcttccgatggtccggcttaggtatgattctgactgggctgatgacgagcgtgacacagggctgagccttccagagcgggacagcagggagaggggatttggcaggactgaggccatgcttccagggcgcgacctttatgtatcgatgagggatcccttcaaaaaggagatgtttgggagagatgtggctgcaacaaataaagaaggtgggcaggacaggctgtggcgatctcccgtgtcaaaccaacacgacagggagcgaacagatggtcgaccttacagtggtggcagaggaagcagtgggcaatcataccgagaaaacatagctgccagtggatccaaggatgtgtggagtaatggtaaggagcctcctatgagtgcctatggacagaatggggtggaagctgctagcgagcgttacggcgacagttcaaataattggcctaggttgaattctttccagaataatgttggttccaaagtgcagccctttggtggtaataaagggcctttaaataatgatccagtggcaaaatttggcagggagaagcggctgactggttcccctgcaaagcctttaatagatgatagtggttttgacagcatttctgccgttaacttgactgcaataaagaagaaaaaagaagcagctaaaccagctgattttcatgacccagcaagggagtcgtttgaggcagagcttgataggatcttgagggtacaggagcaggagagacaacgggtaatggaagaacaggaaagggccagagaagttgctcggaagcaagaagaggaacaggagaggatgatacgagaagaggaggagaggcaacggctggcggaggagcaggcaaagcaggcagcttggcaagctgagcaagagaggctagaagctgctagaagggctgaagagcagagaatcgcaagggaagaggaaagaaagaggatcgctatggaggaggagcggcgcagggaggcagcacatcagaagctcttagaattggaggcaagaattgctaaaagggaagcaaaaacaaacattgacagcacaagagctgtcaatgatgaatttattcctggagatgtcaaggacagagacctgtcacactctgctaactttggtgacagaaaggatattgacaaaatgaatgagcgcatcaatacctcaacaccattggaatcctctagtattaacaggttcagtgagacagttccaagggtgcgcactcttacagatggacgcccttcatttattgatagagaaactgcacactatagttcaaggcctgcatttccagaacaagagaatgtgcatcataggccacagcatgacccttttgcttcaaagaggggaaatttccccaagaaggatcttaatgatggatttgggagtgtttcggttaggcaatcttcaacaggccgaacaactgattcttcatgggcacttgaagatttccatcatgaaaaggttccacgatgggatgcgcctagggagattgaccgtttcagcaaacaatctgaatttgataatgagttttttaacagcgacaggtttggagatacagcttggctgcctagtagttctcatggaagcctcaatgctcaacaaggagataggatgtttcagagtcctgatgttaatgaattgtcttcttttaccagaccacgctactctatgaggcaaccacgtgttcccccacccccaattgtgacctctgtgcacagaagttcaattggtgcttcagcacaacgtttcaattcatcttttgtggatggtgggaacagagagtgttctggtagagatgatgtgcagattatgcagggtcagtacggaagtgtataccaagaggcatctcgccagcatgggatacgatctgaccacatttctgtcaatgagcaacaaattgtggacagaaaaagccctgtattgggttcacaatcttctctttctgtttcaagccctcctagctcacctccacatgtttcacatgatgagatggacgtatctggtgattctcctgtgttaccgacttctgctgatggtgaacatacggcgctctctgacaaccatcatgcagctctgactgtagatgcagacaatacaagcagaattgctgcctcaggagtgccccacttggaggaggatgaatggtcaagtgtaaacaatgatgataggcgaaaacaggatgaatatgatgaagacaatgatagctaccaggaagatgaaatgaatgaagctgatgatgagaacatagacttggatgatgagttcttagaggggcaggatacacccgtagaactggaaccagttatacttgggtttgatgagggcgtgcaggttgaaattccaccgaatagtcaacttgaattagcttctgtgaggagcacggaaaggacagttggagtacatctaaactcaggagttgcagagcaagagaatgtcagtggttcagttgtccattctgatcctgttactgaagcagagaaagcactgcaggcattgactcttgatggtgtaaatggcctgacagaagacagtaatggggagccatccaatagctcaaggacacctgcttcaagttcccagttacctcaggcatcttctgtgggtcctattttttcgtcagcttcaacagtagttgggcagaatgaagtacctgtcagcctccagtttggtttgtttacaggtcctcctctaataccaactccggttccagccattcaaattggttccatacagatgccaatccatctccacaatcagtttaacccatccctgcctcatatgcacccttcaacaacccctttgtatcaatttggccagttgaggtatgtacgtcctatcgctccgagtgttcgatcgctgccttctcaggccacccgccctgcacattcttccatatcagctcaacatacattgaatcagaatgtgtccagtgttctacctgagctaatggatggaggtacaaaccagaacatcccagctcaggcaagctcatccacctttatcaacaaatcagcagcacctacaaccaaggttccccttggcatggacaattcaaattcccagtatctcaatgctcctgcaaacaatcagatggctggtgtggacggatttagtagtcaagtggacagagagtttgctgagggtacaactccaagtgggaggaatcaaggtctctctttgaagaggaattacaggcctacgtccaacaatgtagaatcttctcaatatggtttggaggggagagccatgggtgatccaaaggctcttggtgttgtctctgatagaagggggaggagatatggatatgctgttaaagacattaacatgagatctactggctcaattgttgagccttctcataaggattccaaaggaggattccagagaagggctcgtaggaatgtaagacgaactgagtttagagttcgggaaaacatcgagaagaatcaaaatgaaacttctgaatcattttgccatggtgaacaagatgagataacaagctccaatggaacaagagatattccagcgagaaatactaatagaagggaacttgatatgagcaaggcatctaggataaatggagcaagtgatcagagtctctcgtttagaagtacacacaatgtcccttatgagagatctcatggtgggaacaagaagtctagaacgggtgctgttcctgatggagatactacctcattgcaagctggagctgtccgtgttgtgaagcagcaaggcattgaggtccctgttgatgcagatggcttcattgaagtaagatccaaaaggcagatcatgagtgtcaggagagagcagagggagaaagaaaacagatccaaaataaggatggcaaaggctccccgcaaacagcatagtatttccctacaaagctcagttggtcctagtgtgaataagcgagcagctccttctagtggagaagttacaaagaaagtttcttctggttccgccatcacagtagaaggaagaattgttgactatgctgaatcttcaattccattgatgggtgatacagcctccatgaacctcatagggccaccctcaaccaatgcagaaactcatacaaactgctttgccaatcagcctatccagatccaggcatcctctgacttggtcacctcgagtcctgcaaagcttgtgagtggcttatctgatggcgacaataaagggccatctattagtactccatttaacatggtttcctgggataattcacaaataaaccaacaggtcatgccattaactcaaactcaacttgaagaagctatgggaccagctaaatttgaacagcaggctgggcctggcttttcgttggagtccaacaatgctttgtctcccacagtaatcacagaaaaggtgttgccttcatctgctagtcctattaactcccttctggctggagagaagattcaatttgtaacgtcaccaaccatgctacccccagtcagccgaactgtttcaagtggtcttggagctccaggttcatctaggcctgatatgaagatcgatcgaggcttgcctagcgataacagtggtcctgataaggcaaattccaaggaattatgtccgagtaccgaggatgcggaagcagaggctgaagcagctgcttctgctgtggctgtggcagctattagcactgatgagggatctccagctgatgcaactactgcatcggctccagacaagagctttacaagcaaggatctcagtgggttaacatcaggaggggcaagaacaggtcaagctggtcaatcatccacagaagagccactcgcagttgctcttcctgcagacttatcggttgatactccatccatgtccttgtggcctcctatagccagtccacaagcatcagggccaatgctttctcagtttcatggtgcacagccatcccacttttcctgctttgatatgaactcgatgttaggagggcacatttttgcatttggcccaagtgacgaatctgctggttctcaaggtcagcaccctcaaagaagcaatgcattgccttcagcaccattgggagcttggccacagtgtcattctggggtagactctttctaccgccctccaactgggtacgctggtcctttcatcactccgggaggaatcccaggcgtgcaagcccccccacatatggtggtctataaccacttcgccccagtaggtcaatttggtcagatgggacttggttttatgggagccacttatatccctggtgacaagcagcctgactggaagcaaagtcaagggccacctattgttggtgtaagccagagtgatccaaacagccaaaatatggtgtctggtcaagtaaacgctcctagtgttcctgctccagttccacatctacgcccaacttctatcatgccaatcccgtctccattgaccatgttcgacattgctcctttccagacatctacagacatacagatgcaaacgtgctggccacatatgcctgtacctcctctacactcagttccattatcagttgcacttaagcagcatccagtagagggtacagccacacaacagtttgttcataacgtgccaatagacaagtctggtacaaataaccgatttcaggagtcctctgcttctgctgggccatcagacggcaacaaaaccttcccaaatgcagccgtttctcagtacagggatgagttaggtcttgtcgaacagccagcctcaaccagctcaagctcccaaactgttcagccttcgtttggccaggcgggcttgatcagcaatgaagtcccaaccagtgccaaagccatggttagggtgaccccatccaaagtcaaccctggaattgcagcaggggcggctggcagcacgaacgccccccaggtcaccagcataccttccaagacccatcagtcctcgtcatcatcatcagacccgcaataccagcatctggttaacaatcaggatcgccgtgcccgtgcgactcagaaggctggtactggtaacgagtggcagcgacgatcagggtaccagggtaggaatcaaggttctggttccgacaggagttcaggcactggtaggatgaagcagatctacgttgcgaagccctctgcaacaagtggccatgcctcgtcaggctagagagtggtggtgctgacttcactgagcctgctccacgctggtacacagctcagagcatccttggcatcagacacatgtgaaacatattttcgctccatgtctgtctattctggtttgttttggtgattgtggcatggtgctggttgtgtatgtttttggttcattttgttgcatagaagaaaatagagtgtgctgttgcactgcaaaaagacattcgaagcgataccatatcatgcatgataaattttgcagccgatggaatcggctgcccgtgtaagtcactggtgtgatgtaaggattactattgtttattgttactatttgttggctggctcaacgtctggacaggcgaggaaatgtaacgtgggggggtatgttaataaatgcctcatatgctactttgtcggaacacatgcatccctatcctgttttctcaatttatgttagtactgcaaaat

SEQ ID NO: 23490 - DNA, 1402 bp, Zea Mays
gttacaaattcatgccaatttattgatgtatagacgacgtaatggacaaatccttgtaatagctatgcttccttttattagagctgttactgtacttgtagtggtatatcatccgcttcacctccaccaaatatccgattaagtaccaacgccaatctgattccagcctgcgctaacctcttctccacaatcgggtacctactgaaaaaataatcatctgcgcccagatgatgtcttgctccacatctttgtaggcgtagttgcaggaataatggatgctctcaatcgcatagctgcaagtcgtatggccaaggtcatataatgtcagttctgcatgacagtagtaacacatgaacgaaatggaagcttctagatcgaacgcgagtcctactcgttcgcgcaggtcgcgtgtttgttcttgcaattttcccagtggacgatgtcgtcagaccatccatcctacagattcatcttgagagcctctaccatggtatccatgctcttgttgtagaagtccttgatcgccgtatcaataatgctgacatcccacacctagcaaaaacacaggattctgactctcagagactcagacgggctatacctggtgagtacacatctgaaatctggcatcgaagaggtgcagcaggcacagacgtgatggaggtttgctttcctccggtaccagtggacggtgatggtgttaccgccctcgtcatcttggaagcctacgtgcagcggctggtggacgtcgccgacgaagtgtgccaggaacatcaggctctccgtcaggttatctggttgcgcacgtctgtagagctggtccgtgtagttgttgatagccccgacgacgcacatcccttgctggccacgagaattgtggcagtcccctgaaaggaacatcaatttggcagctaacgtgttagttctaaattcttgacgctggtacagagtctcacacgccttcagtaaccaaaagagtacacttcccggttggctctcctctcctcaacgtctctctcagtctgtcactgtatctgtatggcgagttttttttttttttgtacgtctctttgatttgccacatgaatgctacgttacctcaaggctcaagtaacagtggactgtttgctaaagcaagcgatccaatcttcttttattcacccagtcagattttactggtaatttagcatcacatctaagtatctaacacatctgactctaagagtgtgtttagttgcaataatagaacgaaaactgtatgagactattccttaaataagactatttggttaagggtcatggattaaaacaggaccgttccttagatatccgtcagaattagacaaacgacaggaacgagaggggatactagaggtccccgctgttccgcaatcaaacgcac

SEQ ID NO: 23491 - DNA, 1185 bp, Zea Mays
cgcgtcaacgaaggaaatcccgatgccgctgcccgctgtcgcgagatgcttcggctttccacatttgtcatgtacccgcggtaacgcagtaacggcgtagggcgtaacgtcccctcccccgtgaacggtgtacccgaccctcttcgccggccgtcgcctatccaaatccgtcacggacgcttccacgcgaccaagcagccacgcggcgctggtctggccggccatgtcctgcctcgcggcgccgccggctgcaccgccaaaggcgggggagcgcatgctccgcgccgccgctcctttgcgctcgccttcgccgtgccggggcctgcattacgcggtgcgggggactggagggcgagaagccgggtgcggccggcggcagctggcgctgctgcggtgctccccagctggcgagtccagggcgtccggggacggcggcctttccagcttctgtataattgaaggtccagagacgatcgaggactttgctcaaatgcaatcgcaggagattgaagacaacatcatgagccgacgcaacaaaattttccttctgatggaagaggttagacggttgcgagtgcagcagcgtatccgaacttctgaaagcaaagatgccaacactgaaggaaatgaaatgcctgagattccatcaactattccatttatgcctgatgcgtcaccaaagactatgaagcaactctatatgacatcgttctctgtcatatctgggataatcatttttggaggcttgatagccccagtacttgaactgaaactagggctgggtggcacatcttatgaagattttataaggaccttgcacttacctcttcaattgagtcaggtagatcctatagtggcatcattttcaggtggcgcagttggtgttatctcagctttaatgttggtcgaagtgagaaatgtcaggcagcaagagaagaaaagatgcacatattgccatgggactgggtacttgccatgtgctcgctgttctgctagtgggatgttattgaacacaaagcagttttcattattggggcataatatgtggtcaatgaaaggaaggtgtcagaattgttctggagctggaaaggtgatgtgtccgacgtgcttgtgcacaggaatggcgatggctaccaacaataacgccaccttgatgggcaataggtcaatggttgctgtacaagg

SEQ ID NO: 23492 - DNA, 1269 bp, Zea Mays
aagggaaacgagtgtccttttgacgccgtgctctgctttaaggagcagatttgcgacgctatccaggacgagctacaatcactcgaaggtgttccaccagtctctagaagttgtaaagaggtaaatgagtttgttggtacaaaacaagacccactaataccgataaagaagaagacgcacagatcatgccgtcttttttggtggatcagatcaaaattgtgcatatgcgtgtcatggttctgttgctcctgccattgcttgcccagctgcaaaaggccatgctgcctggattgctcctgctgctcatgcccagatctgtcatgctgcaagcccagctgcaaatcatgcaacaaaccctgctttgggcccaacagctgttcatgttgcgacatatcatgctgcaagccagattgcccatcctgtagttcaaactgcagctcgtgctgcaccggcagtccatcatgctgtaaaccaaactgcaacacctgctgcagaccaaactgtagctcgtgctgcgatccgtcatgctgcaaaccgaactgcagctgcttcaagaccctctcgtgctgcaaattccagtgcagcccaaactgctgcacctgcagcctcccgagttgctccggctgcaacccctgcggcagttgcaagaaatgctggtcatgccccagcgactgcaagccaagctgtggctgtttcagcgcgcaatgttgcagctgcgcgggatgctgctcgtgctcaagctgtttcagttgcttcggttgtttcaagtccttcaagtgctccaacctgtttgggtgctgctcctgcaagcagtgcttcaagtgccagtcctcgtgctgcaagggggcgtcgtcctgctgcaaatgccagtcgtcgtgctgtgagggtgaagacggcagcagctgctgccggaggccatgctgcacttttccgaagccagcttgctctgggtgttcgtgcgggtgcgcttggtcctgcagaaagtgtacagaatggtgtcgatgttccgggtgccgcaatccgtgctgtgccactggatgcttgtgttgactgttgaggttgaactagacgtttccttggttgttatttttttgcgtctgccgtttagatgaccgttagtttcgttcgtgctttgatatatggtgtggcgtccttgtctgtaaagaaatcccatatcactagaagaaattgaagcgtcaatagtcatcaactgctataaaattcagatgccttttaagaacgaggctaataagagcaagtagagatggc

SEQ ID NO: 23493 - DNA, 5903 bp, Zea Mays
gctgagtatccagtttaaagttcagagttgaaactcacagcaccaagcaaaaaggaagcagatcaagggtagccgagcgagcagaggttgtcaattacgtgccttaatatgagtcattggaagcagccgtcgaaactcgccatgcttgtagtactgctgctgctgctatgtcatgcagtggacaaagtccattgctcgacgcaccataacaacagccaagattttcattccctgcttgagtttcacaagggcatcaccagtgatccgaacgaagccttgagcaattggaaccccagcatccacttctgccattggcatggtgtgaactgcagtttcactcgaccatatcgagtcacggagctcaatctcaccggccaaaacttggctggccaaatcagctcctctcttggaaacctgaccttccttcatacccttgatcttagctacaatagcttcagtggccccctacctcttcttaacaagctccgaaacctggacgtactctttctgggaagcaaccatttgggggatgttattcccgattggcttacaaactcttccaacttagttgatctagatctctctgaaaacaatctcaccggccatattccttcaaacataggcttcctaacgaagctagaaggtatagccctttacaataataatctcaccggtgtcatcccaccaaccttgggaaacatctccacactagaggtagttgatttttcagcgaatcaactaagcggaagcattcctaataaagtttggcaaatctcaaacataacaatgttaaatctaggacaaaataacctatcaggtggaatcccagatactctctctaacttctcttctcttacagcattaggcttgaacaacaataagctaggcagcgcattgccatcaaacattggcgatgtgttccgtcatctaaatgaactatacttagataacaacatttttgtgggtacaattccaacttccctaggtaatccttcgagtctagaagccctagacctatcaaacaatcatttcagtggcaaaatcccaagttcttttggaagactttcaaagttacagattttaaaccttgagctaaacatgcttgaagcaagggatagtgaaggctggcaattctttgatgccctggcaaactgtagttccctgaatatactttcagtgtctcaaaatcttctacatggacctataccaaattcgatttcaaatctgtccaccactcttcaatacctaatgatggcttcgaacaacctatcaggaaccgttcccccaactattggaaaatttagtggcttgattaaattatcacttgcaaacaacaaccttacaggtaccattgaggaatgggtcggaaacatgacaaaactacaaatcttaggactacaatcgaacaactttgcaggggaaattcctccttcaattggcaatcttacacagttgatacacttctctatagccaggaacaatttcttcggctctgtacccatctaacttgtgcaatcttaaattaatgtcgtggttggaccttagccataacaatttccaagggagcatacctgttcagtttggtaactcagaactcatgtcgctaaatctttcatcaaacaaattcagcggcgaaattcctgaaactttaggacatatcgaacaattaacggtcattcaaatggaccaaaacaatcttactggaaacatccgtccacattgaggaatctatacagcttgagcttgctcaccccataacaatttatccggcctaatgccaacttttctaagtggtctaaatctcagtaaactagatctatcctacaatagtttccaaggagtaatacctacaaccggtctattcgataattctacagttgtttcgctagatgggaatccgagattatgtggaggagccatggatttgcatatgcctccatgccatgttgcttcaagaagagcacgcagagcaagcttattgattgaaatattgatcccaatatttgggttcatgtcactcgtattgctggtgcacattttactcctagagaagaggcagtcaagaagactatggatcgaagcaatcatttgaggaagatatggttcggtgtaccgagggaagctgaaggaaatggaagtggcagtaaaggtttttgacctggagatgagaggagcagaaagaagcttcttgtcagagtgtgaagcattgagaagcattcaacaccggaatcttatccccatcataactgcttgctcaatagtaggtactttcaaagctttaatttttgagttcatgtctaatggcaacctggacacatggctacgtcacaaaggagacgaggaggctacaaggtgtcttggcttaactcaaagaataaacatagttgttaatatagctgatgcattggattatttgcaccatggttgtgggcggccaactgttcactgtgacttgaaacccagcaatatacttctagatgatgacatgaatgctctcttgggagattttggaattgcaagtttctattatgattttgagacaaaatggacatgttcaagtagttcaattggtataaagggaacaattggatatattcctccagaatacggagtaggtggccatgcatcaacatgtggggatgtttatagttttgggattgtgttgttggagattttgacgagtaaaaggccaacagaccctatgttcgaagatggcttaaacatcatcaactttgtggagaacaactttccgaatcaaatatttcaagtcattgacgctcacctcctggaagaatgcaggaactcaactcaaggaaataatttggtacaagaaaatgaaatctatcagtgcttggttgatctgctgcaattagcactttcatgcatttgcccattaccatctgaacgattgaacatgaagcaagtagccagcagaatgcatgaaataaaaaaacatcacatattaggtggaagcacaagtaataatagcaagggcgacagatccagaatataaatcttcctatggtgaagctcccaaaatttgaattaaggccctatgtgggagggttatacttcaaaaaatgtagtttcggttttccagcttcaccatgaaacaacttaatagattagtaaggcgtggttcaagtgtgtttggcttgcacatagactccagcttctataatacaattaatttttgtaagtttacttaattacccttaatgattagcgagtggagaaagagacacaaatcggtagttcttataaatcaatggcgtattggataattttggtgcaacttcagagaagtataaaaatagtgtttttgaaacaacctttgaaaagcttcgaaaattttatgaaactagcctctagttttagttttttaaagctagagctagctgagctgggcctgtttggatagaagctgaaataggcttgaaattcttgaagtgaagctctcccaaatagggtctatatataatatgagcataatgaatatttggcatatgcaaagagctagggcctacaaagcttgtatctataaataggtcccagttagataaaatcggttagggagcgcttatcacttcaagtcgaaagactataaaatgtacatttcatgataataataattataaggcagacattcacccaagaaacatgtgcttctcatctcacgcatcgtcgccccttgaccaagggtttcctaagataagtcccatgatgccatggctcaatctcttgtagatttcatcaagacaatatgatgttgtcaccttacctagtagatcttggactaatcgttgtggttggcaagatctgctagttatcttgtgtagtatcaatttatttcatgctgagcttaatgttattagattgatcttgcatgaccaaacatgtatctcttgtacaattgctacaatccacaacatgagaatgcaacatgtgtatgtagcaactcgagagtttgatatgcatatggcatcttaccttacattctttagtcacattgtttattctggatgaactttttttgaggtccttatctatgtttgcttgcatgaccatcaatataccgactacaaatgttcctagggtaattggcatgatacataatatagattggatctaggatgttcctatgaatgatttactatttatttggccctagatttggttgatagtgtgtttaatcctggtgtcttcttagcctattgttgcgctcgtggttgtgcatgtttacttttgctttcaatgaatgtttactttcacttatttagttgataccgacctagaaaagctgacaataacctcaaggtagcgtgttaatgtaattagtacatgctgatccacatgatatggcaggaatttgatgttttaatctgttattgtgcatctatagagtaatttaatgactacattacaccctccctacttgatagatcaagccaagtggcatgcttagaacccactaacaacctcttgcaattagaagcagtcggagccacaacaaagagagatgaccacaataccaatgcatctcttgtctccttgtgtgtcgactgtgttgacgataaaccatagttttcccatgatgagacatgtcaggcacacccgatgagacatcgacatcgaccactgcatcagtcaatttacatccgctcagcgacatcggctcatcttcattgacttatctacatcggctcattctcgtcaacatgacccaagcaaggaaggagattcctagctacagcgacgggattaaatgttggctaccaagcaagactaggccaccctagctcgaggagatcaacctagatatgttgtaatgctatgaccaggctctcaagaggctaaccaatgagcttcttgtgtgcttcacgtggactcactccagtggtgacaaactcacccgaaaattattgagatgtaacaaactaacatcatctctagttgtcgataccaccgatagagggtgtttggtatatgtttaccatatttacttcatattcttagaatatactgtaagattatggggaggctacactagcacaaaacaaaattttcgaccccataaaccaagatctactgctgttaggtcatggaattaccacaagacgtgcaggacaacgaaagccatcttgatgtagacgaacacgtcaagcagtgtcgtgcagtcgccagtgtccttcacgacctcgtgtggttttcctagtgctctagatgtagcacctccaaggtatccacatgtataggaaggaagcatcgcgtaccgacctgttaggtttgcgacggaggcttggcgagggcgagatgggcgcgactgctggtttgctggtggtgaattaggttaaccctaagcacgcgccagcccctcattgtatatccattgtagtgggattctcactccgaggcccatcagcaaccctaaaacccagtctaatttcagatccaatccgagttaggcttccttccccttaagtgtgtgaccttgtaggttcacgtacacatagacatgtcctgagtactcatacttcgcccaataattaacaacggcctctagcaagacatgtcaactcctatgcacatgtaaagatcatatcagatgaaccattacaacattacgtacatcatgttccctttgtctcataatatttcgtctggctctaaaatgacctctctttctcgatactatgaattggaagctagcgtcgatgtaactagttacaacgtgctcctcttacccccattgtaagacccaaaattgatagaagaaaaaaatctaataataagataaagaaaaaagtatattggtgatagtattcctagaatttttgaaaaaaaaaccttgggaatttgtcgtccaaacagttgtccatgtaccagtagaagattccatagct

SEQ ID NO: 23494 - DNA, 638 bp, Zea Mays
acacgagctcacgcagtgaaagcaaggcagcatgcatgtcgtcgttgaccacaaaaggtggtgctgatgttctgggcggactggaaccagccaagcaaggccacgtactgggatctggccatcgctaaaaaggatgaggccgtattctgccagctggactttgataagtttaaagatgtcgtagagaagttcagagtgaaggctctgccgacgttcctcctgatcaaggagggcgaggagcagcgcagggtcgtcggtgccaaggtcgaggagctcaacatggcattatcagatatcggataatctaggcagctatagcgctcacattctaacttcatcaaattattctaataaattaataagctggaaataagtcttaaaaatacaaatggctaattaatgcattttcgatttacaaagattgaaattcaagaaaaggtgtattaattatatcatatacaactactacacatgcatgcaagccatggttggattttgttacaaaatattgtgtacaaagtgatcaacccctatctgacagttttctcccaaaggacacaccccttgggagacactgcatccattgtatataagagatcctatttgcaataaagttgacaactgtcattccctctgtt

SEQ ID NO: 23495 - DNA, 1259 bp, Zea Mays
attttatcccaggagaggtcgctgcgggcgagctggctcgctcacccacccttgcccgccgtttacggtttagccgcgtgctctctctgtctccctccctccctgtcggggacaattcggctaccgctgccgccctacgccaggttcccagctcttcgccaggcccttctccggcgacgagcacccaccaggccaccagcgagacatcatgcaaggataggttcagttgattttcctgttaagaagaacgtgaagtcatcccaagtgcaaaacgcgacatgttttgttggtttagtgcggcagttgcagtgcagacggtcagcaaaaagccatatcctgaatgtaaagtctgatacagtagcccaccaaaaggtttctggtgtaagctggagtttggaaaatatgccacgaagaataggatgtgtagtctctggactaggttttgcagcgtatgggctggcgagtgctgagggtcctgttaacaacaacatagatagcactgaatctgccatgtcatcaacaaatttatctcatgggaaagaagttcacacagactattctgttactggcattcctggtgatggaagatgcctgtttcgttctgtggttcacggtgcctacattaggtcaaggaagcccatacctaatgaggatcatcaaagaaggctagctgatgagttgagaacaaaggtcgcagatgaatttatcaagaggcgggcagagactgaatggtttgttgagggggacttcgacacgtacgtatctcagattaggaagccacatgtctggggaggcgagccagagctgttgatggcttcacatgttcttcagatgccaatcaccgtctacatgcacgataaagccgctggtggtctaatagcgatcgcggaatacggccaagagcacgggacggaagctcccgtccaagttctttaccatggctatggccattatgatgcgctgcagataccaggagagggtggtccgaggtcaagactgtaacgttagtggctctgaatctaaatggcaagttccggttcgatactttcttcctttgtacatgtacgtgcatacatacatactagtcactaacgcgcgcctagcgcgcgataggttgtataattttattaaaatgtgtgtatagcatgtattcgtaagagaaaaaaagattaagttatcagaaagtaagtaactatgttgggattcataagaaaacaaaaaaaagtatcttgtcataagaaaacagacatgaattaatt

SEQ ID NO: 23496 - DNA, 450 bp, Zea Mays
agatattaccttgcacaaactaagagtggtccaaggagaaaggaagtctcaactttcctcagttcagggtcttgtgtatctaaaagaattgaggaatgcaagatagtattgttaacaaactgcaactggggaatatcatatattatataacctcaccagacagtctctgtaaggctgtaaatatcttatacaaaacttggatcacaaaaaaaatgaggcagcaacttgcgatacatctgtgttcttcctacaaactaccagcatctgagccaacttacaattgggtgatacaaggtgagggaattaattaccagcaaagaaaactggagtagcaactggaataccctttgtatgtgagtggtaaaaaagagtgtagatatgtggcagtagccggtaccgtcttagtagcgcaaggcgacagacttcctcacactgaaagataaaagttct

SEQ ID NO: 23497 - DNA, 2302 bp, Zea Mays
atccaagttccaagcggccccaaacctgagcgagcagttttcaggcaggaatgaccccggtctcacatgtcagtgagtcacaacagccagatggaaaggcccacgtcatctagtcattggttgtgaaatccccgttctacccctcccgtctctgatctcgataggggagccgggggagcgcgacgacggggagaaaaaacagaggaggaaaaaaacacccaaaaaaccaccttcttttcctgcgttcccctgctcgatccccgacgagaattcgctcccgaacccatcgatctgctctccgcagtccgccgatccgtggatcgatccgtgcgcgggctcggtccgccccgggttccgatctggtcgccgcctcgcctgaggagatgaacggcgccgggggcagccaccaccagcagcagcagaggctccggcagcagcagcagcaggcgctcctgatgcagcaggcgctgcagcagcagcagcagcagcagtaccagtccggcgtcctcgccgccgcggcggcggcggccatgacccagatggaacctgtttccaatggcaaccttccacctgggtttgatccttccacttgtcgcagtgtgtatgttggaaatgtgaaccctaatgtcacggagagccttttgattgaagttttccagagtgctggccttgtggaaagatgcaagctcatacggaaagagaagtcttcctttgggtttgtggactactatgatcgaagatctgctgctctagcaatcatgacccttcatggccgtcacgtatatggacaagcaatcaaggtgaactgggcatatgcaagtacgcagagggaggatacgtcagggcatttccatatttttgttggtgatttaagttctgaagtgaatgatgcaactctttatgcctgtttctcagcatatccttcttgttcgtaagtcctttttgtatcatgatggcatctatgacgagcttaacctgcagcctatgctttcacatgctgacttttaattcaaaattcgcaatatgctatttcaattctatctatttcttgtgctattgaatgacagagtttggacactatgacttctcacttagcttctaccattttttgtttgtctgtagctttttatattttcatttgtattatttatatgcagtgatgctcgagtcatgtgggacaacaaaactggacgctccaggggttatggttttgtctccttccgtaatcaacaggaagctgaaactgctataactgaaatgactggaaaatggcttggaagcagacaaataaggtgcaactgggcaacaaagaacaattcggaagagaaaccagaaactgacaatcataacgcagtcgtactaacaaatggtagctccaacaattcagcaacggatgcaagccaggacgcaggaagtaaagagcccccacagaacaatcctgattgtactactgtatatgttggcaacctcggccatgaggttaaccgggatgagcttcaccgccacttctataacttgggggtcggggcgatcgaggaggtccgtgttcagcaggacaaagggtttggattcgtgagatatagcacccacggggaagcagcactcgctattcagatgtccaatgggtcggtagtccgcgggaaaccaatcaagtgctcatggggtgtcaaaccaactccaccggggacaggctccaagcccctaccccctccagccgcaacgtaccagcccgctgtggcaatgccaggcgtcccgcaaggtttcacgacagcagaactccttgcctaccagaggcagcttgccctgagccaggccgcggccgggcagcagcatgctggtcttgcgggccaggtttctgcagcaggccttcttgctgctgccggttcccaggccctctacgacggctacccgaatcaatcgtcagcgcagcagcttatgtactacaactagtagagctcaagaggaaggaaggcgtctgtagtgttcagcttgtttttgcgcaaacttgggtcatcctcgccctgtttttttttctttattattttgtggttcatgtactatttgtgtgagagctcttgttctctcttctcagccgcgggattgtgttacttactgtcttcttactgtaccattttccttgtctaattctgttgagtaagaggtgtattctatgtgactttgcgattgattaatgtaatgctcccctggggatcggctttggtcgctgggctggttcatgatccggtgttcgggtccgattggacattgaaaggaggtttactggttcatgatctggtggtgt

SEQ ID NO: 23498 - DNA, 899 bp, Zea Mays
gcaaagcagatatttagtgccactcgaattggatagcaagtggcagagcgggccttgtttctctggaacaatgaccatatcgaaaacctaatcaagcaaaactacaaggtgctattacctatcatctatccagcactcgagagaaactccagagatcactggaaccaagctgtccgtagcctgacgctgaatgtccgcaagatcttctctgatcacgattctgcattttttggggagtgcgatcagaggttcagtgacgaggagctcaagcaggaggaatctgattcgaagcgagaagccctatggatgcgcttggaggaaatggccgcctcaaaacctcgcgaaaacagtcccttaggcgcaccgaatggcaaacccagccaagctgctggctagaatagcccaccatatcagccgcagccgtgtaactctgactctgggttgtgattttagctttgggacttttttttgtcgttggtttgcctctggccctgttgtaggtgggtaggatgtgtttggttttgtcaggactgtatgttcaaagtgtacacatacagaggaatttgagagatttggcatgtgtagtaacattactcaggattaccatatagcccaataaacaacgtcgattttgattgcaaatacctagtttgggtggtttatataccgaaatgacaatgagcgatgtgttcttgtttctgctgttatattatgtactcctatatgtaatggcgctggaaactgggacatggctgtccgtacactttggttccttcgtgctgttcgtctaattcagagtctggagcactgcacggttttcttgcgatctgttcttttgttcctttggctgaaacagaacagcattgacgtaacagaacacaagtgattctgcttgtcta

SEQ ID NO: 23499 - DNA, 1011 bp, Zea Mays
tacagtctcgaggtttttttttgacagccttcttagcaagatgcctgggggctgtcttacctcccgtatatcaagtttttttttgcagtccgagccaaatcttcagtatattatagatttgaaattatttctcaaatatcttcatgtataacaatattagacaatacttttgggtgcttcttgaagtatttttattggcttttatactatgaaatatgaatcctaactcataagtcataagacatgaatggcctccctttagttaactgtcaattgtgcttcgtggttaaccttcgctccgtgtttgtaatgcgtttacttggttggcaggttgcatctggtcttctcttctccaaggcacttaatggtctcaacaggttgcatcatcgtgttggaaacagtgtaccaaatggatttctcccttttaggatttctggtctgttctgttattttgggattcggtatttctgaagcaacctccttggaacgctcaaagaaaagccctttagagacccatgaactatcgaatggggtgttccacaatcaattgcctatttcagaacttccaagctgaagaatatatgacctagctacgacgttgtgaatggctgcggttgcacacctcaagctcaatggttcgattctttgcgtgaaggttttaacgagacagaaaacacggatgtttttgacctgccaatgcccaatgtgtctttgtaatcctccattattgttggccacctgcatcctgtacatgtgaacaactcaagtagatgtgtatccgtattccccttgcagatattgcaattgtcacagcatcctgtttaactgcttgggtagtttcgaaaatttgtttttctcacttggagacgcagatggttcaagctgttaacagaagtgcactgattgttctttttcagaggctgaaacctgtatgtaacccgtccatgatatgattaacaagctgactttatctttgacctattcgtgaatgcaatcagcgagtctcctgca

SEQ ID NO: 23500 - DNA, 7234 bp, Zea Mays
tagtcatcgcacgcgtctccgcgagccgacggcccacagcacccgggattaccaccgccgcggcggacgacgacgaagacctcgccctcgctcccctcccctcccctccccccccctcgtgctcgaccacgacgaccgctccctgcccgctagccctaaacccctgccgatccatggaggccgccgcgcccgacggggccggcaaggcatccccggcccccgaggagcccgactggccgcccgagctccgcctcctcgcgccgccgccagctgcggggacggacgatccgcagttcctcagctcgatcatcggggacgcggccgcccctcccccgccgatgccgccgctcgcgcagaagcggaaacgggggaggccgcccaagaggaaagacggcgcgggcgcggtggtaccggcccggcccgccaggcggagggaggacgaggaggaggtcgtctgcttcatctgtttcgacgggggcaacctcgtcgtctgcgatcggaggggttgccccaaggtctaccatccggcgtgcatcaagcgtgacgaggcattcttccagtcgcggagcaagtggaactgcggctggcacatatgcagcagctgtgaaaaggcagtgcactacatgtgctacacttgtacatactccctctgcaaagtgtgcatcaagcagggtaaattcttcagtgtcagggggacaaagggcttctgcgacacatgttatgggactatacttctcatagaatccaaagatgaaagtgcaataaaggttgattttgatgacatactcagctgggagtacctgttcaagctatattggttagatctgaaagggaagctttcattaacattggaagaacttactattgccaagactagatggaatgttcctagcacttctgctaggaaagaaaaagatgagtcgtctgatgacctgtatgacgctaataatgatgatgatgctggtactgactgctcctcaggaaaacgaaggcgaactaattcaaggaaaaagggtcaaaaatgccggaaggtaaataaagattgtagtgttcctgcaaaaaaggtcgagcttccaattacaaatactgagagcgttcccacagaagtgacaaatgaacgagtgccattgccagtagacacaaaagtaccaaatggatgggtacccttgccagtagacacaaaagtaccaaatgaatcagtgcccttgccagcaaacacaaaatgggcatcaccagagctactggagtttgtaggacatatgagagatggcgatcaatctttcatttctcagtttgatgttcagactcttctgcttgattatatcaagaagaataaccttcgcgatcctcagaggaaaagccaaattatttgtgacttgagacttcatcgcttgttcaggaaagcacgggttgctcactttgagatgttaaagcttttggaaatgcattttcttatgaatgagacttcaacagtaactgatagtagacaagtgactatcgatctcaattcagcttatgtagataccaatggatacaatgacatggctgcaaaattttctcctgataagaggagaaagatccatagaaagatggaaagagatacccaagttaatcttgaggactatgcagcaattgacatgcataatataaatttgatttttatgaggcgcagcctgatggaggatttagttgatgatgccaaattctcagacaaaattcatggtggttttgtgaggattaaaatttctgatgtgtatcagaaacaagacatataccgtctagtaaaagttactggaacgcacaaggttccagaaaagtatagcattggaaagaagatgacaaattttgcactcgagatattgaatttaaacaaaaaggagattattacaatggatacaatatctaatcatgattttacagaggaagagtgcaaacgtttaaggcagagcatgaagtgtggcgtgattagcagactaaaagtgggggatatcctagagaaagcaaagatattgcaatctgtaaaagtgaatgattggtttgaaaatgaaaagcagaggcttgggcatcttcgtgaccgtgcaagtgaaactggacgcagaaaggaacttagagaatatgtagaaaagctgcagcttctcaacgattctgaggaaagaacccgcaggattaatgaagttctggaagtgcatgttgactcacatatggatcctaattatgagtctgctgaagaaacagatgagaaaagaactgttggaaagtcggtagatcggacaagaccagatacaaccatatcacgacgaatatcaagatatcttagcactatgcagaaccatcctcaaaaagtttctgattgtagccaccatccaaaaaacttgtcaacagaaagtacaatatgtggatcaggagcaagaagtttggagaacagcacagcaaacagaactatgtatgaagctggatcattttcatcttctggagtaacaatgtcaaatgacacggagccggagaaagtctggcactacaaggatccttctgggaatgttcagggtccatttactcttttgcaactatcaaagtggacaagttacttcccacgtgatctgagagtatggcttacatttgagagtgaggagagatctttgctgttgactgaagtgctttcaaaacagcagaaagatttcactcaggctgcatcacatacaagcagcaaggcaacgctggttggcactggacatacaaggaacaaccctagtgtggatcagaccaatgctttctcccctgctggtcatagtgtggttagttcttcaggaataactgttcagtataataagtattctgttccagaaagggaaagtgtgtactctccagatgatagcttgtcgctgtcaactagttcggttccgccgaaggatgcttgtactgtgaatagccaaacacactgccagaataagcattctgttttcattcaatctcctggaagtgcatatgggcacacagacttgaaccatgatggaatacagggaggatgctctggtgaatcaaaccaccatcacagcagcggagccctatggagtcctaccgtggtacaggtgagttgtggacatggtaatgtggaatctcatcagagccagcatgtttcctggtcacaaagtcaacatgaatctaaaaatagttcacaacgacctgttaaagatctgaattcaaggcgggatctatcgaaaaacctacctactcaacgtatagggaaagatgtctccagtcctttgtttgcttgtgcttggagtccggccgagtcgaggacagcttcaagtcaacatgacggctcttgcttaagttcaacaactaatccaaactttctcgatgaacttcattattctattgcttccgcaaagcctaagagctgcgctccagcaacccctattgaagacagaggttctagttcaccatcaggcatgctgagtcatgcagaaagagttccaatctgcagtccacaatcaacccctttggcatctgctttcgatatgtgcaagatggaggagatcatgaatcagcaaagaacactggagccggatacatcaaatgcttcaattaaccagtctcccgaatcaaagattttccctgtatcctctcctgataaccatgatattgaccgtgagtttcctagtccagttccaagatctgagaataaggacattgcggttgacagctcaggattaacaccagcatcacctgaaaatattactacgaatttgcctggttcagatacatgcaagatggaggtcatgagtcagcaacaagtaactgaggctgtcgtatcgaattcttcagataatcattcccctcaatctaaggtttcccctgtatcatctcctaataacgaagatatgaaacatcagtaccccagttcaacccgaaggtctgagaataagattcctgctgtggacaatttactttcaacatcagctgctcgtgaaaatctaacgacaacttctgcccatgattctgatacatgcaaaatggtggagttagtgaatcagccaaaaacacctgaagtggatgcatcaaatgctccactttgtcaatctcctcattctcacacttcccaggtaccttctgacaatcaagatattgaacgtgaatgtccaggtccaactccaagatctgacagtaaagaacctcttgtaaacaactcagcgacaacttctgcatcagcctctgatacaatcaaaatggaggagtttgtgaatcagcaaaaaacagttgaagcagatgcatcaaatgctccacttaatcaatctcattctcacatttttccagtaccttctgacagtcaagatattgagcatgaatgtccaggtccaactccaagatctgacactaaggaacctcttctgaacaactcagtgttaacattagcagcgtctgaaattctaacaacaacctctgcggcctctgatacatgcaaaatggaggactcagtgaatcagcaaaaaacgcttgaagcagatgcattgaatgctccacttaatcatcatcctcattctcacgttcttcctgtatcatttgataatcaagacattcagcatgaatatcctagcccaactccaaaatctgacagtaaggaacctcttgtggacaactcagtattaacatcagtagggcctgaaatgctagcgacaacttctgtctctgatacatgcaaaacggaggagtttgtgaatcagcaaaaagcagttgaagcagatgcatcaaacgcttcacttaatcagcctcacatttccgctgtaccttccgataaacaagatattgaatgtgaatgttctagcccaactccaaggtctgactgtaaggaacctcttatggacaactcagtattaacatcagcggtgcctgaaattctagcaacatcttctgcttctgataaatgcaaaatggaggagtttgtgaatcagcaaagaccaattgaagtggatgcatcaaatgcttcacttaatcagtattctcgttgtcacattttcaatgtatcttctgataatcaatatgttgagcgtgaatgttctagcacaactccaagatctgactgtgaggaacctcttatggacaactcaatattaacatcagcggtgcctgaaatactagcaacatcttctgcttctgcttctgataaatgcaaaatggaggagtttgtgaatcagcaaagaccaattgaagcggatgcatcaaatgcttcgcttaatcagcctcatcgttgtcacattttcactgtatcttctgataatcaagatattgagtgtgaatgtcctagcccaacttcaagatctgacagtaaggaatcccttgtggacaacttagtgttaacatcagcagtgcctgaaaatctaccgacaagttttgcagttgcctctgattcatgcaagatggagatcttgaataagaaaagaacacttgaagcagatgcatcaaatgcttcacttgatcagccttctcactctagcgttttcacttcatcttctaatgataatcaaggaaatgcgtgtgaacgtcctagtccaaatccaagacctgagggtgagcagcctctcatggataactcagggttaacatcaccagtgcctcaaaatctaacttctgcttccgacatatgcaagatgggggagatcttgaatgagaacaggacacttgaagcaaacccatcaaatggttcaattactcaatctcatcaatccaaggttttccttgtaccatctattgatatcctagagcgtgaatgttccagtgaaacgcctaggcctcagtttaaggaacctgttgtggacagctctgggttaacatcagcagcacctgaaagtttaacagctaagcaacatgtccactcaccagatgcctttataccaccaaagcatggtgctccaactggggaattaggtgatgcaaaatcagattttaaaggtgaagaaattattcaaaaagaacaatattgtgaaagagaacctattgttgctacaagagagaatttgctaattgatctttcctgtggtgccgagtcgatagatgtgtcagatgtattggaatctttaatggaagaaaggagtgtaacttcgtacgtgccagtatcaatagaggacttcctagccgcttcagcagtggaagaaccacaatactctagccctatagcgttatctccttggggtgaacctagttactaccaaggtgatgctggtgattctgcgctatggggtattcaagattcgatcaatgatatgtggtcattgctttcaccaagacctatgctccaagcttcatctggtattggaactgaggggaaggaaacttttgatatcaacgaggtggctgtgacccatgttaatagtgattttttccaaagaggatcgatgcttggggaggaaaatatgaatcaggcaaacttgagtgttgctgcagataggatgctgctgcctgagcaggtcccatcaataccaaatggtatgtcaacatcatcagtagacgagggcaccagagttataggttctcaagcatcaatcaatcagagcttagactggggtactacatggaggactagtcagaatctcagcgtgtatagcaatgaaatagcagggccctcgagtaaaagctattgggaagaatcaaggaagcaggaagccaccaattcgggcgtttctatttcaggggaagccattagaaacaagcgcttgaaccctcctgataatgctattcggggcagccatcatcaccgtggcaggtactcccaaatcagtgaatcttggctactcagttcaaatcactctaggagtagttctgctaaatttggcagcggtgggtcatcaagatcaacttcaaagggtcaaactaggggctaatgtaaattctcgggtgcaggagaaaggatgcatcttgtagctacctgcatccttgatctctgcagcaggaataggttttaaaattctctgttatatctttgcagtttgtataggctaattaaaattaagtcaacagagcgtaaatgaccatctctgctccactcaactcaactgtagcaaggagcatatgtttagcatagaggtttgactgaatggccctgcccaagaagcagattcagctcttgggcatggtctgtatcatcctgacattctgttggatggaactgcaattgtgcaaccggcatctcttgacaccgaaacgcccctgatgtgttggaatatctgatcgattggtttag

SEQ ID NO: 23501 - DNA, 160 bp, Zea Mays
gcgacggtgttctttcaaggcgagttccggcgcccaaacctgatgccgcagaggacgccgcccacggtacggggagcgccgcagtcgccacgggcgtcgagaacccgggcgaactcctccccggcactccaagtttgctctctatttctctcctcgacgg

SEQ ID NO: 23502 - DNA, 240 bp, Zea Mays
gtcggcgaggagtagtggggcgatggccgacggaaggaggacgcgaacgagaaagtggggatctgggaaggagagctgggactgagaagcacgagagcgcttgagcaaagaagcaaggttgtctgtctccgtcgggtaggaataggggcaaaaagatgcttatgcgcttccgtcttccgtgacaaaggtttcagttgttttgacagaggaggtgcgtgggacagcaacagtaggaccgaa

SEQ ID NO: 23503 - DNA, 1726 bp, Zea Mays
atagcccctcacgccagccgccaatgccccaatcccgtaatcgcagcctcgccccgctcgcatcttcctctccctctcagcactggtgctcaatctacaggttgtcccgctccctacacacccgccctccggtgtgaacctccatgacgtccacaaccactctccgatctgctgtcgtgacctcatccagccgtgctgtggcagtggatcgaagttcgctccagctctgattgggggaaaatgactagggtatcaagtggaaaaacataatggtccaggttctactgcggcacctctttcaggctaagcatctaaacaacaatatgtaaattatccttttccaataaaatacatgcttaaatcgtggctgctaggcgaatggtcctactttggtcatcaaatgcaggaattccactactatatgtgccacttgaagttgttatgtcaaaataatatggtgaaaacgagcgtctattgggatctattttttatcttgcaaatgatcttcctgaaggagattgatatgtcaagatacgcttgtttcatttgagctcaatgttatctgaaaatatatagactgccttcgtccccttcatcactgctaatgaccgtgacttggagacccgacagcggccctcgacgttgtcgccgccgagcccatgctggttccaccagtggtccaccacccggatgtggtccgccaagacgagcagtaacggtggcagcgaggcgaggtggtagatccagcaccgcttctgcacgaccatccattcctccacccagagcatgtacccaggcttgcctctcctcggggaacatgccgaggtcgtccgactggagcagaaggcgacatcgctcaacaagctggtcgaggagcagtgcgagagcataaacgatctcaagtccaagagccatccgattctgggcccagaacactttgccaaacaaaaagttatcgctcttcatccttgataggctacagaaagggaagctgaaccttgttcttctgccatcatctagcatgcggcttacctttgtttgtgatgatggttatccagagcaactagctctcttgagcaacgactttgaattttcggaagttatgattgaagaaatatcagctgataattctggacgctctttcctaatcagaatttcagaatctaaagtgttttactactggtgtgctgagaagtcgaaggaagattgaatggaacttcttgcaaaggtcttcaagggagaagcggcttaaaatgtgtgagcaggtattttcggactcgtaccagaaagggaaaagctacaaaggttgacacagcgccgaagctgtgaagcaggaaagcttcggcatgttcgcagaaaagggaaccgacttaaagatgaaaaggccatttagacctcgatagagtgctatagaattatcaccaaatgtaaagggcatgtatgtaattttgtatgggttgtaccccgtgcctataaataggtgaacagtacccccgtactgttcacgttgacttggcatttgcttttgcgtcacacttgtattttcatctccttccaaaccgaaggtacatttataatttgatattgtctctatttctctataatgatataataaagttaaatgaatgatgttatatgattattcgtgctatcttttatgtttcatatgcttcgtctttcattaatgtatactgtgatgatgaaggttcgtccttcatgaccttcg

SEQ ID NO: 23504 - DNA, 172 bp, Zea Mays
ccttcctccgagccccggcgaggaagaggaacccggcgcagccgccgccggacgcacttccgatggcgacgccacggaagccgatcaagctcacgctgccgtcccacgagaccaccatcggacgcacagcgggacgttcacggacggggatctgcgcgtcaacaaggacgcc

SEQ ID NO: 23505 - DNA, 1865 bp, Zea Mays
cacattttaaaaaatggctcatcgtggactacacatcgcatggttgcagttttcaacagactacactacatgttctttgaaaagtttacggcatggaaagacaccgatgccagtggctccacaccagagagaggcagaggggcgaaggaaggctaggtaggctagccatggcccccaaagctcacgtgctggtgctgccgatgccatgccagggccatgtcacgccgctgatggagctctcccacctcctggtcgaccaaggcttcgaggtcaccttcgtcaacaccgacgtggaccgcgcggccgtggtagccgcgctggaggcctccggcggcgtggcggcgctgggcggcggcatccacctggcgtccatcccggacgggctggccgacgacgaggaccgcaaggacatcagcaagctcgtcgacgcctacacgcgccacatgccgggctacctggagcgcctcctcgccgacatggaggccgccgggcggcccagggccaagtggctcgttgccgacaccaacatgggctggtcgttcgaggtcgccaagaagctcggcatccgggtcgtgtccttctggccggcggccaccgcgtgcttagccttcatgctcaagatccccaagctcatacaggacgggctcctcgacgataaggggctgccagtccgtcaggagacgttccagctcgccccggggatgccgccgctgcactcgtcgcagctgtcgtggaacaacgccggcgagcccgaggggcagcacatcatcttcgagctggtgacccggaacaacaagctgaacgatgagctggcggagatggtggtgagcaactccttctacgaggccgaggccggcgcgttcaagcttttcccgggcatcctgcccatcggcccgctgtccgccgacggggcgttccggaagcccgtgggccactacctgccggaggacgagcggtgcgtcaagtggctggacgcgcatccggacgcgtcgtccgtcgtgtacgtggccttcggcagcataaccatcttcagcgcgcgccagttcgaggagctggccgagggcctggagctcaccggccgcccgttcctgtgggtggtgcggccggacttcacccccggcctcagcaaggcgtggctccacgagttccagcggcgcgtcgccggcaggggcatgatcgtcagctggtgttcccagcaacaggtcctggcgcaccgtgcggtggcgtgcttcgtgtcgcactgcgggtggaactcgaccatggagggtctgaggaacggcgtgccgttcctgtgctggccctacttctgcgaccagtacctgaaccggagctacatcgtcaacgtgtggaggaccgggctggcggtgacgcccgacgcggacggaatcgtaggcagggaggagctgaggagcaaggtggagcaggtcgtcggcgacgccgacatcaaggacagggcgcgggtgctcaaggacgaagcccaccggtgcgtcgccgaaggagggtcctcgaacgacaacttcaaaaagctcgtgaatctgctcagtgaatgatgagaaccgggagactgggagcatcgtgtccagtgtcctggcgttgtaaatgttggtgcacttagggcttgtttggtttgatggctaacttgtcatattttacctaacttttgtgtctaaagttagttcttcaattcgaacgactaaccttaggtaaagtgtgacacatttagctacgaaccaaatagccccttaatctccttgattgtaaacagtggtggagcacctcttacggttaggggtgctaattgatcgcaatctaaattcttcttgacaaaatggtaaattttaaataaattttattttaaaaaataa

SEQ ID NO: 23506 - DNA, 2024 bp, Zea Mays
tagatgtatagtgtccacaagcagctgagctgtctgttgcaactgagctggcagtggatattgtcgtcactgtaggggatgtcaagttctaccttcacaagttccctcttctgtccaagagctcccgcctacaaacgctggtggcctcgacaagcgaggagggcagcgacgaggtggacatctccgacatcccgggcggcccggcggcgttcgaggtctgtgccaagttctgctacggcatggtggtgacgctcaacgcctacaacgtgctggccgcccggtgcgcggcggagtacctggagatgtcggagacggtggagaaggggaacctggtgtacaagatcgacgtgttcctgtcggccagcatcttccgggcctggaaggactccatcatcgtgctgcagtcgacgaggccgctgcagcggtggacggacagcctcaaggtggtcaaccactgcgtcgacgccatcgcctcccgggcgtccacggacccgtcggaggtcgactggtcgtacacgtacagccggaggaagctcccgtcggagaccgacggcgacgcgcgcggctggaacggcgtcaggaagcggcaggcggtgccgagggactggtgggtggaggatctctgcgacctcgaggtgtgcctgtacaggaaggtgatcctggcgatcaaggccaaggggaggacgggcggcgccgtcgtcggcgaggcgctgcgggcctacgcgtgccgccggctgttcgggtccctggaccacgccgtcagcgacgggctcgattgcaccaagcaccgcgcggctcttgaagccgtcgccgacctgctgccggccgagaaggggtcggtctcctgtggcctccttctcaagctgctcagggcctcgtgcctactggagtccggtcaggcctaccgcggcgagctgatcaggaggatcggcgcgcagctggaacgggcttcggtcccggaccttctgatacctgcggactccggcgacggcgacggcgacgcgacgtacaatgttggcatggtggctgcgatgctggaggagttcttgctgcatcacaaggtaaatggggccgaggcggagaagcgggaagatggcgaggacgacgtggatgttgccgctgacgacccggtcacttcttcgaagctggccgctgtcgcaaagctggtcgatggatacctctccgagatcgccaaggacccgtgccttcctctggagacgttcgtcgccctcgccgaatcgatgccgcccctgtctcgcccggtgcacgacgcgctctaccgcgccatcgacgtttacctcaaggagcatccgggcttgtcgaagggcgagaagaagcggctgtgcgcgctgatggactgcaggaagctgacggcggacgcgagcgagcacgccgtgcagaacgagcggctgcccctgcgcgtggtggtacaggtcctcttcttcgagcaggtccggcagtcggcggcggcggcggcagcctccgccgcccccgcgcgctcgctcatcctgcccagggacgacggcgcgtcgtacggcagctcgaggtcggcgaccacgacggcgacggaggacgagcagtggggcagcggcgccgtggtgggcgcgcctgtgacgacgtcgacgtcgggcggcgccggcgacgccggctcgctccggtccatgagccagctgtcggccaacgagaacgggagaagcggcggcggcggcgacaggaagaaggccaagggcggtgcggtggcgccggcgccggtgaagagagtgctggggaagctgtggtccggcaaggcgagcagcggcgggtccgacgacacgtcggccagccccgttgggtccctcaacctggaggagaccaagtcaatgtcgtcacagatcacgaggcattctgtgtcatagttactatattactgtatatgttctctttttttttgggtgatggttttgttggattggatttgacttacataattatggagggtgtttggtaattggtacatgtggtaatggagaatttctcgtcacgaa

SEQ ID NO: 23507 - DNA, 4211 bp, Zea Mays
tggtctccggccaaggggtcgtcacatacaaggaccagcgagatgggcggcgaggctgagcctgacaacgcggtgctcttcgttggggtgtcgctggtgctgggcatcgcctcccggcacctcctccgcggcacccgcgtgccctacaccgtcgcccttctcgtcctcggcgtcgcgcttggatccctcgagtacggaacacaacatggtctaggcaagcttggagctggaattcgtatctgggctaacataaaccctgatcttctgctggctgtttttctacctgccctcctctttgaaagctccttctccatggaagtacaccaaataaagagatgtatggcacagatggtgttacttgctggacctggtgtgctaatatcaacagttttacttggcgttgccgtaaagctcacttttccttacaactggagctggaaaacatcattgttgcttggcggactgcttagtgcaactgatccagttgctgtggttgcactgctaaaagaactcggagcaagtaaaaagcttagcacaatcattgaaggaccgctattgttgcctatcagctattctatcgaatggtgcttggaagaacctttgatgctggctcaataataaagttcttgtctgaagtttcacttggagctgttgctctgggccttgcatttggaatcatgtcaatactgtggctgggctttatttttaacgatacaatcatagagattgcacttactcttgctgtcagttatatagctttcttcactgcacaagactcactggaggtctctggtgttttgactgtcatgacactgggaatgttctatgcagcttttgcaaaaactgcttttaagggtgaaagtcagcaaagcttacaccatttctggtttaaggtccagacccagtcatggtttctcacattggctgcagtacgccagtaccactgtgtaaaggtgagacaggatttcaagggctttctcgacctatttgcacctggggactatcttacccccataggccaatttttctgtatgctgctatcaatgtgtttgcatgactggggaaactaaacaaggttgagaggttgagtcagccagggtggtggcgttggaattgctggtaaactacttattgcactatgggaactaatttgagggtctgccatagctaatcactagccatgttaatttgggatctgtagccaacaaaaagattcattatgaaaacttataaaaccctaaaaacataaatacacaagcattaattaatagcattttttggcatggaattgttctggtactctatccctgtgatccctatcctaattttgttgatgaataattttccagtgttggttaccaaaagtaccatgaaatcttcagttgacactgaattaagggaaatggttgcttacattgcaaatacacttatttttatactgagtggggttgttattgcagatggtgttctacaaaataatggccactttgagaggcacggcagttcatggggcttccttcttctgctctatgtctttgtacaaatatctcgagttatagttgttggtgttttgtacccgatgttgcgtcactttgggtatgggttggacttgaaagaggccatgattcttgtttggtcagggctgcgaggggctgttgctctgtcactatcattatctgttaagcgtaccagcgattcagttcaaccttaccttaaaccagaagttggaacaatgtttgtgttcttcactggtggcattgtgtttctgacattgatttttaatggctcaaccacacaatttttgctacatatactcggcatggacaaattgttgcccacaaagcttcgtatattgaaatatacaaggtacgaaatgctaaagaaagcattagaggcttttggtgaactaagggatgacgaggaacttggacctgctgactgggttactgtaaagaaatatatcacatgtttgaatgacctagactatgagccagagcatccccatgatgttggtgacgaagatgactgcatgcatatcatgaacttaacagatatccgagtgcggcttttgaatggtgtgcaagccgcgtactggggaatgcttgaagaaggacgaataactcaagttacagcaaatattctgatgagatcggttgatgaagctatggaccttgtttctggacaaacattatgtgattggaaaggtttaaagtccaatgtgcagttcccaaattactataggttccttcagaggagtaggttaccacgaaagcttgtcacatacttcacagtcgaaagattagagtctggatgttacatctgtgctgcatttcttcgtgctcacagaatcgcaaggcggcagctacatgattttcttggtgatagtgaggttgcaagaactgttattgatgaaagtaacgctgagggggaggaagctagaaaattcttggaagatgttcgagttacattcccgcaggtgctacgagtgctaaagacacgacaagtcacatattctgtgctgacacacttgagtgagtatattcaaaacctccagaagactgggctgctggaagagaaggaaatggtccatttagatgatgctctgcagacagacttgaagaagttgcagaggaatccaccaatagtgaaaatgccaagagtcagtgatcttctgaacactcatcctttagttggcgcgctgcctgctgctgtacgtgatactttgctaagcaatacgaaggaaaccctgcgagggcagggcacaacgctgtatagagaaggatccaggccaaccggtatctggcttgtttctattggtgtagtgaagtggacaagtcagagattaagcagaaggcattccttggatccaattttatcgcatgggagcactctgggtctgtatgaggtgctgattggaaagccatatatctgtgacatgaccacagattcgatggtacagtgtttcttcatcgaaactgaaaagatagaagagctgctccattcagatccttcgattgagattttcctgtggcaggaaagtgctctggtgcttgccaggcttttggtccctcatagattcgagaaaatgggaatgcatgagatgagggttctggttgctgaaaggtcgacgatgaacatatacatcaagggagaagacttggaagtggagcagaattgcattggcattttgctggaagggttcttgaagatcgagaacctgactctcatcacgcccccagcgttgcttctgccatggaatgctgacttgagcttattcggtctcgagtcctcagactactgccatactgcacgcaggtatcaggtggaagccagagcgcggatcatcttcttcgacgaggcagaggccgcccatcttcatgttcagacaagtgcgtcgctgccccaaggtgagccagcacggagcatgagcaaggagcacagcggcttgctcagctggcccgagagcttccggaggtctcgtggcagcctaggcttagcagctgagatgctgccgggcggcttgtcttccagggccctgcaactgagcatgtacgggggcagcgtggtgagcctctcctccggccagcagggtcaccggcggcagaggccacgtcatcgcgtgcaggcggccacgacgatgacaaaccagaagaagcacagctcttcctaccccaggatgccatccatatccaaggagcggcatctgctctccgtgcagtcggagggctccaacatgaagagagtggcagctctacctgaggttgctgccaccgctcctgctccggcaggggcagcacaggggcagcggagggctatgaacttgcaggaggaatacaactcgagcgaagactccgccggcgaagaagtcatcgtcagagttgactcgcccagcatgctctctttccgtgagtccaccgccgtgcctccgccccaggagcagtagctggatgcctggatgtggtcttctcttctcgtgtattgtattgtactgtatgtattgtatcagggaagctttggcgcagtggtgtggtgtggtgtggtgtggtaaacaaaataaataaaacacatttccgcgttccatattttctcttcatgatcaccgaataaataaaagaaacagagacaatgatgcggaagaaaaatgcgctctttctgtctggacccgccgccgcctcaacttacgagaccaacaaaaactgggtgcaacccat

SEQ ID NO: 23508 - DNA, 2016 bp, Zea Mays
tctggcctcattcattggcctcaaccctcaagcatcggctgtgcggacatgctgcgctcctgcacctcctcggccgccgctcccagattcaccgcgccaggacgctcgacggaccgggtgcccgccccctggccgcccttcgcagcggtccccgcctgctgaaacccctcccgcccttagctgtaggcctcgcggctcggcgcggtcgaaagcagctggtgcgcgatcgagaagagtccgccggcttctctggtgcgggctgcggggtgcggtgtttctgaggtccgccgcgccgcgatgaggcgaatgcagcagtgagatgagatggtagtgatcctctactcccagaggtgcaggtgtaaatgcagtcagaaaattcggcatgagccccctctctgagctggtgtggtctccggatgaaggcttgagcattaaaattgcggcgtctagtcttagcacaagaaaggcttctcttcgttggaatgcagatacattgagcatattgatatcttcacctcaacgaagtggttctggtccaggtgaaaagaacggtgataccataaatgataacctagaggtatcagaaaagatgccatcacaactgcggattcgcagtgacagctcagtgagagtaaccgtggatagccccaatagtacaaatgttgacgccctacaatttacgtctatgagatcgcaggagcaagattcaagttcagcctccaggaaaaaagtcgtgcctagcatttcagaaaaccaggcttgctgtgcaaccactttctgcaatgaaagatcttgggaaactaatgcatggcgtgctcggttagtaaaggcagtttgtcagaaagaatctattttgccaacgaacacagagaatccaattttaccttcttccataggaatttcatgtgatgcagtagagttctcaggcaaattggtaggttcccaaggcaagtttcaaagcctgggtgtaagtagtaatgctctagaaattcattctcatgacaattgccaagatccggttctgcacgaaagccataaggatgagcctgttattgctagaggtgagtcagcatctggtgttaatattgttgcaagatgtgagtcggtacctggagttgattccagcaattttgtgagaggcaaagaaaaagttatgtacaatgacagcaattgtggtaacaatacaagggagggtgatgacagcaatgagagcatcgagagctgtacaagtacaaaagccccaaagcgcaagcatgcgcagtgttgtgcagccacgatgccttcttctggaaacaaaagatttagaagagaagacaatgagagttcttgttcgggattattgcaaaaatgtggtacatctttcttcaactggatgtcatcactcacgaatgggttacccatgctagatggagccactgctgccgttccacttgaacagaagttttcagcaagtacaggagatggatctgcagcaccttcccagccacttcaaaacaaccgcagcgttcctatgcaattttttggcttcaattcgctcttccagtccctgtatactcgtaatgttatgataacttcaggagataattgtcgtcaaccagaaagcaactgtgctggacatgtgttcaatagactgaccctggaattaaatgatagcaattctatgttgaacaaagaaattggcatgggtagagaaactcttgatctggctactcagacttcagctgctgaaggatttcagatgatttctggtggctgtagaggaaatgttcagagtcaaattgatattttccaaatgagaccagaaagaaatatgaaactgcccagttccagtaagtttagctctagatctctagaagaaaaacaaaatcagtgcacagctgcctgctcaaatgatgcaacacaaaataaaggtggtttgagggaaagcttgtgggtaactcggcttttgccaaaagcatcagtagaattgatggagggcacaccatgcaatgtagagaatgctgttagtccacaggc

SEQ ID NO: 23509 - DNA, 549 bp, Zea Mays
aggaagagaagcggaggagcacgccatagacgaggctctgctgcaacaccccttacacttacacaccgaggaactcaggatgctcttgtccgtcgccgacaagtgcctccactctgatcccgccaacagaccaaccatggcgcaagttgtcaagatgctcgagcaacccaacaacacccaccaccactcatcgtcatcatcatcgccagcagcagcagtagaatcagtgcactgactgtactagcagcactcctccatctctccataatggggcatgtatatgatcgaccaacagatgaattaacacgtacgcgccatcgttgcaccatccatggcggatccaagatccattgtaaggggggctgggactaattatcttttcttttcctcttattcttcctttttttccctcatcttgttcttccttcctctccctttcccctcttcttccttcctcttctttcctcctccactgtcttctcccttcctcctgtgtgtacgcaggcacatgggggaggggggctggagccccctgaatccaccactgat

SEQ ID NO: 23510 - DNA, 2554 bp, Zea Mays
ggtgcaaaaatgtgaagtctcgcaggccaaaacccaaatggtcccccatgattttagaaaatatgaccataaaaccctccgaacccactccgccgcaacccactagctgctctggctcccccgaggcaatcgagtaatcgacgaaggccaccaccacctccacaccactttgcctcgagaaggttccaccaagcctctcggctagggtttggggactttgggggcgatcgcaatggagggccgcggcgcggaacaagcacccgaggcggcggcggaggtgaaaaatccgaggtgcttcatggacgtcaccatcggcggcgagatggaggggaggatcgttgtagagctctacgcttccgtggtaccgcggacggcggagaacttccgcgcgctctgcacaggggagaaaggcatcggcgccgccagcggcaagccgcttcactttaagggctcatgcttccaccgtgttattaaagggtttatgattcaagggggagacacaactgctggagacggaactgggggagagtcaatttatgggtccaaatttgaggacgagaattttgttttaaagcatgagaggaaaggaatgctttcaatggctaattctggtcccaacacaaatggttctcagtttttcatcactactacacggacacctcatttagacgggaaacatgttgtttttggtagagtgatgaaaggaatgggggtagttcgctctattgagcatgtttctgtcggagaagctgactgccccactcttgaagttaaaattgttgattgtggggagcttcctgaaggtgctgatgatggagttgtaaactttttcaaagatggtgatacgtacccagattggcccaatgatcttgaagagaagcctgctgaggtttcatggtggatggatgctgtggagtctgctaaagcttatgggaatgacaatttcaagaaacaggactacaaggcagctctcagaaagtacaggaaagctctgcgctacttggatctttgctgggagaaagaagagatagatgaagataagagcacagcactgcggaagaccaagtcaataatactcactaatagctccgcatgcaaattaaagttaggagattcaagtggggctttattagacgcagattttgcactgcgtgaaagggagggaaatgctaaagcttttttccgacaaggacaggcacacattgcacttaatgacattgatgcagccgtggagagctttaaacaggcattggagttggagccaaatgatggtttgttctctttagtcccattgaaattcatagatttaactgacgatctgatgggtttttctttgaccccattagctggaatcaaaagagagctggctgctgcaaagaagaagattgctgacagaagagatcaggagcggaaggcatttgctaggattttccaatcttctggaaagtctgacaagagcaacgaagagaataattgatctacagttcctttcccccgtctgaaactttgcttagcttaaatctggggcacattggaacaggagtctcatgggagtctgctctgcaaaaaaacgcagattactgatctttagatagaaggaaacatagtgggggaagtcgtggggggagaccaccaagatggtcgagagcctcagccgcgacacgtggcaacacttcaagactggacctagttttactgaagctgctatgggacgcctagcacaagggactaaagttttagcagaagggggctatgaaaaaatatttaagcagaccttcgaagttcttccagatgagcagctgaaaatatgctttgcgtgctatctctcaacatcggcgggtcctgtcatgggagtcttgtatatttctacagcaaagattgctttctgcagtgacaatcctctgtcatacaaagctggaaataaaactgaatggagttactacaaggtggtcattcctcttcaccagctaagagcagctaatccttcagtaagcaaattaagtcccgcggagaagtacattcaggtcgtatccattgaaggccacgagttctggttcatgggttttctaatgtacgacaaggctgcaaccagtcttcaagaagccttggctagcgcacgtgagttgcaaccgtgaagacaccggggtaaatggtgtttcttccggttacatcagtttccacatcttgagttcaggctgggtcgcaaggattccttagcttctgagtgtctcctgtttcagatccttttagctgaagcctttgacacggtacactcactagcttgcatacgcgtcagaaatgtctgttgttcctgtcaatgttgtaatcatgagatgtatgtggagaaagaatgcatgtcaaacatttaaatgtggcagaactaatgtgggaacttgattatcaagggcctagaaaagttagggggaccagaaggtcgaggagaaacaagcggttggtgatgcgttatatttttgtcgattgacaaagggagccaggatttttaaatgtttctctgcattcacaccattatatttatatgggagctttggtggcg

SEQ ID NO: 23511 - DNA, 978 bp, Zea Mays
tatgcttccacatttccttgtggggattacgaaaggttctgggagaactatggaaaaattttaaagctgggtgccatggaagacaaagaaaatcacaagagaattgctcctttgttgcgcttcttctcttctcaaagcaacgatgaattaatcagcttggacgaatatgtggaaaacatgaaacctgagcagaaggatatttacttcattgctgcagacagcctgagcagtgccaaaaatacccctttcttagagagactaacagaaaaagagtatgaggttctacttttcgttgaccctatggatgaaatggctatccagaatctgagctcctacaaggataagaaatttgtggacattagcagggaagatttggacttaggtgatagcaatgaggaaagagaggagataaagcagcagttcagccaaacctgtgattggataaagaatcgcttgggtgacaaggttgcacgtgttgacatatctaatcgtctgaggtcatcgccatgtgttcttgttgcagcgaagtttggttggtcagccaatatggaaaggctaatgagagcacagactatgggtgatacaaccactttggatttcatgcggtcaaggaaggtttttgaaataaatccagaacatgagataatcaaggccttgaatgcggcatgcaggaataaccccgatgatcctgaagccctaaaggctctggatgttctctttgaaactgctatgatttcaagtggcttgtcgcctgacaaccccgccgagctcagcgggaagatctacgagatgataaccactgccatcgcaggcaagtggtcctcacagtcgcaggcgcaacctgacaacacaactctgcagcacgcggcacctgggaggtcggatgagccgcttgaaggtgaagtggtggagccagagcccgttgaggctgatcagcataaggatgacatatcggcacgaattgtcctcataacttaa

SEQ ID NO: 23512 - DNA, 2341 bp, Zea Mays
acgtactctgtcaaacgatacgccgcgatgcttccagacgagcgccatccccttcctcgcctcacacgccgtcctgttggtcgtgcctctcttcaacctttttttcttgagcattagcgagagccccttacatggtgcagtgctagcatcgttgctggcgacctcggtgaggtcggatctgcaaaggttgcagctagcgcgcctacactacatcaacatggtgtggcatctcctttcgcagatccccaacatgctacgccgccggctgcctcattggaactcctgtgcaccgcttgcctttcttctcccattcaacccgcaggcgttccctggctcaatagcgcaactaggggatgtccgccgctacctccatataggaaacgacagatttagattttcaggtgatgcgtggtcgggatcccggatcaatcaaaataagtgtgaaataagtgtgaaatttgagaggctgttgaacttccagatcaggtaccaaccaaaaaaagtgacccttttgacggcgtattgcgtgggcaaggcatgccagtgcgacaatagagaaactaacggggagctctgttcgttctgctgattgcttatgattaggctcgcagtggtggtagctgggagagcttgggactggccagacgcgaccaactcacccatgtaataagacaacttttatacatagccgacagtacgcaacctcatgcgcaagatccttaatgaaaccaaagagctgcagcagataaccaacgacaagcagaaaaatcaggttgtacgcatccaacattttactttcatatttgctgaagatgtcaacaaacaaaatagacaagcagcccagacaatggagatgatgtatacgataattgcagatgagttcaagtcaatggacaataaggacatgcgccctgaagattacttgaacttcttttgtcttggaaaccgggaagaaccaccatctaatggcagcccagaatcagagaaatctacatataaaagtgcagagatagtctgtttttgcattttccttattcttaagggtatggcttagctcaacccttctgattacaccaaaactgaatatggttttggcgcacggaccttatgggaagctagaggtctgagctattgggaagctagaatttatgtttttatcaatgtttagtcattaactaattaattgcatatcgttttgttgtatatttattaactaatcgagtgttgcatacggttttcagaagcatttgaagacgcagaaattactcatgttgacgatacagtagatcctgttagagacatggaaactattagtgaagagctcagactaaagttttcgttggattttgttgatttacaagatcagctgtacaacacttaaaccttttttcgacactattctgtttctattttctgcaggatatagagttcatgaaaaagaaacttgaggaccttgataagccaatgaagaggaggaatgataagctgctcaaaattgagcatgaattatattgatccagcacaatgccgaggagactggagactaaacttggaggtgctactgaaggatgtgactttgagtcaaaggtaacaggtagcacatggagagcttgaattgaattcaagcttggatatgattggaaaatatttgtattagatcacctagaagggtgattgatgcttgttattggccaagcagccaaaatctatagtgggaactcctgcatacattgctcatgaggttcttctgaagaaggaatacaatggaaaggttgctgatgtgtggtcatgcggagtgatgccatacgtgatgctgaaaccatccatggttcttgaaaaacctcctagctgaccaaatggatgacaatacgatgagtaagcagtacgaggagcctgaacaaccgatgcagagcatgaatgagttcatgcagatcctggttgaggcgaccattccagcagttggttcacgtggactcaatcagtttctgaatgatgacattgacctcgacgatgacatggaggacctagactcagatgccggtcttgacctggaaagcagtggggagatcgtgtatgctatttgacaacattgaatactttgttgtgtcgtaggttaccaagataattagagacaaggggcaggttgttgtgcttgcaagtatctgttgcagctgttgttcatgcctgatgttgatgcctcttttcatactgttgtgtttggatggtgtaccaccagtgttttacaacagtttggcccttggaattgctattgctaaaacttggttcctctgagaagaccttttgtttttgtattcccagtcgagggacggtgaagtactta

SEQ ID NO: 23513 - DNA, 1773 bp, Zea Mays
cggcgctgtctgaatttgagctatgaggtgcctgcctttcttgcatggagacgtcagtgagaaggatcctgtcactaagtcggcctctgtacggtccatgagcacaacatcgcgctcccgctccggttcagacttcacctccttgaatgtttccgacatgagcgccgagtcaataaggaggacacagtaccccagcttcactgactgcccgtctaacctgagggtgttctcctttgctgaattgaagagtgccacacgcaacttcagccgatctctcatgcttggcgagggtggctttggctgtgtgttcagcggcatcatcaagacctctgacaaacctaatgaacgaattgagattgctgttaagcaattgaaccgtaaaggacttcaggggcagaaggagtggttgacagagatgaatgtgcttggaattgtggaccatccaaacctagttaaactaataggctactgtgctgaagatgatgagaggggagtacaacgccttctagtgtatgaatatatgcctaatggaagtgtggatgatcacttatcaagtaggtcaactactctgtcatggccaatgagactaaaagtagctcttgattctgctcggggactgaagtatctgcatgaagaaatggaattccaggttattttccgagacctaaaaacatccaacattctgctggatgaaaactggaatgctaagttgtcagactttggtttggctaggcatgggccaacagaaggtctcacccatgtctccaccgcggtggttggaactctaggctacacagctccagaatacatgcagactggacacctcacggcgaagagcgacatatggagctacggagtcgtcctgtacgagctcatcacaggccgccgccccatcgaccagaaccgtccaaagagcgagcagaagcttctggactgggtgaagccatacatctcggacgtgaagcggttccccgtgatcatcgacccgcggctggaggggcactacaacctcaagtccgcgacgaagctggcgagcgtcgcgaaccggtgcatggtccggctgcccaagtcccgccccaagatgagcgaggtgtacggcatggtccagaggatcgtggacggcgtcgggaccggcccgccgcagcccccgctgctgcactaccaccatggctcggcctccgagccgggtgccaagcgcgccgagaaagggtcgctgaggaggaggttccgggaattcaggtccggctgccggcacgttgtcctgcggcggggcaggaagcctgaggtcgtgaaggacctctgagggagggaggcggtggtggatccggtgctgcaagtatatggtagtagtaggtgttcatagagacggtggtatcagttccaccgtgtagtgcttgggttggtatagggtgagttcatgcatgcataccagtcttgaagaagaaagaaagaaagaaaaaaagaaagaaagacaaggtgcaccgttgagcggtggcgttcgtgtagagtagtgctagctgtggttttgacctcctgtgtggtttacacaatgtgtgagctgcgataaggtgatctacagcatagggacccctttgtgtttacagtgcaacttctgctggctctttcgtcttgttgagaatcctttcagtagagttagaaattataggagtggtcttcgggaaagcctgcttccgttctgttccattgattcagattctcactcccttcttcgagtgtttatttgattttttatattaaagttgagattcttcg

SEQ ID NO: 23514 - DNA, 2873 bp, Zea Mays
cccgctgggaatctggtcccctccgcgaatcggagaaaggggatgcatacggctttgctgtgcggccgcaacacctgcaacgttacaaggagtacgctggcatctacaaggaagaagaggaggagagatctgacaggtggaagaattttctggagaggcagcctgaatcatccggacaagatgctggtggtaatgctaaggatgatggttccgaatcactgcatgagaagacggtagttggaccacgaaagattgaaatatggacgccaattagaccgtccctgagcaacatcgagcagatgatgagcttgcgcatcgagaagaagcaatcctctgctagcaagcagcaagcaaaggatgtaatccatcctgtgaaagttgaggagggcaagttgtcagaggattcagacgacgagttctatgatgtagataaggttgatccgagccaagaagtgcagccgagcgatactgggaatgctgatgttggaagcaggagtcaagaagaaaattacatttcaaaggaagagttggagtgtctagtccatggtggactaccgatggctttgaggggagagctatggcaagcttttgttggtactggagctcgtagggtagaagggtattatgataatctggcagcagagggtgaattagataacaaacgttcagattctcgaacctcggaaggtgttcacgagaagtggattggacaaatagagaaggatttgcccagaacttttcctggtcatcctgctttagatgaggatggaagaaatgctttgagacgcttgcttatagcttatgcgaaacacaacccatcagttggttactgccaggcaatgaacttttttgctggtctcttgcttctattgatgccggaggagaatgcgttttggacattggttgggattatggatgactattttgatggctacttttctgaagaaatgattgagtcacaggtggaccagcttgttttagaggagttagttcgagagaagttccctaaattagcaaatcacctggattaccttggacttcaagttgcatgggttactgggccatggttcttatccatcttcacgaatgtgcttccttgggaaagtgttctccgtgtatgggatgtgcttttgtttgatggaaacagagtaatgctgttccggacagctcttgcgctactggagttctatggccctgctcttgtgactacaaaagatgctggtgatgcagttacccttttgcagtctttagctggttccacttttgacagcagccagcttgtcttgacagctcgcatgggataccaatccgtaaatgaaacaatattgcaagaactgagtaataaacaccgcccacctgttatatctgcaatggaagaaagagcaaagggtctaggtgtttggacggataccaatggtcttgcatcaaaactgtataacttcaaacgtgaccctgaaccgctggtttctttaagtgattcaacagaccagttgagtgatgtgggagatggggataccaatcaagaaagtgatctgggaaacatggatgacgagtatggtggtgtaatagtgaattctgagattgattctttgcctgatccaaaggaccaggttgcctggctgaagttggagctgtgccgactcatagaggagagaagatcagctgttctcagagctgatgaactagaaacagcacttatggaaatggttaagcaagataacaggcgccaattaagtgcaaaggttgagcagtttgaacaagaaatatctgaactaagacaggccctgtcagacaagcaggagcaggagcaagcaatgtttcaggtcctgatgcgtgttgaacaagaactaaaaattgcagaggaagctcgcatctcagctgagcaggatgctgctgctcagagatacgcagcaaatgttctacaggaaaagtacgaggaagctatggcttcacttgcccaaatggagaacagagctgtaatggcagaaacaatgttggaggctacactgcagtaccaatctagccagcagaaagcaatgtccccttgcccttctccaagaccatcgatgctcgacgcatcccctagtcagtcaagccagaattcatcgcaggagttccagccaagaaggaaaaacttgcttggcccattttccctgagttggcgtgataagaacaaggaaaaaccgaacaacgctgatgactccaccaacacaaagtctacaaataatgatgaaatggtagaaacctccaacacaaatgatgagaagcatagagaaacactagatctaaatagtgagcagagagcagaatcacccaaagcagatgtcaagatgagagcagagacacctgagaaagacaacgacctgccaggggtccaactagtcactgacgatttgaatgggcaccacgaacagatgcaagaaataaaattggattgataagcattaagcacaatgctcccagcccaaatatcttcgccaccacgtaagtaatatcagagtatttatgatctgatcacacggtgccagttggtgacagcactgagggtggctaagttttgaaatgatactggtccccccctcctctcccctttccctttgtggttccccgaattctttttgccaccacatctaggttacatgtcatttctctccattttttataattttgaggagaaaatgagcaagttatatatggttgcccatccgttgctgcctcccaatgtaaatgcattggaagaactgtgagaaaaaagatgagaattgtgggcaattatgacacccttattcttgtaaattatcatatcatttagagtttatgcgtgctttcaattgaagaaatccgtgctggcgttaataacaccactgaaccct

SEQ ID NO: 23515 - DNA, 1649 bp, Zea Mays
ccgcgatcccagcgtcacgggaagctgcgcgccctaggctggaaaggccgcggcaatttaccggaccacatcgtactcgtacgatatgccatgccatcgatcgcccagaaccgcgctagtactgacaaatccccaagattccgttccaaagccgcgcccggtgctgctggtctggccaaaaccactccctacctaaactgctcgttttgtttcattttggtcaaacaaaccaaggaagccctctgctctgcctcgcactcgcacacaccgtgcaccaccggccggccgggtcgtctcgtctcgtctccactgtccagcctccgccccctgcacctcgccatgtgctgccgccgccaacgcggccccgacgggacgcccgtcgacggcggccgccgccgccgcaggggctgcggggccgtgctcgccgtgctggccctggcggccgccgcggtggtcgcgttcctggagagcacggccggcggggtctcgtacacgggggacggctggctgcacgagtgcgccaagtgggacgccgagggcggccggttcctggcgtccaccttcttcggcggcggcgtggcggaggtgcgcgccggcgagggcgaggagcgggtggtcgtggcggaccccgacgcggccggccgggtcgcgctggggctcgcggtcgacgcgcccaggcgccgcctgctcctggtgtactgcgatcgcccaccgcgcttcggatacgccgcgctcgccgcctacgacctcggatcgtggcgccgcctcttcctcacacgcctcgacgtgccaggcgagtcaacgttccccgacgacgtcgccgccgacgaggaaggcaacgcctacgtgaccgacgccagtggaaacaagatctggaaggtcagcccgagcggcgtgctgctgggcgtcatcaagaactccacgttcgtgcagcgaccagggctgcggcacaacctcgtcggcctcaacggcatcgtgtaccacccgaacggctacctcctcgtcgtccacaccttcggcggcgacctcttcaaggtcgacccgaagacggaggccgtgcacgccgtcaaggtgcaggggtcgctgggccgaggggacgggatggagctgctctccccgacgaggctggtcgtcgccggcacgccgagtagccggctggtggagagctccgacgactgggagaccgcgcgcgtcaccgggcagtacgtcgggccggtccaccgggtcgggtcgtcggcgacggtgaaggacggggacgtgtacatcaaccacattgtcgggtttgggctcggcaagaagaagacgcatgtccttgcgagggcggtgttctcgccgttggccgcagagagttgacggcggccggccggaccctccgtcgcgggatcaccaatcgctttttgcttaaacggcagttcatagttccactcaactccatgagagttacaggctatatatacgtatttcggtgtgattctgtgatatatagatgcttatgcttttgtattgacacgttgctcgaagctgcacgcttcttctgtttgatgcaagcaaaacatgtactacatggtttcgatcaattttcagttcgtattccacaactgccgttttagccactacatcaaccacggcagcttttgcagctaaacaaa

SEQ ID NO: 23516 - DNA, 1858 bp, Zea Mays
agggcacatggcctttggttacacgctcaagcttgccaagtcacttcaggcacacaccctcattttccatcctataaagttgaaagcatagcagtttaacagattgcgcaggggaatgtcgaaaggcacgcagtaggaaagcaaggcccaattacacttgatctcaagtcatcagcattcgaccccaaggagaaagtatggacaaggttcccaccggaaggctcgaaatacactcctccacacagttcgtgcgacttcagatggaaggactactgcccgcaagtattccggacgttgcgcaagctgttcaaggtcgatgccgcggactacatgctgtctctctgtggagaccaggctctccgggagctctcgtctccgggcaagagtgggagcttcttctatctcacgagcaacgaccagtacatgatcaagacgatgaagaaatctgaagtgaagatatttctgaagatgattcgagcttattacaaccatgtcagagcgttcgagagcactctggtcaccaagttcttcggtcttcactgtgtcaagttagctggagcgaaccaaaagaaggtccgttttgtcataatgggaaacctgttctgctccgactactccatccataggcggtttgacctgaaaggttcgtcactgggacggacgacggataagccacagacggagattgacgagtacactaccctgaaggatcttgatcttaacttcgtgttccggttgcaaaagcactggtaccaggagttccaaagacaggtcgacagggactgcgagtttctggagcaggaaaatatcatggactatagtcttctggttggtgtacattttagggacactagggataggctattgaccggagtgtgttgccgcattaatgaattacttgaaggttcattcgatagcgactgcagcagaggatcgtcgcctcacttgtctcgaggagatacggatccaaacaggttagccaagataaaacttgggtctaacatgccgacgagagccgaacggacgatacgaaagggtgactgtgaggtgcagatcatgggagagcctacgggggagttgtacgatgtcatactgtacttcgggatcatagacatcctccaggactacgacatcagcaagaagctcgagcacgcgtacaagtccttccagtacgacccgacgtccatttcggcggtggatccgaagcagtactcgaggcgcttcagggatttcgtgttcaaagcgttccaggaagacaggttcgacttgtgaagggacgcgtgggaagctcgatcgggaggctaccgttgccgctgacacgggttaaccagtgttgagatccgcactgcagcagagcttttggtgaccctacttccacttgcactcgccggattgatgaagctcctgcatgcattgcatgcggagtctccaaggggatttcagctggcactcatgcattcaagtaaaggctccaattcgagataccggtgcgtttcaataagcaggttcaacagtatctttcattacaaaaaaaacagctctgcttttcgggcagctgctatgtcgcactgcacagtgtggcgtagcgcagcgatggcaagctaagcctaagaaaaaaacatacgtgcatatagaaaccactgatattagtgtagacgctgacaacctacggagaaatttgtaattgcagttcagggatgtaaatctttttacgaggcaacaggtcacagttcttattgtctggtagtgatagcagtgtgcgcatttcaatatattctctgatggaattgtcttgggtttggatcataagttgtttcggctactttctcagatcacttcgattgtaagtacatccaga

SEQ ID NO: 23517 - DNA, 2336 bp, Zea Mays
gcatcccgcggccgcaccatcaacggcgcaacagccgcatccagtccctcccgcatcaacagcgtcgcagccagtccctcccgattcgcgcttaatccccgcatccagtccctcccgcatccagtccctcccgcggtgcaatccagacgcaaacaactccattgaccccgattcgcgtactgatcagagggccaggtgctatccacgaatgatagtgtaatgtctaggaacgatagctgatttggaaaacctgcaaagtctattcacaacaggtacactgccttcccaattaaggaaaaactgacactcatatcccattgaatttgctggctatgcatacctgttcagttcacaatgatataaccacttactttatgtaatgtgaatacgtttattaaaatagttatgatcagcatatccttccttaatcgacatatttttttcttctatgtaccttctattcaggttacgaatactgtaaagataatttagaatttctcatacaaatccttaaccactgtaaatatatggggaatttctaaaatgtgtttagattcatacatgtacaagtttgtattatgtttttatgcatatttatgaatctaccttataatcgattttatattgttgtctcacttattcctctttaaaacacacacttgctgttttcaaatttcaagtcactaattgttactgttcttcctcaaaaaaataccactgtaattaagttgccgatgcagtgatatataatggtcacctattatgaagaaatagtgaatgggagaagggttgagttttggagccggtgcatgcaaatcatataccaggtttatgctataatgttttccttatgaagaattaaatatttgtgtgtttgcacagcgaggtcatattttcatattgattttctgtacctgggactttggagaggggaacacgttccaaaaccggagcgtttcatcaccagccccagtaactatggtctgttggtatgacctcgctgaggttgttgccctcaccgagagcatcggcaagccgctcgccgaggtgctcaaggagctcgggaagagggttccagactcccttgtgaagacccgcatcgaggatgatggcttcactatcaactcgagaagagggttccagactcccttgtgaagacccacaactagagaaataggatggagagggaaatttactaagagaggacgtgtaacaaataaggccaggaattattagaatgaatggaaaatgtcctcatacacctttggagattttatttcgcttgtgggcaagtgaaatcatatgagagggcaataatctccgtggagcaactgaatgctattcttagacaggcttctaaaaccaaggaaaaggaagatctcaggaagatagataactggcaatatattagttgtgtcaccctatgggttcggtttctgtgttgtcactataaggattacaatctccatcccttattttctcaagttcttcaattgctctttgactgcctagaattaagagaagtttctcagaaagaacaaacacaaagaacaaagatcaacttttcgtctttgttgaaggtgccaaagaacctgctgaaaccaagggattttcaagaggagtgtattctttcagcgattcagattctatcagcacattttgcccagtggagttaccatgtttccttcctagaagtagccaccattcctcttgtcctcttgaagaggctacatgagcagacaacagttgaatcacttcgccatcctattaagtgtttgatagaccaggtgacggagaacaaggattttatagaaaggaaaagagaggttgtatccttttcaccaaatgataaggcgtcagttgatagcttccttcagtcaattgcttcacatttactattcaacatctggcctgctgagtttgctgaaaaacatattactgttgaatgcaggaggagaagtccacacagaatgtcggacagggacgccgtggcccccgcgggcggcggtgaccggaaggcggccaagctcgggagctggagcagcatgagcagcaactacggcaacaagaagcggaagagcagcagcagcagcttcgggaggagatccacatccacctgcgaggaaaggcagggggtcttccgcatgctcatgagctggaaccaggagagccggttcagcaacaagatcaagacgacgacgagcaaagaaagatgaacgaaacgaagtgttcttagcttggtgtgattattcggggggttgcttgctggagggtttttgttcgtttagtgtctagccttagcttacttattacttttgttagtactctactagcag

SEQ ID NO: 23518 - DNA, 953 bp, Zea Mays
agtacttgtagtcggtgccgtgttaaactgggttttaggtggtatacaaggcagcttagtatggatgaagacggcgacgtggctgatgagttcttggatgaaattatcccagaaagctcagtcaacaacgccaaaagcccagtcggaaggttccaagtgaaatataacacgaaacgaactgctctagcattgaggaagcatgtcattgctgtcgatggcgagatccgccatagcttggaacaccaagggcaactgcggtgggtgtgaccgagtctgttgagcccatatgaaagtgcaggttgggcagaggcaggcgcgcacatgggcgaagcgaatgacctaggttacccatctttgaagtggacctagaggtagttcattgctgatttatccatcgttctccgctcagtgtgttggtacgcctgatctcgaggttattcagacaccttgtaccactagtagtttgtcacgatatacctgaggatagcttccagcctccaggccacgaagggaaagcatgcccaataggagaatttctgggccagaatgggtcctgtaagcggtgcagtggagagtttttctttttctgttggcagtagtgaacgggtttattatatatatgggagatggttcgtgtggatgagactaggctgggaactgaagattgaaccggctgcctccgggagggcgctcctccagataaatctccagtgattcgtgagaggaaacgaacaccgggagcggtgttcagattcctaccgagttcttacatagttgtacattattgaacagctaccgctggacaaattgaatgtgcttggctggcaatggagccaccgaatccgtgcatcagatgatgttggttagccattcattcatgtatgctgttcggccaatctgcgagctgacagactgacggaaaaaaaaaatagaatgtgtgaatgtattccttc

SEQ ID NO: 23519 - DNA, 2551 bp, Zea Mays
tcgaattccccgaggcggcccataatgctggctgggtcgtcctgaccaattgatggttctgcttctgctttaccactcaatcttgttgagagtcgccggcgccggcgattcctcctccaccgattcgcccggcgggagtctccgcagggctcaccgggaccgcgggtccacgatggccgccaacttctggacgtcgtcgcactgcaagcagctgctggaccccgaggacgtggacctggtgccggcggcggaccgggagcgaggcatcacgccggaagagttccgcctcatcaagatccatatgtcgttccatatctggaggctagcacagcaggttaaagttaggcaaaggttaggccttgtttgcataacctgatttatttgcttcttttgtgatgctaaaaggaacgtgtttgctatcttgattacttactatattttgcacttcgcatgtttccttctacatcttgtaacttatatagatggtaaaagaattagagatcacatcatataggttgttggtttattaactgaaaatcagcacacagagatatttagttggtgtttggcgagtggaaaatgatgactgtggatgggatatgaggaatcggttatatctaaaccccaaatttgcatagcgtgaaagggatgtgctgtagaatcgtgaatgggaaatgaggagcttttatccaccgatctaaagaggcgagggaggtgggttttgggtggggcccttttaatcttatacagtagattcacaattctatttgcttggctactggggacacaacttactggttggatctatgttcacttgttttgtcacttcttttttgtatgcttctttggagcaattatttgcagttccaggttgaagaacgcttcagagatgtcatgaagagaatcttcagatttcgcaacaagatttgttttgctgtggtcatacttaaattttctttctgacttaatgaggagcatctttattattaaagattgttcctaatctaaaaacccagtgcagaacattggaaaagtacaggatactatccttctcaaaacccatcttttaatatcccagtcccagtccatatcacaaacccatggtgcatccaaagttccaaacgccaccttagtgtttgttcctcccccatcattttgttgctgatgttcctactccaggtgcaataataagggggtgtttgaatgcactataactaatagttagttggctaaaaattgatagtaaaattagctagctaacaaagacctacctgactattaactaatttaccaaaaatagctagtagctgaactattagctaggttgtttggatgtctcaactaattttagccactaactattagctttagttcattcaaacaccccacaaaatgttggcatctttaagagaaagatgagtttgtcaaatagaattcttatgttactgtatgctcatcgaccatatgagtgcaacagtacttacaggattacagtaaaaagtaatattgagtgcatctcaagtctcaacaaatgaagtttttacataacatgcatgttatatcctgtctttagcttgtctgccaagatgtgatctttgtgaccttaaactgttgttatttcagagttgtagctacagcaatagcttacttcaggcgtgtgtatacaaggaagagcatgtcagactatgatcctcgtttggttgcacctacttgtttgtatttggcatctaaggtggaggagagtacagtgcaagcccgacttcttgtattttatataaaaaagatgtgtggttccgatgataagtatcggtttgaaattaaggatattcttgaaatggaaatgaagctcctggaagctctcgactattatttggttgttttccatccatatcgtcctctcttacagttgttgcaggatgctggcataacagacctgacacaatttgcctggggccttgttaatgatacatacaagatggaccttatcctcatataccctccctacatgattgcactggcctgcatatacatagcgagtgttttgaaagataaggacaccacagcatggtttgaagagctccgtgttgacatgaacatagttaagaatatctctatggaaatattagacttctatgacacctacaagattgatcctcaaaggggcatccctgaggataagataagccccgtgatgaacaagttgccggcaaaggcttaactcagatttggcgagcttaggagttgtaaactagtagtaaactacatcatacttccaccatgtgtgtactcagcctgcactgtcgcttgagacgtgttgatgaactacttgatagattcgatgcaaaaaccccatggaattgtttgtgtatgctgctggagtttattcaagttagtagcatctgcatctattaactatttattacgattgttattccagggttcttgacattaatatgaaaggtgctactttgttttacccgaagatgttttcaagcttttggctgttaaaactgcatcaccagcaccggcggtgtgcacgctgggatccaat

SEQ ID NO: 23520 - DNA, 834 bp, Zea Mays
cggaaggaagaggtggggcggggttgggcgtagagaagccaatcggcgcggattggagtatattaatgaatgagcgcagagatggacacatcaagccctgcagcacttgtcaatgcacagatgctgaacatgtttgttgggcgaagagtgcgcacggttgttcaagtccaacacaatgaaggtggagtgcttgtcgggcagtccaccgatggccatcagttatgtgtcaaaagtgccatggacgtccccgtttcacactttatggaggtttatggaattgctgaaaacagccagaccatccgtgctgaagtttgcacagattttggtcccaactttgatcccaaggtttttgatgagttgtgcaagctggcgagtggcaggttcaagcacttgttcctgtagagataatcatcgcatggaggatcttcagccaactgaagcttgtttgaaactgaatgtttcggctttaaatttaagatttggctacatgttccttcattgcatggaggaccttcagtaccctgttactcgtcattactggacttctattagcatgtataagcaacgtaggactgcgaatacaagcaaaatatgtcatgtagttgaagaacctatggtttttttctacctttaggcaatccaaccctaagctaagcaaaatatgtcatgtagttgaagaacctatggtctttttctacctttaggcaatccaaccctaagctttttatgttgctgtcgcttgcattgggaccctgagttgctacaattgtcatggagtttgatgagaggaaaaatgattctaatatgctagttctaaatgtcaattgaactgtt

SEQ ID NO: 23521 - DNA, 3288 bp, Zea Mays
tcccctccaatccggcaccctcctctctcctcaccccacctcacgcaggcggcattaatggattccgcagccgcggccacctccctccgccccgcgtcctcccggccgcggcgagagccctgacgtgacgcgcttccccccgcacggatcctcctccctccacgccgtcgtttgctcggggtgttcgttgggggagaaggaaaaggtcgctaacctgtgagcttccacggcgactcggcgcggcggcccaatgcggctcgatccggactgctcaacgcagtgattcgcctcgggttgggcgccggctccgtgagcccccacgccgttgaccccacgctgccgctgctccagcgccgccgtctccgcctcggaaaggttgcggtgaggagaaatggatgtagagaaacctgcttccaaggcgcatggtttctttgcgctcttcgattggggaaagaagtctaagaagcgcctgttcgtcgggagcaccagcagtgatccaaatctgaaggatgctgcagatgggaaggatattgatgatagtacaccaacaacaagtacacggtcaaattctatccttgaagatgccccaagtttgaaggaaagcagtgagcacagctgctcatcttcagtaattgatgaagaagctcagtcaagaagaagtccgactgttgtggctaggcttatgggtttggattctatgcccgcggcaagctcacccgaatccaatcccgttccattaactgtgcaaccccctttccaacccaacagccacgaggatttgatcggcagaagttatgttggtagtccccttaagatgccgggtagtcctattgatcggtttaaaatggaagcactgcctccaagacttgccaagaggacactatctgtcgcacagtataagttgctgtctcccatgaaaaaccctaaccatatatccagcaggaatgcagctgatataatggaagcagcatcaaggatcatcagacctggagtagaaaatatcagttcttacagagttcacgatgttgggaacacaaatgctgcacgtgcctacaacccaggagagctcataggagtccaacaaaggtcacagaagcttaatgaagcactgaggaaacgtgatggctctgcgtcttttaggccgccaagtggaaaaccttcagatggaaggttgagaggttcggagggcacctcgtcttccaggatctcacaggcaaatggatgtgctccagttgctccaaaggtcaaacccggcaatagattagatactgctcgagctatgcatgcccaggaaaaaggggggatgagaaaatttggtaaaaagcttgaaacccacaagaaccctgaaaatagcaatgctgaaagaagtgggctgaacagacaaaaggatagtaaccaactgggcacaagttcgtctagtgtgcttgtgccaaacagcagaaaacagaatgctacagtcaccaaacataaagtgcactcaaacccagcaacccccagtaggcaacggagcaatattcaccaaataaatgcccatccaagaaaagcgagggctgccaacacatttgctggaagcagtagtcaaggtagcagaaaggtggacttgcagccagatgctcgtgcaaatgtaagaaataattctgtatccaaagcaatcccgaagccaagaagattacaagacagaagagtgtactctgatacaagccagtcaagtgatagtattaattctgacaggagccagaggcggattcggcacaatattgtgattgatgagcagtcatctttttcaacaaacaaaaagaaagtcagcactgagattgtttcattcacatttacctcgccagttcataagtcactacatggcacccacttccccaatcattcagtggaaaaacaaatattagggaatcagaacactgtgtcaacttcaagcaatacatcaaacactaaacttgatgtcatagatggaaaatttttgggactcctgttggagcagaaattgagagagttgacatctggtgtgagatcaccctacactaaaccagccgaaggtgctcaagtgtaccacacttcaacagctttggaagatatggcatcagcatgtgaaacatctagcattgcttctactgattatgatagggagtcattacagtctttcagtgatggaaaagctactctgccctatacaaatcttgctactagaagtgtccagtcatctcagcctgtgaagtacgatcatggcgtcacggaccgatcagagctcgagcatcttggccaaagcccccttttcacatgggaggtttctatttcaactgaaacctgcagctcatcagagagctggaggaggcctgcaaatggaggaacaagactgttcagttcgaccgaaggagcgacaacttctgattcgacgcgcttcaacaaactcctagaagcggacgcctcttcagaatactccgacacggcctcatcaatcacagtggccacagcagaaatcgctcgatcagaaagtagcagctcgtggcatatggatagcagacaggaggtggagtttataagagagatactgaacgccagctctcccgcccgccgcatctcctatctggagcggttcggcaacggcaactcttcgggtattttggatccacatctactggaggagttaaatggcggcactaggctgctggccggtgaagagggcaaaggtcacagactgaggcggaggctgctcttcgactgcgtcaatgaatcgctgagcgtgaaatacgcgcactacttcagcgccggctacagcttatggttcacggggatggcggttctgcagagcctgtcggcggcagaaatgcatcgggagatgacgagcctgacggtcgccgaggagtggatggtggacgagctcgtgtacagggagatgagtggtcctatggggagctgggtcgatttcaggactgaagcgtaccaggccggcggagacgtggcggcggagctgctgggttccttggtcgatgaagcggttgctgaacttctgacttccggcggctcgtcgtcgtctttgtagctgatgttggattggattggattgggtccccgcgctaacgataccagttgacagccgcaaggtttttgctccatgtattgttccttgtttgtatcctgtatatcggtaggtcgctcgagaaattcgtgtagcgtagcattcctaagatgaaatgtcactaacttacaattgttcgatggttgatcggtttcctgccgagagtggaaagaagaaacattcttgacctgttcactgtt

SEQ ID NO: 23522 - DNA, 2009 bp, Zea Mays
tttatttgcaggccagatttctttgtctgacttgtggaagcctcttacaactattgtacaaggctgctgtattgaagatgtctgagttccttgacctagagctacaagatgggataaggatgccctggaatgttattccaggcacaaaacaggagactgtgaactatacttgcatgattgaagaagaaattggttatttgaagtctgcactggcacaagctgttgagctattgccagataattctcttgttggattcattacgttcgggacgtatgtgcaggttcatgaattgggttttggcttattgccaaaatcatatgtattcaaaggaacaaaggaggtcaccaaggagcaaatattggaacaaatgtgcttttttgcggggaagaaaatgcctaccacaggcgtgattgctggtaccagagatggcctttcatctgagagcatctctagatttctgctgcctgcttctgaatgcgagtttgtattgaactcagttatagaagaaatacaaaaggacccttggcctgttccagctgatcagcgtgcatctaggtgcactggagctgccttaagtgttgcagccaatctccttggggtttgtgttcctggatcaggtgctaggataatggcatttgttggtggtccatctacggagggccctggtcctattgtatccaaatccttatcagagcccattcgttcacacaaagaccttgataaagactcggcaccactctatgataaagctgttaagttttatgatcaaattgcaaagcagcttgtgcaccaagggcatgtgctggatttgtttgcttgtgcagttgaccaggttggagtcgctgaaatgaaggttgcgattgagaagactggaggaattgttgtccttgctgaaagttttggtcattctgttttcaaagactcacttctccgcatctttcagtcaacagatgacaaccttggtttatcattcaatggtattcttgaaattaactgttcaaaggatgtaaaggttcaaggcatcattggaccctgttcttccctggagaagaaaagtcctttgtcttccgacactgttattggtcaaggaaacactagcgcttggaagatgtgcggccttgacaggaagacatcactttgcttggtatatgatattgcaaaaaaagatggcccagattcaattgctcaatcagcaaacaatcagttctacttccagttcttaacctactatcagcataatgagggtcagatgagattaagatcgaccacaatctccagaagatgggtctctggtgacaaccatgtggaggaactagtagctggctttgatcaagaagctgcagctgcagtcatggcacgcttggtgtcatttaagatggaaactgaggttgattttgacccagtaaggtggcttgatcgagctttgatacgtttatgctcaaaatttggagattatcagaaggagacaccctcatcgttcagtttatccccacggctatcaatatttccccaatttatatttaatttgaggcgttctcagtttgttcaggtttttaataacagtcctgatgaaactgcgtattttaggatgatgttggacagagagaatgtaaccaatacagttgtgatgattcaaccttcacttatatcctattcatttcaatcagggccagagccagttctcttggatgcaactgcaattgcttctgacaagatccttttattggactcttattttactgttgtcatattccatggggtaaccattgcgcagtggcgaaatgctggctaccaagatcaagaaggtcacgaggtttttgctcagttgttaaaagctccacatgaggaagctaatttaataataaaggagcgatttcctgtaccccgtttggtagtctgtgatcaatatggatctcaggctcgatttttactggcgaagttaaatccatcagtgacatataactcggacaatccctcccctggtggagacgtcatattcacagatgat

SEQ ID NO: 23523 - DNA, 275 bp, Zea Mays
gcaacaagccgcagcgaacaagctgtcacttgtccgtactaggatttttactcatccagtcattgtcgtctggttttgtagtttcatgttccaccactccattgtttgtgttacaaattattgtatttgtgatcaatccaagggacgcgacagataattcccaaaggacacatcccttgggaactcaccccttcatatgtatataaacataacccctgctgcaataaagaaacaactgtcattctttctgtctctctactggtttaccactgagt

SEQ ID NO: 23524 - DNA, 1699 bp, Zea Mays
aacaacttcctgctaaaagttagcaaggaattggttgatacttattgatggtgcctgaaatatcctatagatgtctttagtagaggatccaaataatggcctgcaaggtttattgaatcggatcgcacaaaactccatctgcttcagaattgagctaagcgcatcctaacatcttgactcctatatcgatcaattatttttgttacacatttgattctttagtttcgtagagggaggaacatcgtgggatgcaggccccacggaacaccagatattttgaggtagaccgcggcgaggtgcccaagggcagcgcctagatcttcttctggatggtcaagttctgtaacgacaatgtggcagaggagatgccctgatcttcgtacgtatgttacttactcccactctcaacatagcagtagtaagtgcttgtttctgatgaatgtatcaatcaatgctatgcgtcactgtgaaatgttcttctcaaacattgtcatttgatctgatgtataatgtaatgtggcatgtcctccatatcagagttctccctgcttatttttgatagttttgtgtcccagttataggtgttatgcaatgacctgtctttccctaatgcaccaaagcttggatgggtccgttgaaggttgtgtggtttatgtatgcttgtttgctccaaatataggtgttatgcatgaataaagttcccgtgggatctgaagctttgttggcttaaaatggttttttttgtatttttcacatgagataatttatgacgagctgagcaattgtcgattatcttagtgcaattgatgttggagcagaagttagtgtctgtttctattttctaggtttctgtgtttcaatggcctcttgaaaattgaaaatggcctcttgtaggctgaaggatgtatgcatggaatagaagtcagataaatcttttgtgcaacaggctgaagtcattcttgttgatgggaaattaacagaggctaaggctaaccagcttgctaaggtttaaatgcaggtcagtttgcctactaagcatccacaaaatctcattataagttctgagaaggccaagtcaattgttcagtatattacaaaagtcaggttggagaactcccttgttcaggcttttgtctttcttctgcagaaggagagatgacgtgctgcatgacatgatggcatgtgaggcagcaacctcttctccgcaacccttgtcatggcctggagttggtgttctaggaaggagcacaattttattagggtagccaccagagttgaggtcccttttcaatggacgaacttggtgctgtggacgacatctgctattgtagctaggcgcatacatgttttcctataaatgctagctctgcaatcaccaaaggaaaacacaagagtactcttggaggaaagtttagcattcagtttaacaaaccttaccaactcatgccttgtttgaatgcaataatgcatgttatgttgccctgttgttgcttggacacatgcttggcatggctattttctggttatgtcacaactcacatctcccatgtaaatttatggctatgatatgcatcaaacaagcttatattttgctcttaagttggttcaaacagttctaattcattttaataattatctaaaattggtttgataattggtgcaataaggaactcatttgaaaggtaagagttatgtgttg

SEQ ID NO: 23525 - DNA, 2718 bp, Zea Mays
ctcacatccacgtcactgagcatcagtgggtacacaccgccatgacattgataatgctgtttacaggaggcagaaggagatgaagacgagtgggatcgagaggatcaaggaaatgctgctgtcaaggttatgtgccgtttatgcttttcaggagaaaatgagggcagcacgaaagctgccaaaatgcttccttgcaaactctgcagcaaacgatatcatagaaactgtttgaaaagctggggagaacatagagaccttttccactggagctcatgggtctgtccttcttgccgcagttgtgaggtgtgccgacgtcctggcgaccccaacaagttgatgttctgtaaaaggtgtgatgacccttatcactgttattgtcagcaaccatcgcacaagaatgttacccatgggccatatttatgtccaaaacatacaaggtgccacagctgtggatctggtgtgcctggtagtggccatagcacaaggtggtttttggggtacacatgctgtgatgcgtgtggacgattgtttgtgaaaggaaattactgtccagtttgcttgaagtgaggaaaagtaccaacaattccaagctgatcaaaaccttcagtatacatgtgcagcatgccgtggcgaatgctcccagatcagggacactgaggatgcaatccgggagctttggaagaggagggatgttgctgatcatgagctcatgattactttgcgggctgctgctaaactgccttctcttgaagatgtgtcaccgctttatccaaactcggatgatgagaaacttggtgcatacgtattgaaaagtgagagtagaaatacactaaaattttcattaaaaagtaacagtagtaagcctccaccggatacacctgagcaagagaaggttgtttttaagagctctggatcaaataaaaagccttccaaaaagaaaggtggtcagggtaataaaacaaatgatggccatgatgaaatatttctggagaggaggcatgatgttaaatcatcaaatagccgtttgggagatcaaagtatagatggcaatcatgatatgagcccttttaagaatgatgataatgcctatatttcatcttcaactcgaagttcagaaaagaatttgaaatctccatccatgaaagctgtgacaaacaatgctgatatgatacccaaagtcaagattaaaggcagtaaggtttcgagtttgcattacaaagatggtgaagaaaatacttccaaggctgacactggaaaagctaccaagttggttatccatcttggttcacggcataaaactaggagtggctctcctaagtcggagctgtccaattatcaaagagagcaagatttaggatcaatacatggacggaaattagatgtcacaagccagctgaaaggttcaagaagcgaggtaaaagagagaagtgtaatgaagttagttagagagactggggtacaacaaagaaatagccttttgggtgatcttggtacctcaaaaaagcatgcaactgggaaaaggagcaatgctctaatttctggaatggagaatggaaatgaaactggtactagaaaccggccatttgcacagaaacaatctcattctagtcaggtggacgagaaccagggaactgctgactctcctgataacttgaagccatcattgctcaaactcaagtttaagcgtccacattatgagcagctaaacacccaggcctctcaaccagaggagccgacctcctgggtttctcagcaagaagaccagttcaatgttgctaaaggccagagatcaaagaggaagaggccttcgatggagaaggcagatggtttggatggtacgactccagccaagaggcatcatcagagcactgatgatgaagtgatggacgcaaattggatcctacgcaagttgggcaaggatgctatcggaaagaggattgaagtccatctaacttctgatggcaaatggcatcaagggatggtgtcgaatgtcatgggtggcacactgtgtattcagttagacaatggcaggtctgagaacgtggagctggggaagcaggccatccgcttgattgcttcaagatcaaagggccggaagcgatgaaacctttttccccatgtgcagcttaggacctgttctcgctcaacccattgccgtgattatggcaggtagagttctccccttgaggtttgacatccgctgaagcacagcagtgaccacctgctgttcatgtggggaaacgcgctgcctctcagcctttgctgctgactggacgagataccgagcgcaacgtcatctgttgcgccatgtttcgctagcctagcgtgtaacagactttgttgccggaagcccatttgctttccattagaatctgctagggtagggaaaccgaggaggttttagattaccttggatgtaaaagaagcaggtaacgccgctgtatctggggtgttttgtacatgtggttttcggacgagtttctgaacaactcgttattgacttatttggtggcgttatttgctggccactggccgggattttgttgtcttgttacatatactgacagtaataatttgtctacatatataagctggcgcgaaacgggggctttgttggaggcgaatgcgacgaggacaaaggcgactcagcatcattattgtaataccatggtttcaaagggaatttcaggaagggaataaatagttccttttaaatta

SEQ ID NO: 23526 - DNA, 2679 bp, Zea Mays
acgattcaggagtcaggacccttgtttgcctatacgctgccagcctgccttttctaagttcttcttccatcgctccacccccacccccttctctctcgtagcaacgtttggggcgccgtcgctgccgctctactcgggtgcccaggtcttgttcgggcccttcgccggcgagccaggggacactttctttggtatgagaggatcaatgtccaattattatgatgattacgacgacattgatgagattgaggatgactatgatatggatgatcctgctgatgacatggtagacgagcagcgaggggttagggattctgatgcggaggataatgattatggacaaccaaatgacaagatcccagatacttcatcagcagatgcaagaaatggaagggacattcaaggaataccctgggagcagctaaacataacccgtaaaaaatatagacagtccagattagaacagtacaaaaattatgagaatgtacctaactctggagaagaagctatgaaggattgcaagccaacagagaaaggtggaatgtactatgagttcagacgaaatactcgatcgattaagtcaactattctacattttcagcttcgaaatttggtatgggctacgtccaagcatgacatctacctagtatcacattactcaattcgtcattggtcagcattgagtggtgtcgatactgaacttatcaacgtccaaggacacgtggcaccaagggagaagcatgcaggaagtttatcagagggtttttatcagactcaagttagtaccttggcagtcaaggacaatttactggtagctggtgggtttcaaggagagctgatctgtaaacaccttgatcgggaaggtattagtttttgctgtcgaacaacttatgatgataatgctattacaaatgcggttgagatatttaatacctctagtggcgctgttcacttcatcgcatcaaataacgattctggtgtgagatactatgacatggagagattccagctattcaagcatttgcagtttgaatggccagtgaatgtaggttcctttggcttcttagctatttccgttacctttatgttctatatttggatcttcttgttggtgctatcattacaaggtacatctttctacacatgctgtctgcagatgaaatttagaatagacttcattgcttatttcatatgccccatagttgtgcttgtactatcaacttattctagtttcttgggtatgtttttgacctattgatcaatgaatctagcaataccaagacaaacttataggtggtttgtagaaaaaatccaaaatgtctttacatttctgttgcggcagtgatgacatagcaggctcccatcttatggatacagtattaataaaaagagaagtgacagccttcaatacttggccattttggacatggaacccttagttcccctcttgtcaccttttctagcataatgtggaggataagtggatccaacatatgtatgaatttcacaaatataagtactatctgttccaaagtaaagttcaaataaatgtaccatcaagacatatttcatgataactgaatgggactgatttgatgctgtagatgttggcacattttttctaacttggtcaaagttaaagaagcttgactaagaacatagataaagtgagctataatttgtaatgaagggagtaggtcaagcttagtgcatttctttgctgtatctgtgtttacctgtagtttgttgatgcagcatgcttctttgagtcctgacagaaaggtcgttgttattgtcggtgatgatcctgatggtctacttattgatgccaactctggaaagacactccattccataaaaggacatcgggactactcatttgcatcggcttggagccctgatgggcgaacatttgctactggcaaccaagacaagacatgccgaatctgggacgcgaggaatctctcaaaatccgtccatgtgttgaggggtaaccttggagccatccggtccatccgcttcacctcggatggccagttcatgtccatggctgaacctgctgactttgtgcacgtctacgacgtgaagagtgactacaacaaaaggcaggagctggacttctttggcgagatatccggcacatcgttcagcccagacactgacgcgcttttcgttggcgtgtgggataggatgtatggcagcctgcttcagtttggccgcctgtacaactactcgtatcttgactccgtgttttgatgtggaaccaaacggatgttggactgttgggtttggtgtgccgcggttctctgaatgttgtcagcatgattaggcggttatccttatatcaggattttaagttgacaaagataattgaattaataaatgttgtaccgtgcccgatgtgtatatataaaagaaatgtatacatatgcctattcagataccgagttgagatgtgacttggtctactccatgtgtgattgatgaattggttgtcgaagaggtttaaagctttcgacgcttgaagttgaacacagtgcgtgtagttccatgtaggttgtaagccacatgtagtatatgtttttgtcatgggactagtggtgataggaggtctattggctcattgtttgtgacatgataggaatgtaaggagaaagtcttttgtctcatggtatgtga

SEQ ID NO: 23527 - DNA, 1234 bp, Zea Mays
atttttttctcgcgtggcgcgcgacgcgaggcgctgcccctgctccgggtccggcgcgcgggcaacctggcatgccgccgtcccgagccgcggctcgcttcgcctcgcctgcagcagatctcggttcggcgccaaccgcaggtccgcagggcacgagacaactcgttcttccgcgggaccacacatccgccgcgtcgcgtcgtctggtttccttccggacaaggacggagcagccggaatgcccgatgcatgatgcatgagatccgtccaaggcgcgcgcggtccttgtccggcggccggttcgggagggggaacaactgaacaaggcggaggagcccgggcccggaggggagtcaacgaggccgagccggtcgacgtaaacgcggtcgaggtgaggctcatcggaacctgcaagtcaacccgggtgcgccacagcgtacacgtccgatgacataattactgaagcatgttcgtaacaattgacgtgttactttccgtttgcttgctgcaaataaccgaggtttccatcatatggtaatcatggcaactgcatacccggggcgccgttcagttcctcactgcactcactgaaaaggggaaaaaaaacccgccacggtttttactgggtgatcaggcgacgcatgggctcccccatgtgcagtgctggacactggacgggatcacgggacacgcatgctgctggcgctcatcagggacagacaggatcagggaggggtaccggggcgggaaggccggccgcggtccacgtgccccaccaacaccgcggaaaactttgacccagcccgtgctgcctgcttcaggtccgtccatggtccatctgatgctgtcgtgcctgaggtcttgtttgtttggattcaaaaacactttttagaccaacgctacggtgttctgaatttcagtgtgccgtgctaaagtatctggatgcattaaattctatgttttttctttctttcttgaaagcatagcagaacggtgcctgtcattccatccatccatccatccatccatccatccatctgctgatcgaagactccaaagcaggcaggtaaagatacgtaccccagcgcaagcaaagacaaaaaccaaacacaaggaaaacaacatttactccagctggaggagctgtactatacccccacttgcctccgggcgtctgtccgtggaccgagctttgagctctccccatttcattaaaacttcctctaacctgcca

SEQ ID NO: 23528 - DNA, 4050 bp, Zea Mays
cccaacccagctctgcccctctctctcttaaaccccccaaaaccaaaaattaaaatccgccttctttcttctcccccgactccctcttccggtaagaatccggcccgccgccgccgccgctagcgtcgccgcgctcgctgcttctagggctgcgccttctcgcgcctccggtgccttccctgctccccacgatcccctgcctccacaagcttccttcacctgctcactccaaccgctgccgccatggcggagaagctcagggatctaagccagccggtagacgtgacgctcctcgatgctactgtcgctgccttctacggcaccggatctaaagaggagaggagcgccgctgatcagatactacgtgacctacaaaacaacccagacatgtggctacaagttgtacacattctgcagaattcccagaacctcaacaccaagttctttgcattgcaaatacttgaaagtgttatcaagtacaggtggaatgcattgcccgtcgatcaacgtgatggcataaagaattacatatctgatgttattgtgcagctttccagcaatgaagttacctttcggcaggagaggctttatgtcaataaactcaatattattttggtgcaggtactgaaacatgagtggcctgccagatggtcatccttcatacctgatcttgttgcagctgcaaagagtagtgaaactctatgtgaaaattgcatggctatattgaagcttctaagcgaagaaatttttgacttctcaagaggtgaaatgacacaacaaaagatcaaagaactgaagtcgtcacttaacagtgagttccggctcattcacgagctatgtttatatgtcctatctgcaacgcaaaggccagagctcatccgtgctacattggcgacactccatgctttcttatcatggatccctgttggattcatctttgagtcaccgttgctggagacattactgaagttcttccctatggctgcttatcggaatcttacacttcaatgcctaacagaggttgcagcacttcagtttggtgatttttataatgtgcagtatgtgaagacatatacatttttcattattcagttgcaggctattcttcctcctgaaaaaatcccggacgtatatgctaatggttccactgaagagcaggcgtttatacaaaatcttgcactcttcttcacatcattttttaagaatcacatgcgtatactggaaacaactcaagaaaatattgctgctttgcttatgggtctcgagtaccttattggaatttcatatgttgacgatacagaggtttttaaggtgtccttggattactggaatgtatttgtattagagctatttgaagcacacaatcaaatggaacctgcagtaactgcgcagatggttcctggaatggtagatgggggcacagctgttaaacagaggagacagctttactctggcccactctcgaaactacggatgctgatgatttgccgtatggcaaagcctgaggaagtacttattgttgaagacgaaaacggcaatattgtacgcgagacaatgaaagacaacgacgttcttgttcagtacaagatcatgagggaaacactgatctatttatcccatcttgatcacgaggacacagaacaacagatgttgaagaaactaagcaagcaattaaatggagaagactggagttggaataaccttaatactctctgttgggctattggatcaatatcaggttctatggtagaggagcaggagaatagatttctggttatggttattcgtgatttgctaaacctctgtgaaatcacaaagggaaaggacaataaagctgtgattgcaagtaacattatgtatgttgttggtcagtatccaagatttctcagggctcattggaagtttttgaaaactgtggtcaacaaattgtttgagttcatgcatgagatgcatcctggagttcaggatatggcatgtgataccttcctgaaaattgttcaaaaatgcaagcgcaagtttgtgacacaacaggtgggcgagaatgaaccatttgtttctgaacttctgtccaaccttgctacaaccatcgccgatcttgagccacatcagattcatacgttttacgaatcagttggccatatgatccaagctgaatctgacaacactaatagggatgaatacctcaagagattgatgagccttcctaaccagaagtgggcagaaataatcggacaggcaagccaaagtattgatatcctgaagaaccaagatgttatccgatcagttctcaacattctacagacaaacacaagtgttgcgagctcacttgggccacacttcttcccacagatttcactaattttcttggacatgctaacagtctacagaatgtacagcgagcttgtatcaagcacgattgctgaaggaggaccctttgcctcaaggacgtcatttgtaaaactcttgagatctgtcaagagggaaaccctaaagttgatcgagacttttgtggacaaggcggaagatttgccacatataggaaagcagtttgtaccaccaatgatggatcctgttcttggtgattatgctagaaatgtacccgatgcaagggagtctgaagttctgtccttgtttgcaacaatcattaacaagtacaaaggggaaatgcttgaggatgtgcctcgtatatttgaggctgttttccagtgcacccttgagatgattactaagaactttgaagattatcctgagcaccgcctcaaatttttttctttgcttcgtgcaattggcacccattgcttccaagcattaatccagctttcaagtcagcaattgaagcttgtgatcgattcaattaattgggcgttcagacatacagagagaaatattgcagagactggccttagcctgttgttggagatcttgaaaaaattccaggcttcaggattccaaaaccaattctacaaaacctactttttgacaattgagcaagagatttttgcagtcctcacagacacattccacaaacctggtttcaagcttcatgtttcggtgctgcaacacttgttttgtgcggttgatggtctaacggagcctctatgggacgcgtcttctgtaccttaccaatatacggataatgctatgtttgttcgagattacaccataaagctcttagggacatcatttcctaacatgacagtaaccgaggtgacaaagtttgtagatggtcttcttagttcaaaacttgatcttccaagcttcaaaaaccatattagagacttcctggtgcagtccaaggagttctcagttcaggataacaaggatctatacgcggaagaggctgctgcccaaagagagagggagcgccaacgtatgcttgccattccggggctcattgcccctagcgagttgcaagacgagatggtagattcgtagtgttccttgttgattcagctctctaatgtagcttcctgtttgttggtccggcatcggaatacctctggagccctcgacgtccaagttttcttccagggtggtgaaagaaggtgcctgctgtaattttatttttggttacctccacatgatgctgattccaagatttgtggtagtagacagtcagttttgccgcatgactgctgctgggggtctctcagcagctgtggttgcctggatgtgttagcagcggctcttgtgctcggtgtactttgctaacattgatttgctgtctcatcaacaagggtaggtttggcttggctgtgtatggagaaaaaactatgttcttttgttagcactctggtgcggagattacatatataaatgtagtaatttgttctgtgctgattatgtatacgaggaatcagtttccttgttggattcagagcagctttagctactggttggcaagtgggagagagacgatggatgggaccacccctgcccgtctgtctttgacgtccacacgcgtagtggtatttgacaagcaagataaagaggggagcgcatggtttatttattttcatgtacacaactaactgctgatgcgtaataatt

SEQ ID NO: 23529 - DNA, 1925 bp, Zea Mays
gccaacagagcaacgcccaggaacacacgacacgaatcaggcaaccagctgccgagggaggaaccctagcggaacaggtgacggcggcgcgctaccggtgacgggggatacggcggcatcgtcctcctcggcccctcctccatccccggcgtggcggcgccagcagccggcctgcagaagattaaaggagccccaggagccccaactttcggaggacgacccagctgccttcaaagttcaaaatcaaaatgacggtggtgagggtggacgagaaccctgcgccggatggagagaactctcccctagacgatgagtacgtctcggccgacgatgaacacgttgatgatgaagacaaggagaccgatagcatcgacgactatgaaaaccccagcgggacgccccagatgaagaagggtccctggtcgcccgaagaggataagcgtctcaaagactacgtcgaggtacacggcgcggggaactggaataaggtgcagcagaatgccaggctcaaccgctgtggcaagagctgtcgtctccgctggacgaaccacctcaggcccgatcttaagaaggagcctttcaacgctgaggaagaggaaaagataatcaagcttcacattagacggggccccaagtggtccatgatggcctcatatttgcctggccgcacagataatgaaataaagaacttttggaataccagaaaaagaagaaaacagagatgtggttcgcctctctatccagaatatatgctttctcaggttagtcataaagacatggactttgaaactcttggagagtcacatggcaagaaacggtcaaatgagtgctcaaaagaaaaggttgttgatgtgcaagaacttgtggatgagttaattgtatttgagcaccttgactatggtaaggatatagtgtttccaatcagacctttgaaatgccatgcatctactggcagtgtgcaaatttctggtgacattcggaaaaccttttgtcccactgatttgaactatgtaatgacaaagaatcagtcggtgcctgttggtagtgccattggcagtggctatccactttctgtgcccctgaacatgatgcctgttctgaaactcaagctccagacttatgttcaggttcagatgttgttttcgaccccagccaatgttatccagttgctagtttttctgatcttgggatctcggatacaccactaacatcaggtttcttgaatgatataacactagcaagtttgttgaatgtcaatttgaaggacctgtcacatctcaaccgacaggaacctaccaatgatacatcacttggaggagcaagtttattgaatgctaatttgaaggaccagtcacatctctctcagtgagctggaatgcatgtgcctgacttgtgggggcatggttttgaaattctcaggccaactttccttcactcgagagcttgatagagagaattcacgaggatggaagagtagcagagaagacactggacctgccaatgtatgccaagtacaaagactcgccttatctgagaaacccttcgaagcacgggagtactatcggtgggacccaggctgagatggattccaagtgagaagccccctggagggccactagataatctgttacttatttgccctatggtaaatgcgtcggtgttgatgcagaaacaattggactcattgtgagcttactcgcttcttttcgaaagtagttagtattcctcgaagtggtgtttttaccttgtaataaaggaaaaaaaataaagtggggttattgaaacttgagagtcaaatactgagatgttatgcgcgttttgatttctgaattaatcgatcggtatcacttgtactgtttttatacgacgatgctcgaaaccattcatttgtcattttaatttgatacacttgaagtcaacaatat

SEQ ID NO: 23530 - DNA, 1846 bp, Zea Mays
ctgaattttgcgatgcaggtgatgtgaaggttaatcttgatgtggttgtgtaactggaaactgaaaaaaaaagtatggagatgtagaggaagtttggctagatggtgcaaaaggcgacgccaagaagatggattatatgtttgatgcctggttttcacttatacatcagctacaagaaagggtagttatcttctcagatgctggaccagatactagatgggtgggagatgaggcaggagtcgcaggctatacttgctggtctcccttcaacaagagctctgtgacaattgggcataccactgctgaatactcatccagtggggatccttttggtcaagactgggttcctgcagaatgtgatgtttccatcagaccaggttggttctggcatgcctcagagaaaccaaaaaacgtgacaactctgcttgacatatactacaaatcagttggtagaaactgtctcctcattttgaatgtccctcccaattcatctggcctcattgccgatgaagacatacaagtcctccaggaattcactgagattcggcgtgcaattttctctcagaactttgctgccaatgccactgttacagcaaacagtgtgcgtggtgagcaagataatctgcagtttgcaccatccaaagtgcttgaagacgggatatactcctactgggctccgcaggaaggccaaacctgctgggaaatgctcttcgatcttgggcaatctacttccttcaacttgctccagctccaggagcctatacaactggggcagcgtgttattgagttccatgtggctatccttgtagatgaactgtggcaaacaattgttgaaggcacgacaatcgggtacaagaggctgctactgtttccagtcactgaatctcggtacctgaagcttaccatcgacagtgcgcgtgcagatccacttatctcgttctttggtgtcttcatggatcccttctcgtccatacatagtttgcagaatcatgtcaaaccaccccggacaaatagtaacgaagttacaatgttgaggatggcccatgcttctgtcaacaagagtattgacgcaatgtagttgttgagtgtacatctgtcagtattacttctagtctgccctggtcatttcaacatgccagaatcacttgcacgttgatttgttctttggactggagaagggccactcgatggtgggcaatgtgtgtatatcttcagatttgcttgccaaagctactaatacgagaactactctttctgcaatcatgcatggatatgttgttcccaagatcagctgttgaaacttcatgtagtctgtactagtgtctgttgaattatgtgccagcaggaagtctggggtttgaatgaagtgaacgtgcactctctcctctgagactccgtggatgtttgagtcaatgagttgtgatggcttaggggctgttcgtgagtagtgatgccttagggttgtttggttgcctggctaccatcgtgggcaggctgcaataatgcaacagagtttgtttgttacataaaccttagcctagccaggctgaagtagtgtacaaagaagtgctagcctggctaaattagcacatcagacttaagcatttctagatggccaggttacgtttaccaaaatcgaaataccttttcaactagctctttttcttatatctcagaactaaaatgtcttattattaaaccaatttcataattatgactcgactagtcttactatataaattttgaaatacaaaatagactagaccgaaatagataaccaaaaaactctaaccagccaaatagactttagatcatctccaacaagatgctttaaataaaatgcctt

SEQ ID NO: 23531 - DNA, 2471 bp, Zea Mays
cagtaaatttggttcgtgtgcatcaaacagttgcttctgtaggacctgtgcagcagtcatctcatggatcacgtcatctgccaaaagtgacagagcaaattcttttcatgctcaaacgcccaacaagaagaatcatctcagtaccagacccaatattttgttcactcaagagagacaaaaagaaactcaaggaataaaatatggataacgatcaaatgatcaatgatcaaccataagctatccatgcacatgtgaccgaaaaacatcacaatcattttttgctttgcatgcatatgatgagaatctgaaggttatcaaagtaccagtaaaccaagataatatgaacacaataattatatatgtttttaaagtggattaataagaacattgatattgcactatacaggccacattatcaacattttgtaaaaaccaaggttcgaaaaaacacaattaaacggagattaatctcgattaaacgctaacgaaggtctagtgtctcgtttatggactaggcgcagtattaggcgctgggcgcgcctagacacggtgtgcacgcgctaggcgccgtgtagttaatatctagttatttacttatcctaatgtgtgtggaccataaaacaattattgtgtgctgtactgctatttaatttgtggaccattaaggcatgtgatgaactgtgagtgttttctgtatttcttgtgatcctttgacttgtgatgttgccctgttgtttgcaagcttggctgtgcatgtacaatattgagctgcccctcagatgagtttctactctttccaaattatctgattgtatagttttcagattattaacttgtctctctttgatgatcagctgctgttggaagcaacttgcaagaagccaaggaggaaagcaacttatgtaaaaaataaatgtgcggaacagtaaaagtcaaacttcgctacactggatgagagcactggagttatcatcagcaggagggcggatcggcattttgaagaggaaggccctatcctctgtgcggcgttggatgggatgaggcttccgtcatttcctgaatatgaaattagagtaagatatgctactgagcacagatgtggtgtggttgtcaaaggaccaaagctgagtgggaacatttctggaaccgatcccttgaaggacaaccgcttgcatctgaaggctgaaccgttggatgactcgcaagaagctaaaaacagtgcagctgtgatcaatgagctttctaaagagataacgcacatactggtttctcaccccatcaatgcacagcgtgcagctgaggggaagaacatcgcaaacgttgtgctgttgcgaggctgtggtattcggattgaggttagtgtgaaaattttgatagtagacctatatgatactgcagtagcaatatgaaagattagtttttgactttcaagaactttcacaaatgcattctctggatttggcatgcttcgtaaggtgcctgcctttgaaaccaagcatggacttgcaccttgcatggttgctcctactaagatcatagctggcttggggttgtcactggggattgatatccttgaagcacctggagcaactggagattaccgtactctcttaacttctaaagctaaagctatagccaaggcattatcttcccctatgggtacaccacctcgtgtttttgtgcctggagaggatgaatacaaagctggaaaagaaaatggatatgactttgggttcctgcacataaaggccattgatgatgctggtcatgataaggctgtcaagttaaaggtacggggtctagaagctgttgatcgagcttttggtcagcttgcaaggcttctttgggaagctgaaaatgccggacactaccagtactttctgtgtgtcactggagaccattctactcctgttgaatatggtgaccatagcttcgaacccgtcccatttgcaatatgcagactgagagattatgcaggagccgttggggttgataatattataaatacacagcttgatgctttccccctcccttcagtaaaatccggagaagatttgcttgacaatatagaatcacttgatcacaagcctgatcaacttaaagctttcagtggtgacactgtgtgtgagttcaacgagattgccactgcgaggggctgccttggacgattccctgggagtgagatgatgggcattattaaaaagtttatcaaggcgaagaatgattaatgctggttgaagtgctaaccttttgcgtgatctgtagaccataaggcttttctatgtaataaacttgttggcgcttgtttggacaaacactaaccatccctaggtcgccctcgtagtgagtccggaccttgaagatgatccctaggtttcgcccacagatggtcgagaggagggagataataaataatatgtaagacaaataacactacctcgaatgtgatcttgaaagaaaaccttggaacc

SEQ ID NO: 23532 - DNA, 4000 bp, Zea Mays
gcacccagtccacccaggccccagcactgccgctgccttgcctgccctcgcttcggcgctttctgctttctccagtgagccgcacccgcactaccgctgacgctaattaaccacaagcgaccgtcgccttcccccacctcctcccttcctcaaaaaaaggcggaggcgggagtggtggtggtgctcgtgggcacgcagcggagcaccctgtacagcagcagcgctgcggcagtagagagtgccattggtggagctggtaactagccctcccccctccgttcccgtcccgcgcgcagccgtctgccgagcctgctcaggtgtgcagtgctcgtattcgggtggactgattacttcgttaaagcctcagcatagtgatgtagccttcctccctctgctggctatatgctttgcccatcatggtgaggaagaagagaactggccctggtggctctggagaaacttctggagagtcttcaggagcctctggacaaggttcctcacagcagcctgagcgaactcaacaacctgggggaggacgtggctgggtgcctcaacagggtggccatggtggtgggcaacaccagggtcgtgatcgacattatcagggacgtggaggaccagggccacatcaccttggtagtggggcacctgagtatcacccgcgtgaataccagggacgtggtggtgaatatcagggacatggtggtgagtaccagggacggggtggtgactaccagggacgtggtggtggccgctccagaggtggaatgccacagccatactatggtgggcataggggaggtaatgttggacgcaatgttcctccaggtccgtccaggacagttcccgagctgcaccaagccccatatgtccagtatccagccccggtggtttcgccctccccatcgggacctggctcatcctcacagcctatggcagaggtgagctctggacaagtccagcaacagtttcagcaacttgccgatcgtggtcagagttccacgagccaagaaattcaagtggcaccagcatcaagcaaatcggttcgattcccgttacggcccggcaagggcacttatggggacaggtgcattgtgaaggcaaatcatttttttgctgagcttcctgacaaagaccttcaccaatatgatgtatctataacacctgaggttacttcacgtggcgtcaatcgtgctgtcatgggtgagcttgtaacaatatatagacaatcccatttgggtgggcgtctacctgcatacgatggaagaaagagcctgtatactgctggaccattgccatttacttctatggcatttgaaattaccttgcaagatgaggaagatagtcttggcggtcgccaaggtggacataggcgtgagagagtatttagggtggtgatcaaatttgcagcccgtgctgatctccaccatctggctatgtttctagctggaaggcaagcagatgcccctcaggaagctcttcaagtgcttgacattgtactacgtgaattgcctaccgcgaggtattctcctgtcggtaggtcattttactctcccaacttagggagacgtcaaaaacttggtgagggattggaaagttggcgtggtttttaccaaagcataaggccgacacagatgggcctttcactgaatattgatatgtcctctactgcatttatcgagcctctccctgtgatcgattttgttgctcagcttcttaacagagatatctcagttaggccattgtctgattctgatcgcgtgaagattaaaaaagccctaagaggtgtgaaggttgaggtgactcacaggggaaacatgcgcagaaaatatcgcatttctggcctcacctcacaagcaacaagagagctatcattccctgttgatgatcgtggtactgtgaagactgtggtgcaatacttcatggagacttatggttttagtatccagcacaccactttaccatgcttgcaagtgggtaatcaacaaagaccaaattatctgcctatggaggtttgcaagatagttgaaggacagcgttactcaaagcgactcaatgagaaacaaatcactgctctactgaaagtgacctgccagcgccctcaagagcgcgagctggacatcttacagactgtgcatcacaatgcatactatgaagacccctatgcactggaatttggtataagaattgatgaacgtcttgctgcagttgaagctcgtgttctgccaccaccaagacttaaataccatgatagtggccgagagaaggatgttttgcccagagttggccaatggaacatgatgaataagaaaatggttaatggtggcagagtgagcaactgggcatgtattaacttctctcggaatgtgcaagatagtgccgctaggggtttctctcatgagttggcagtcatgtgccaaatatcaggaatggattttgctcttgagcctgtgctgcctccagtgactgcaaggccagaacatgttgagagagcgttaaaggcacgttatcaagatgcaatgaacatactgaggccacagggaagggaacttgatctgctgatcgtaatactgcctgacaacaatggttctctttatggggatctcaaaaggatctgtgagactgaactcggattggtctcccagtgttgtctgactaaacatgtttttaagatgagcaagcagtaccttgcaaatgttgcactcaaaataaatgttaaggttgggggaaggaatactgtacttttagatgctttgtcaaggagaatcccccttgtcagtgacagaccgaccataatatttggtgctgatgttacccatccacatcctggagaagattccagtccttccattgcagccgttgttgcttcgcaagactggcccgaggtcacgaaatacgctggactagtgagtgcgcaagcccatcgccaggagctgatacaggatcttttcaaagtatggcaggacccgcagagaaggacgggaacttctcatttctttcaagagggcaactggacagaagccccagaggatcatattctacagtttttgagtttcagggatggtgtcagtgagggacagttctatcaagtattgctgtacgaacttgatgccattagaaaggcctgtgcgtccctggagcccaactaccagcctccagttacttttgtcgtggtacagaagcgccatcacactaggctgtttgcgaacaaccacagtgatcagcgcacagtcgatagaagcggaaacatactgcctggcaccgtggtcgattcgaagatttgccatcctactgagtttgacttctacctgtgtagccatgctggcattcagggaacgagccgccctgctcactaccatgtcctgtgggacgagaacaagttcacagctgacgagctgcagaccctgacgaacaacctgtgctacacgtacgctaggtgcacccgctccgtgtccatcgtgcccccggcgtactacgctcatctggcagccttccgagctcgcttctacatggagccagacacctctgacagcgggtcactggccagcggtgcccgtggccccccacccggtgcggcacgcagcagcacgagaggggccgggagtgtcgaggtcaggcccctacctgctctcaaggagaacgtgaagcgtgtcatgttttactgctgagacgctggtgggctgccttcgccaaggaaaatgccctggagcattcccatgtacccgcactgtttcggtgatacagtactatctaacgccgattttgcgcgttaagacttccagtgatctgggaaatttcttgtacgactgttgtagtgttgtgtattcgtaatgtgatgacgcggcagttcttctaggagcttagtgccgtgtaaaatatctgttgtaagttgtaacctgtcaccctctagtgttatgtcatgatgaaccaaattatttgttgtcattccatgtacttcgccaagtatttgttgtcacgatgttctaggatgatttttttt

SEQ ID NO: 23533 - DNA, 900 bp, Zea Mays
cagcacatgaaaaatagatcaccttatccgtttctgaacctcagaaccaaaagcgagcgcattaagggcaccaacgcggataacttcccttccaacctcagaaaaacgatctccctaccggctactgtcctctcctctcggcgacactactccagacgtaccgcactccattcagcttcgccatggccacgctcgccaggcacctcatcctgtgctcctcctcgccatcgcagcgccgccggcgccccctgccgcccgacgccaccgcgggcacgcagcagcagcagcagcagcaggcgccgccgccgcagccgtccaccacgcgccgcctggcggtggccgcgtccgcggcgctggcggccacggccgcgctgtcctacgtgcgcgagcggttcttcgagcccgagctcaccgcggaggaggcggccgcgcgcatccgccagaccgccgagggcatgcgcacgctgcggcccatgctcgagaccatgtcctggaagtacgtgctcttctacgtgcgcctcaagtccaagtacctcggcctcgacctcaccaccgccatggccggcgtccccgcgggccgccgcgctgactacgtccgcgtcgccaacgagctcgtcgacaacatgacggagttcgatcgcttcgtgcggactcccaaggtctacgagtcctacctcttctacgagaaaacgttgaagtcgctggatgacgtggcagagttcctcgtttgatgtacataatataatacaatataaagtagttgtatgaaatatgtactccgtgcgtctaagaatgaaattatagaagttatgccagccaaactattttaagtttggccaaagttttaataaacaatattaacatttatggctctaataaatctaatatcgtgaaaataaa

SEQ ID NO: 23534 - DNA, 559 bp, Zea Mays
ttacctccaaggtcgtcttctcgttaggtgtttcttgtagctaaaaggtcagattttccagattaactggaagaaatatcctgagttccagatgaaggaacaacctcgatcagattctgaagtcaaatctatgaacccatatgacaaaggcatgctgtgtaacataagagattttctaaaaccagttttgagtacgaagacctgacctctgatggaactatagaaacatgggaaatctgaagtgcgttatactggagccaacatggaagcttgtttcccttgttgctgccgtagcatttattgagactcgtcgtgaggattctgctgtgtaatttaatgtgcaagtagcattcttttataagattacttccgaccgggaattctagtctcttaacttcagaactgatttggtgagtaggtaaatagaggggatctatggggtcccttactattcatatggagttcacatcgtgatcctgcatttttttcctgtctggtcttgccaaagggtaactcttgcaggtgaaaggaccacgatgctcaagagggggtgaattgg

SEQ ID NO: 23535 - DNA, 684 bp, Zea Mays
atgccgcctatgccgccccaaggcggagatggacttcttcatgcagctgtacgaggggtttatccgtgacaacgtcgaccagttctgcagggagggaatccggctgcatctcatcggcgactcgccgggattgccagcgtccctgctgcgcgcggcgagggaagccaaccagctggccacgcagagcgagtcggagatggtcctgatgctggccatgggctacagcgggcggcgggacatactgcgggcgtgccaagagctcgccacggaggtgcagcggaacctgctgaggccagaggacatcgacgaggcgctcatcgccgggaagctggggaccagtatcgccggcggcgagctctcttaccccgacctggtcatcaggaccagcggcgagctgcggctgagcaacttcctgctgtggcagtccgcattcgcggagctcttcttctctgacgtcatgtggccggattttggggaggacgagtacctcggggccttgcgttcctaccagaccagacaacggcgcttcggccaacgaaagtagagctcacttcttcttcttttttcctttcaaaatacaacaaacgaggaaataaaaagctacatcactactatatagatttgatccacgccttatttttgacaaagacaactaagttcttgttcgtttgtgtcggattgcat

SEQ ID NO: 23536 - DNA, 1142 bp, Zea Mays
gacttctaacagctatgtattaattatcagcttatgttatgtcaaatcaagggagatgaggtgacgttggcaagggcagttaatcttcttcacgcaaacaaggatgactacattgccgtactattctatgcctcgtggtgcccattctcacaggaatgcaaaccgaattttgagacactggcttacttattcccagctatccggcattttgcatttgaggaatctgcaattaggccaaggttcgtcctatatagtgcaaacaaaaattatttcttattgcaacacatctatttttggtggaatgccaacctgatgctggaactgcagcataatttcgagatacggcatccatggtttcccaacactctttctcttgaactcgaccatgagagtacgatatcatggaccaaggactgttaaatcacttgcagctttctacactgatgtctcaggtatcaatgcatcggtgaagtcaactgcaggggaggccatggtacatcccttggatgatattgagcataaaaaggacgctgaacaggaaaattgcccattctgatgggcatggaggaggcacaatatgtttgcaaaattgatgggagcacatgaatatttcctcacctaccttgagcaagcaagacagaagtttcataggctatacccttcaagttcaaagcgaggaaatctgcaggagggcgcaatgaacgctaccgcttgggcttccaaatcattagcatcagtttcaattggagaaccaagtgcaattggaaggacaaactctacaagtgagctaagatgaaatctgatcttttttgtccccagggattatatgtacagtacagtagagcgatcaggatatgaacacccagaaactgttgtaacggctatattactctttgtatcctccttagaataaatacgtccatgatttggctccttattttctgttgttgttacagcccaattctttggaggaataaagtttctggtgtattgagaggtgtctttctgaaatagggagcatatcagatgcacacgtgtctttcgtgtacatggtgctggtgcatatattgaatcaagcaacttaatatggtattaaaatcagggtctcaaatttgaatcctagttagcacaattcaatataa

SEQ ID NO: 23537 - DNA, 3589 bp, Zea Mays
ggggaagagaggggacgaagagggagaaggaactgggacttgccgcccccgcctccgaattccccactcctccaccaccgccaccactcaccccttgctccgctcggcctcctgaatccggcgtcgtcaagcaaccccactccttctgccgttatcagaaccctaaccgatcaatccgtccgattcccagctgccggtttcgcgttgggagcgccggagcaggggaggggcggagggtcggatcggcagccgcaggagcattgagcgatggctgccgtgtaggatgcagctggactccgccggccgccgcctagctgctgctgttgttgctgaagttccgatgcttcagcaaccgcgatcttaataggagcggagggtggagtaccggtggagtgggccggacggctggttgatctccgtgagctccagcgcctacgcactgggaggtggggaggtgattgccggaggcgtatggaggaacctgggagggagggggattcccccgggccgccgtgggcgccaagtgagtcctcagctttccgggcgttcgttacggcggtgggggagcgggcggtggcgtcgccttcaggctcggacaatggggattccgtctgctcaagcaacctccgcgccgtcaggaagagaccttttgttgcaagattaaccacatatatcatccaaacttttgaaaaatgcaatcctgagtttaagtactcagagtcactaaaccccaagcgctttctcaccaatcccgcagttcctgttcacaaccatggtcttgacaatgcaaactctgatctcatattgtatgtcaacctggaactgcttaataaaaagtcaagccggaggtatgttgtccaagaaatgcttggccaaggtacctttggacaggttgcgaaatgctgggatgcagaaactaacagttatgttgcagtgaaggttataaagaatcagcctgccttttaccagcaggctatcatggaggtctctttattaagattgatactggatgccctgattatcatgaaagatgctggcattattcattgtgatctaaaaccagaaaacatccttatagctccaactgtaaaaacagcagttggagtgaaagtaattgattttggatcagtgtgcatggagggtaaaaccatttattcatatattcagagccgttattacaggtctccagaagtacttcttggttatccatatactactgccattgatatgtggtcattcggttgcatcgttgctgagctatatatagggctgcctttatttcctggtgcatcagaatatgatgttctttgccgtatgattgagattattggtgggcaaccaccagatgatctgctacgtgaggctaaaaacactgggaaattttttaagcatgttggaagtatctatcctagtagtgaggctcggaatggcgctagcagtgcatacagaattttaagtgaagatgagatcgaagcaagggactccaagaaaccgaaggttgggagatggtatttccctcgtggaaggcttgacagactcatatatacatacccctggaagaatttgagcgagggaaacttgccagagacagaaaaggctgattgcttggcattagttgatttcttgagaggacttgttgagtttgatcctaataagaggtggtcaccgctgcaggcctcgtatcatccattcatcactggtgaagccttcactggtccttacgagcctgttcaggagaccccacgaattcctgttggacgtgctgcagtagttgaccacaatccaggaggaggtcacttgctgggtgctggtctttctcctcaggttggaagcattaacagatgcttacgatttaacaacgctttgcaaccaaatatgcctttttcatatggaagcagttgtggcagttttgggagccatggtagctttaacgataatgctggctttagctatggaagctatgattttaacagtgtcgacatatataattcaccaatggatccttctgggtttaatttacgttcacaacttggaggatcgtttctcggatctagcccacatattcgacgaagacctcatctctcacatggtggtggcattcggttaagccctggtggtccagggcatatgtctcttggggccagtccatcacaatttacaccgccaaattcccagatgcaaatcccaacaggtcctaatggaaggtatggtgcctctccttcaagaggtggacatggctcttcgttgggaaaggttgctgttgtaggccaatacaataggaggaggaatcagggttatccacctatgccaatgccaccacatgaacacacatctcaactgatccaggggcaccaaggagatggtgtcagtactgctcgctttggtgcatatgcccaaggaaattctacctacctacataatgcactccctaattctagtcattatagttggagatcgcaaaggggatctggcagtggtttacctttggacccttcttctagccgtggttcttttccacccaccaattactatggctttcctttacactccgatgcgtcagcagatacattgccctccacctcatcagtatcagatccagccgattgggatctcaactctagtgacaagtcactcctgcaagaggaccgaacactgtcagctgggttaagtgatcttcgcttgatagacgcaagtggccaaacaaacagatctagcagattggctcctttccaaagtcatgatattttaagttcaaacccttcgactatgaatcaaagaaatggacacctatttcatgcatcatctctgggagagagtacacatactccaggtcatgtcacattggatggatacgaacacacaacttattctcagcgaagtttcccaatctatcgtgggcaaccatttcagcagtacaacaacatgacttccagttacatccgaccgatgagggctcatcacaatggtcagcctgtctggtctaattataggctgacagaacctccaccaactacaatgggtgacggaatgctctggggagggaggggtggccattcgtttgcagcgagcggactgccacctacacttaggaaagattttgggagaatcttttagtcctgaatccggaggaatgccgaatgccaccaaattgatggcatcagttgtttgcatctgcaattccgggttggattatttgctgggggtgcctactggtattgcaatttgttgtgttcctccgatgtctcccaggatgttcggttcaaatgattatatggtacgggatatgattacagtgctcgttctttgctatacctgcacgatctagtagaaaaatgtcagttgtgctacttgatgcgaatcttgctagttcgaggtttgggagagtttttctgtctcggttattgtcttcctttctctattctatttttgacagagggttaagttcctgaaccttaacatggctaagactgaagtgaaggccacgtggtcgtggtgacatgatttcgttttcgtgatacttgaggagccgactatctgtttttaagcatctttctgttgttgttttgctacaacaggttttctaagggcg

SEQ ID NO: 23538 - DNA, 2234 bp, Zea Mays
gctcaagctcaggcaagcggcagcaaggcgttggcaatcccagtccagtcgtcggagcactcgcaatttcccgtcacagctggccaccgccccaccctcacggcctcacctcctcccgctacacgcacgcgcccacctacccaaaacgaccgcgcgcggcgccctcctcccgcggtgccaccaccaccaccacctcgtcggaccatcaccacgccgatcggcagctaagcagctcccgcccccagcaccgcgagctgcgatggcaatggacgcggccgtggccgtgaagagcggcggtggcggcgccggatcgaccggggtcaccgcggcggcctcgcagtccccgcaggcggcgactaacggcggcgagcggcggtcccggttccagcgcatctgcgtgtactgcggcagcgccaagggccggaagcctagctaccaggacgccgccgtcgagctgggcaaggagctgggtcatcccgagatccttgatgcccagagaggtgagcctactcttccacgtcctggagacttcatcttcttctttttttttgcatgcatttgatcgctgcactcctgctgtcttttggaatgcacatcgatctggctcctttggcgactcctgtgtggcacggggtgaacgatgcagtactagtagacatcaagtaccccataaataagagcaagggggacctgtcgtctagggcggggggtggacggaggggggacacgatgcatttatgtccatctaactaatcctcctgacctaaaaacgttgtgggcaatgctttgttttcttgtgcaggtcactggcgagcctgttggggaagtaagggccgtctccggcatgcacgagaggaaggccgagatggcccgcttcgccgatgccttcatagcgttacctggtatgcactatgcagcatgcactgcagagagggatttggtcacacagtggggaaaaaaggattcagagtttttgacacacgctcgctcggactctcggcaggtggctatggaactctggaagagctgctggaggtcatcacctgggcgcaactagggatccataagaagccggtcgggcttctgaacgtggacgggttctacgacccgctgctgtccttcatcgacatggccgtcaacgaagggttcatcaaggaggacgcccgccgcatcgtcatctcggctcccacggccaaggagctggtcctcaagcttgaggagtacgttccggagtacgaggtaggcctggtgtgggaggaccagatgccaccgtccgccgccgccgcgcacgggttcgccccggagcttgtggagcccgggatcacctcctcgtcctgatctggactggacggggacgtcggccgggcctgcctacctacgctaaccccagattctgaccgacggccagcccggcaccaagtagaaaggctatccatactagtaccacctaattaataccgtaatctactactactactactaacaaagaagattgttgggatcgaggatgacagctagctagcgtctgctcagtcagcagcatatcgtcgttagccgcgcagtgtgcagctgcgtcagctctgccattgctactgctccttttgggcttttgtgttgtgctctcctagaagtagggaggaaggaaggaaggcatgctatgtatattccccgggtatatggttgtggtatggcgattggatttgtcttgctcgcagcctcgcacgtgtgatggatggatcttggaacaaaagctagttgcaatgcaaaagcgattcatttctatcctacagtaaatcataccagagtttgctgctgtgctgtgctttctgctttgtttgcttgtttactagtagttgtcgcgcgccctgtgcgcgtgctgctgcccactgatgaatataataacccgttcctttagagaattaattcatatttatgtaataatctagatgctatgtctgaatggagacctctccggacatgaaccgttgcattgccgcatcatccagggcacaggtcacaggggctaggaagcacaagcaatggtagagggaagctatttagagagcctgagcacacaatatatagataatagggttttatatgtctggaatattcacatcagcatggaatgaaaaagaggggtaaaggaatgatacatcatacctgtgggcatcactaaatgaaacaaatgtctgaaaatggaacttcattctcctttgaggatgctttacttc

SEQ ID NO: 23539 - DNA, 1701 bp, Zea Mays
actcagctagaagtactcaccacctaaccaactcagggacatccatcttcgaaggtcagcttccgaaggttggcgccacgattaaaggtcaatgcactttttggatggcctaggggggacacgacagcacgtgaactgatccctcctgctgaatcctatacgctctcagggtaggtgcaaaaccacgtgaggtgtctatatctgttgcttcttcaatcatggacattcctgctgcggattgggatgcctgtgcgtgtgatttagatgatcctggaaattttaaccctttccttacttatgcattcctctcaagcttagaagaatcaggttctgcggtcaaggaaactggctggttaccttttcatattgttgcacgggatgagaatggacatattataggtgttgttccactttaccttaaaagccattctaggggagagtttgtgtttgatcaatcatgggcagaagcttactacaactatggccttgaatactatccaaagctccagtcttgtgtgccttttactccagtaactggtcaaagaatattacttcgaaatacatcataccgtgatcaagtttttgacgcactagtcaaaggtttgatgagcctcactaccaagatgaatgtgtcatcattacatattacgtttccgtccgaaggtgaattcagtaaactgaaggatagtgggttgttacaaagaatcgggttgcaatatcactggagaaatcggaattacaagagttttgatgagtttctgatggatttgaagcagcctaaacggaagaatatcagacaagaacgtaaaaagattcctgcccaaaatttgcaaatgaagcgacttcgtggagacgaaataaagagcagacactgggacaccttctataaattctaccgtaacacaactgataatcattggggcagaccatacttgacaagggatttctttcacctcttgggagaaaagatgggggataatgtgatgcttatagttgctgaaaaagatgataaactagttgctggcgctcttaaccttattggaggtgatacactatttggccggttatggggatgcctgccagatgcttactttcccaatttgcattttgaagcttgctattatcaggcaattgaagcagccatagagttaaacctgagtaaggtggaggcaggtgctcagggagagcacaagatccagcgtggttacctcccagtgacaacttacagctgccactacttttcaaatcctggttttgcggcagctattggaaattatcttactcatgagacggctcaggttaagcatgctattaaggtccttcgtgattccggaccatacaaggaagacatactgaaagagttcgctgctcaacaagacgacgacctgtagaatacagaagggacttaaactatttgcatactgttttatagaactaacatcttctatgtagcaacagggatacaggtcgtccaaagtgttaccaaactacgaatcccacatttggacactgctaggactgtaaatatttaacattgtaacatcagtcttacggcgttgagttgggagctatagctatactcagttgtctcgctcttacttttccccaacagaaggacttgatgcttcctgtatattgcgctttgactttgattagatttataggaaaaaaattacataaatatctgcagctgtcattcag

SEQ ID NO: 23540 - DNA, 894 bp, Zea Mays
ccctccaccccctccacctcggtgatgagcggcgcctccacttccgtcatcgctccaccttgagggctcctttggttgcccgggatcccgggagtatccaggtcgattccctgggtctgaaatccacaggccgaatcgtcccagggaaaaataaaaagttgtttggtgacccacgctccccgatctgatccgcgggggaggacagtgctttggtccccggcctcccagggtcgggaagggcttccccgcgtcccctcccgtgcaagccgtcgcctcctcctctcgctcgtgaagcctcctctccctcgcgcacggtaccgccacccaccgcctccacctctccctcgcactcgcgcacccaccgtcgcccgccacccccgctcttcctcactccctcctctgcctcgcgcaaagcgcaccgctaccacaggcggtaggaccgcacaacttgccccagatccagaacagtctcctatctcctcaactcacgcatgacgacctcctcagctcccccatccgcatctcgcgaagagaacagaagctggtgagcgatccagaattcggtcgtgaactgaagtgtgatgttggccatgaggagacaagggatggaactcttgagcactaaacacaagttggtcgaaggaaaatcatgatgagcaaagtcattgttgtgttaacgttttgggcatgccaagaactatttttttggttatgagtttgtcaaacatatgttgagtttgtcgctcatttcttaagagctatttctgtgatcgaagaaatttgtttattttagtggcatgaataaaaaaaccaagcaaatccatggtagaaacttgtttgtgtgcatattttgagggctttgttttactggaactgtttgattttgctgatttt

SEQ ID NO: 23541 - DNA, 2816 bp, Zea Mays
cccacctccagcgtagaaagggaaaaaaaaaaggggaagcctcttctctccaagtcacgcccctcccacctcgccggcgcgcccgcctcagccgccatgagcgcgctccaggcctccctcctcctccgcccgctcccctcgccactgcccccgcgccgccggcagccgctcccctctgccttcgcctctttgccccgcggtgccaacgcgccccgccgtgccccgctccgcctccgcgcattggaccccatcgcgccgcagcccgacgcctccgagccgcccgcggctgcatcctcgtccgcggcggaggcggaggagtcggagagcacgacgatgacggagtcgacggcacagcccgccacgatgagcgggaaggaggagctggaggacctggtgggcaaggctagggcctgggccgtggcggtcgcggccgcggtggtggccgcggtcaggaggttcgtcgactgggtgctgtcgaggaactggatgagctggtggcccttctggagatccgaccaccgactgcaggggctgatcgaagaggcggacgccaaccccaacgacgctgccaagcagagcgcgctcctccacgagctcaacaagttcagccctgaagaggttattaaaaggtttgagcagcgaagccatgctgtggatagcaagggggctgcagagtacctgcgggcacttattctcactaacactatagcagattaccttccagatgaacaatctgggagatctgcaagtctgccagccctgttgcaagagttgaaacaacgtgtatctgggaatgaggataaacctttcatgaaccctgggatatcagaaaagcaacctttacatgttgtaatggttgaccccaaatctacaggtagatctacacgctttgctcaagaaattgtctcgacgatgttgtttacaattgctgtcggcgtaatgtgggtgatgggtgctgctgcacttcaaaagtatattgggagcttaggtggaattggggcatctggtgttggttctagctcatcatattctccaaaagagatgaataaggatatcatgccagagaagaatgtcaagacatttaaagatgtcaaaggttgtgatgatgcaaaaaaggaacttgaggaggtagttgagtatctcaagaacccttcaaagttcactcgccttggtggaaagctacctaagggcatacttttgactggtgctccaggaactgggaagacactactagcaaaggccattgctggagaagctggtgtaccattcttttaccgagcaggctctgaatttgaggaaatgtttgttggtgttggtgctcggagagtgaggtcattgtttcaagctgcaaagaagaaggcgccatgcattgtcttcattgatgaaatagatgctgtgggttcaactagaaaacagtgggaagggcacacaaagaagacgttgcatcaacttcttgttgagatggacgggtttgaacaaaatgagggaataattgtgatggctgcaacaaacttggcagacattcttgatcctgcactcacaagacctggtagatttgataggcatattgtcgtcccaagtccagatgtgcggggtcgccaagagattctggagctctatttgcaagataagccagtggcaaatgatgtagatatcaatgcaattgcccgtagtacacctggctttaatggggctgacctagccaaccttgtaaacattgcagcgataaaggctgcagttgaaggtgcggacaagttgaatgctgttcagttggagtttgccaaagatcgtattatcatgggaactgagaggagatcaatgttcatatcagatgaatcgagaaagcttactgcgtaccatgaaagtggacatgctattgttgcgctcaacacccagggtgctcaccccatacacaaagcaactatccttcctcgtgggtctgcccttggaatggtcacacaactcccctcacaggatgagacttctattagcaagaaacaactccttgcacgtcttgatgtttgcatgggtgggagggttgctgaagagctgatatttggggaagacaatgttacaactggggcgagaaatgaccttcacactgcaacagagcttgcccagtacatggtatcaaactgtgggatgagtgatgctatcggtcctgtgcatgtgaaagagcgaccaagtgtagagatgcaatcaaggatagatgctgaggtggtgaagctcctaagagaagcttatgggcgggtcaaacgattgcttaaaaagcatgagaagcaattacatgctttggcaaatgcgctgctggagcgtgaaacacttactgcagatgagatcaacaaagtagttcacccttaccaagaagaaccccagttttccttccaagacgaggagtttgccctcacttaaaagattcctttgttgcatccagattttacctactgtgaattgtaaatccgtgtacaccagtaaatcagaaaatgagaagattggtgttggaaaagccgatgcctgcttattgataattcttgggatggaagaccgccatggtggccggcaaggctctgggttgcaaaaccctccatacttttggttttagctaggatagatataggtgcaacattgcatgctctgaatgctaggtttctggctagggtaacatgtttaccatgttctttttacttctttattacatttgctgtaaggaaatcgtacatatggcggtagtttttttttcaaacaagcactgtttgttttttgtcaaacaatatacgttcaatgtatttgtattgctaacatgcacttgatgcctt

SEQ ID NO: 23542 - DNA, 161 bp, Zea Mays
aagcagaagtggtcgccagtgttattgaccaaactttgggatcaagattataaaggatctagtgctcgattgagtttagttcctatagtcgaattgaagttggggtatagctccacagctttgatacaggtaagtgattatgttgtcatacaaaatttgag

SEQ ID NO: 23543 - DNA, 3966 bp, Zea Mays
aattagcagtcaaaggtacacattaatgactgaacgtcttatttgtgatggtatattacttatgcgaaagaagaggaggccatccggtgtattcaggctgtacacaattttgtcttggaagggaaagtgttaagggcatgtttcggtactacgaagtattgccatgcatggctgcgaaacatggcatgtgggaatccagattgtctctatttgcatgatgtaggcagtcaggaggatagttttactaaagatgagatcatctcagcatatacaaggactagagtcccccagatggcatctagtgtttcgcaaagacgtacaggcactgtgttacctcctccaggagatgatttctctcacagtgcggtggtttcagccaagcatacattcaagaatggaacacttaataccaccagtcagcccagactttcacctccaaacagtagttctgggaggtccacgcttccaccagctgcatcatggtatgatacctctaaaagtcttctgctaccttttttctatgcactgatttcttttccatttttatctgcagggggcagcgtgatttgaatgccaggataacagctactggagcgacatcatcacaatctcatacaaaaccaaaatcagaatcacagagtaatccattttcaagttcttcagcaatttccagtacaaaaacaccctcttcatggaatgatgatacaagtacagcagcaaaaatgcctgaaggacagcaagtgtcagaaaaagagtctaaaaccttgcagccgtataagcctggtatttcaaaggaaacacaagctctatcgtcactggagtcatcactggacatagacttctcaacaataccttcagcttggaatgatgatgacattgtagtatcagatgggatgccaaaaggaagcgatgaaaatcaagttccaaataaaaatggtgagctaacccatccagcatctaagtcactggttttatctaagaaagacatagaaatgaacattaccagcaaaaatccttcagattttttatcaagtctagcaatatctaaattagatgtaagtactagtgatggtgaccactcagataccaatattactcctaaaagccttacttcaaatgctgtagaatgccaatcttgtcatgctgctggggagaaaatgttggaggatattggatccaaggacatcgacatggagaagatatcttctcagatatcttcagtaacattaggtggcaacgataagattcagagtatggcaggaaatcagcaaccagatgtaatgccatgcacatctattgatgtgcccatggatcagaattttggcagagaccgatctcatctcaatcttaacgagcttttattgccttcagaaaataaggatagtagtctttcttgtcaatatagttctgataagcgtcttgcttggagtttgaagatgcaaaattgtagcgttactcctttaaatgatacaatagactctgcaatgctcactgacaaaccttatagtatactgctggaaggttcagagaaaccatcatatccaccatttgttgaatttcctagtacatgggatacctcattgtggaatgatacaaaaaataacgctgcatcgacgattgacactataacttcttcacagatgcagacagggttttcttcaatcgataacacttatgccttgctaaatggaggtcaagatgggctaggtactgtatatacacatgataatgtttctgtatatacacgtggacgtggtaatgtttctggacatcctggaatgggaagtcatcagcatagagcaatgggttcagtaagaactgatagtataggaagttttgacaagaccataagcgtaaataaggatgagagcagaataatttctgatacgttgtcagagtttaatccatgggatgattcatattcgactgctaacaattttgttaggatgcttagggaatctgaaaataatgatgttcagtgcactgcgccttcatggaaatcaggaaccgggagcaaacagtccagattttcatttgctagacaggataaccaaggaaacttgttggattcatctctcagaaactgtggtattggtactgagcagaatttcagtttgctaccccagaattctcgaagaaatatttaccagaatggtcttgcattccaatctctagagaatgaattttcaaatagtaactttcctggtctattagatatggcaactactggtacatcaatgtctaaaatatctgctcccccaggattttcagcaccaacaagagtaccccctcctggattttctactgcatttccatcccaggatagtttgaaccccactcctgggtttccttctgggattttgtctcatgatgggtctatccccctttctagattcccttcattttcttctggagtttcagctcaggaagtgtctaagctccctactagactgccttctccattttcttctagattttcatcacaggatggtcctgatcccccttctagattccctttttcttctgggttcacatcacaggatgggtctaatcagttgtatggctcaacaaacccaggtttgtttcctgtcccttattttcctagaactagtttgatttctcatcattccttttgtggtgctttgcagaaaatcttctcgggggtactgttctgggtgtcgacggtaatcattatcaatctcagtttggaaggcactcaagtgacatggagtttgatgatcctgctatattagctgtgggcaaagggctgatgcctggaattggcgattcagggctggagatgaaaaatactcgtgcttcacagttgcaaccagcaagtagtgatccaagatttcagctacatgtacagccaaatgtgcagtctcatcaaaacatgagattcacagaccctgtgcaagatggtttgaaccatatgaatgataattacctggcatccagatttttagctcagaaccatggtcctctatctccttatgtgcagattccgcaacaacccagaaactcgcaggttacaaatggtcactgggacgggtggagtgaatcgagacaagggaataacattcctatgtcagacatgtccaggatattatatccaagtgaagtgaacaagttgcacatgctgggttcaaacgatatccataacagagcctttggaatgtgattgtctcctgggataatgtgtgactttgagctgacatattcgcttggggcgttttgtggaagtaactggttgcacaaaacatagtatacctgaggtggttaatggtgttgtgcttatgagctggcacacaatatttattgctattggagttgaccaaaatgaaccttagttttggtccagccagttgaaattaccaggttcattctcgtctatgatttgtgacgcttgaatgaaaagaacgagaagaacaaggcagctgaagttgaaatagatatagagatatgtctatcatgggatttggggcgacctgtgagtgaaagaagcttaggtgtggcagtttgtttttcttgtgtctgtacatgatgatattggtcggtggttgtagtataatttggtgatcggcggtggctgtattaacttgtagtggttgctcttgctccctcttgcttgtttatgttaattaagggaattgaggtgaaggtctagtgttacccatagcataataatatacgatacataactggtttctttgctagcattacttcatttgtttcaacaacagcaaaaaagaaatcccttaacctttcttaaaaacggacactttgttaccgtgcattgagaatacccttggagaagcttctgaactacattacacataggtctatgtggtgcttgaggccagaggtttgagttgtattgtcaaaactccttcgggcctccgcactctgtgtactaggtcggcgtatcaggtctagtttgacctagccaaaagctgccctgggggt

SEQ ID NO: 23544 - DNA, 3279 bp, Zea Mays
gaatgagagtaacctttactagcgctcgctgttgctgtgcgctgtgcagggcgcatctatccgcatctccgcccccccccacggtggcatcgcctcgcctcgcgtcggatcaatccatcccctcgccctcgccttctgctcttcctcatcgggggcaggcggagccgcagagggaggagccgccggcgctaggaatccccaatccgtatcgctcccccaacgattttgagtatattgctgctgcttctcaagcctattcttattgtagatcgaatcgatcaattcgctgcatcgactgatagtagatagggttcatacgcccattccattgattcgacgatgttccgccgcgactgtgtgggatcgccgccgccatgacccccggctacctccctccaccttcgtatcccgacgtcttgaccaaaccccaaacctgactccgaccccggttccccgctggaagagtataatagccaaaacacaagcggcccgtgcgcaccaaccaccaccggagcaacaggatggccgatagcggcggaatcagcgccgacaacgccgcggccgctaacgacgacgacgacaccaacacggcgcctttccccgacacggtccaggtcggaggatctcccgagtacaaggtcgagaggaagcttggcaaaggtggcttcggccatgtctttcttggccgacgtctgactgccgcccacgccgcacgctccgcggcgtccgctgcccaagaggttgccatcaagtttgagcacactagcagcaagggctgtacctacggccctccagctgaatggcaaatctacaccgctcttggaggcacacacggcgtgcccaaggtgcattataaaggtcgtcagggtgactactatgtcatgattatggatatgctggggcctagtttgtgggattcatggaattcattaggccaatccatgccatcggaaatggtggcttgcattgccatggagtccatttccatcttggaaagcatgcattctaaaggatatgtgcatggagacgtcaaacctgagaactttcttctggggcagccttcaacgcctcatgaaaagaaactttatcttgtggatcttggattagcaacaaagtggagagatactgctaatgggcagcatgttagttatgatcaacgtcctgatgcctttagaggaacagtcagatatgctagtgtccatgcacatttaggaagaaccgctagcaggagagatgatttggagtcacttgcctatacactagtattccttcaccggggcaggttgccatggcagggatatcagggtgataataaatcatttttggtgtgcaagagaaagatgagtacctcacctgaggccctctgcggcatatgtcctcaacctttcaaggagtttcttgaggccgttgtcaacatgaagtttgatgaagagccaaactattccaagttgatttcattgtttgacagtttaattggaccaatcccttccattagaccaatcaatactgatggagcccaaaaggtagggcagaagcgtgccaggttgcttaatgatgacgacgaccatgtaaaaaagaagattcggctgggtgctcctgcaacacagtggatttcagtatacaattcaaggcaacctatgaagcagaggttaatgttatttctcaagttaatttcttcctgtagactgtatatcctgtttcgagtatccatccagagttatattatcgtagtgtgttctgtatcgttctttcttttaaaagtaaattcccatttttttgctatttggtataaaaatctgattcattcactgaaaggaaccaagttaacgacatggcaatactgcttgtagatcataatttctactgggttaacccaaatttaaaaggaaaaacttttttaatcccttgagaaccaaagataatccataatgcttatgcagttttttaggttcatcaatgcaccgatattctttttgtgtatttcgtcaccgcaaaaggataattgacttctgcccttgataggtaccactataatgtggctgatgcaaggttagcgcaacatgtggagaaaggaaatgaggatggtttgttgataagttcaatatcatcatgcgcaaatctttgggcaatcattatggatgcaggaactggcttctcagctcaagtttatgagctatcttcacactttcttcataaggagtggatcatggaacaatgggataaaagtttctacatcagttctgttgctggctccaacaatggaagttctattgtagtgatgtcaaaaggcacaccatatacacagcaatcttataaagtcagtgattcctttccatttaagtggataaacaagaaatggaaagaaggttttcatgtgactgcaatggcaacatcaggcaatcgatgggctatagtcatgtcccgcagtgctggattttctgagcaggttgtggagttggacttcttgtacccgagcgagggcatccatagacgctgggacaatggcttccgtattactgcaatggctgccacgatggatcagtctgcgctgatcctaagcaagccaaggcgtcgcccaagagacgagacacaagagactctgcggactacacagtttcccagtcaacatgtcaaggacaagtgggccaagaatctctaccttgctgggatatgctatgggcgaaccgtggcctaacatcgtccgttgctgacctagctgttgtttgatgtatattttgagttttttatcagctgctaccagcatgagccacaaggcatttgccttgtcgtaacccatggaaattggaaaggggatgaattccgatgtatgtgcccgaacttgattctagggttggtctcgtaagttaatcgggaaaggcgggtgcagacactactgatgagccgtaacgtacccgtcagatcccccagatacaataaaacgagtctgtaatgtggcttttgcatcgtattttctgcatcgtgttaaggagaattctgtttttttattcagtgaattgtgaagagtggaaaatatagagcaacaaatagtaagttaaatagtatttcagctacctgcagagcatcatctagctggaccatttccttctcttccagcagcccagtcttgtggaggtttggaatgcaatcgctcaagtatgtcagcacagaatatgtgacttgtgtctttagcgctcgtagcacctgaaattttggtttgagtaattactctatccaatttgatgtgatgtgatgtattatgagtctattacttaaatatgg

SEQ ID NO: 23545 - DNA, 3975 bp, Zea Mays
ccgaacttcacggggacagcgtataggagtaggtcgcagcggcggaggaaacccgcttggcaagggatctatcccctcgtattccccttgcgtgcaaagctcactccccgtgccctcgccacgggcacccgaggaaagcctcgtgcactcgcggataggcagtgggccctgggtggaagagagtttgctccggggacgcgaagccgggtggggagaggcaaaccgggtgggatttcttgggattatttaagggcgagggagggagataggcacacgaaagcaacagcgaggagagagaagggaaaagggtgaaggaagccagggcccagggagttgttgaatttcggttctggtcggcgtcggaggggaagggacgacgagcggcgaggaagaggtgtgcgaggggaggagggatatggtggccagctgagtctgcggattgcggcggcagcggggatcggaggcagtgaggggcggcggcactcggatggtactggctttcgccagccccggaggcggcgatcgtggatgggcagcggcgggattgcggggcgggggttgtaggagcggtggcggcggggaagttggactcggagcgggtgcttgtgctggtctccgggctggggcagggagaggaggtgagggagcggcggggagggatgaggcgggggaagggggcaaggaatgggttgctgccgagttcgctgcggatcatatcgtcctgcctcaagacggtgacctccaacgccggctccgtcgcgtccagcgtgcgctcggccggcgcctccgtcgccgcatccatctcctcccaggcagaggacgagaaggatcaggttttgtgggctggattcgataaactagagcttcatccatcatcattcaagcatgtcctgcttgttggttattcaaatgggtttcaagtgcttgatgttgaggatgctgcaaatgtttgtgaattggtctcaaaacatgatggcccagttacgtttttacaaatgcaacccactccagtcggctctgaaggcattgaaggattcagagcatcacatcccatgcttctagttgttgctggtgatgagacaaacggcctgggtgcgattcaaggtggtcgcttaagtgctcttatcagagacacaaacagtgagcatcaagctgtaaattgcatttcaaccccaacagttgtccgtttctactctttgaagtctcacacctatgtacatgttcttcgattccggtctgctgtatatttagttcgctgcagtcctaggattgttgctgtagcacttgcagcacaaatctactgctttgacgctgttactcttgagaacaagctcagcgtcttgtcatatcctttgcaaggtgcacctggggtaaatattgggtatggcccgatggctgttggccccagatggttagcctatgccacaaatactcctttattgtcaaacacaggccgcctaagtccacagaacctcacaccttcgccaggagtgagcccatctacttctcccagcagtggaagtttagttgctagatatgcaatggagtctagcaagcagttagcttctggtattattgacatgggatatacattttcaaagtactgccaggaacttctgccagatggttctaactcccctttgtcatcgagcccaggcaggagatctggtaaaattctttccagtgtgcatccactggaagctgacaatgcaggcatggtagtcatcaaggatttcacatccaaaattgttgtctcacagtttaaggctcacacaagtccgatatctgctctttgttttgaccctagtggaacacttttggtgacaacctctgttcatggccataacataaatgttttcaggatcatgccaacctgcattgctaatggctcaggcgcaacacgttatgattggacagcttctcatgttcatctctataaactgtatcgtggcatgacatcagctgtcatacaagacatctcgtttagtcattttagtcaatggatatctattgtttcatctcgagtcaaggccatggtggtcaaagccatcctttcttatggaccaacagcttcaccaagttccctcaactgtgacacattcggttgtcagtaggataaagaataacacttctggttggctaaataatgtcagcaatgtggctgcttctgcaagtggaaaactatctgtaccatctggcgctgtaactgctgttttccataattccatctaccagggttctttgccagttccatctaaggctaatgctttagagcatctactggtgtattcgccatctggtcatgtcattcaacatgaacttttaccttcttcaggttctgagtcctctggtagcagcccaagagttggttcaggtcctaacttgcaactacaagatgatgagatgcatgttactgctgaaccaattcaatggtgggatgtgtgccgtaggacaaactggccagaaagagatgaaaacattgccaacattgtattgtataaccaaagaagcagtatgatggctatgggtgcttctgactgtgaagatagcgagcattcggattccactgcatcaaatgatggtatctctgggaaagagattatgagaatccgagaaaggtcaagctggtatctatctaatgcagaagtacagataaactcgtggcggattcccatctggcagaaatctaagatttgcttctatgtgatgggctatcctgctgcagagttggtcgaatcagttagcagtggtggtggagaaattgagattgagaagttacctcttcacgaggttgagatcaggagaagggaattgctccctgtattcaagcagttccaatattctgatcgacattccagtgataggaatattgcaaatggaggctttcagaatgccttgtcccacatcagtaatgcacagaatagctctgtaaaggataatggtgaatatgaaaccaaaccggtggctttgtctgggttttacgcagacacgaggaaaacagctaacacaaatggtctagctaggcaaacattctcagctgttaatcttcagcaagtggggaagtgcaattctattgaatctcttaacactgcaattgtgtctggcaaaacagagaatgggaacaatggctatatatccacgccacctgaaacaaaagcgtctatcagatcattgagcagctattctctcttggatggacatgtggacggaatgctgtctccaaatagcgcatcacacaagccagaaacaacaaataattctgtgctcagcaatgctgcaagcactgatgtacaaaatgggtgtctcaccactgtcgattctggacagcaggaggcgtctcattctcacagctcagtggagtttacccagtatttccaagagggctattgtaaaatatcagaactcgatgactgccgtgagttaactgaagctgttactgatgctgacagcagcagcagccactgcgagagagagaagcccgaggaagatggggataacgatgatttgctcggaggagtttttgccttcagcgaagaaggttgaacttactatatactgccttacttgagatcgagatataacgaaaaatgtgctcaaaacaaaacattcagtgtgcaatagtatgtaggggatggctttcatggaataaagctgtgtggaatcgatcatctggtacatatttttcaaggagttggtgttgtcgagaagttgctattgcctgccgtaacaccagttccttagcgttggtttgtacatatactgtaagacccatttgttttgtgccatacttccgggacatttgggtggttctggatctcgtaccttggcagccgtatttgttgaccgcctctgccagggcctgtgaatgttccatgtttatttgtacatatactctctgttttttttgggagaaaggaaaaaaaatgtagtgacaaattaactttataaacattcagtaaaggatttgcgttcatg

SEQ ID NO: 23546 - DNA, 988 bp, Zea Mays
tcaaaccaaacaattgggcgctgaaactgggtttgagaataggagctgcatgagcttcaatatatgtctggcatatgtagtgacggagcacaagtctaaaaattgtgattaatatgctacagacattttaagtcatcataaaaaagatttctggcaaagcgataaaatacttgaaaatgaacacatcctgcaaacaagattttgaggaagtcaacatcactaccacacaatgtgcgttcacagatatgctactagtatcatggcatgtggccctaggaatattggcttcggcaacattgaaatacgaaaaaatatcaataccacatatatttcattttatcgactatttgtacccctatgtaggactctaaccccaaaaattctcaagcaggaccatgaatttaacttcaaaatccccatctccattctcccccaaagaaaaataaaatccatcaacgggtcctaaaattcatgacaaatataatgatagcaaaatgctcgaatttggcaacgcacggtacgtgttccgccaaacctaaacaaggctaattcatcgatcctggaaaaaaatggaaattcaagatggctaaacaacgcacggtacgcggggcccataatggtttttgcatgaatcggacgagaaattggatgttgaccgtggtcgggcttacgggaggaaacgccagcacggatctccgatgggattgaaggagcaggagagggcgagcagacagcacgatcctggatcccgggtaggggtagccccctggcgtccaccgagcacgacccgcaccgccgtgtcagcaggtagtagaagcaggcaggcagaggggggcaaatctgagcacggcgcagagaggtgcgagccggcagcgggggtggtggccggttggtggacacggcttggtggaatccagaccaggagaggaggggtcagcagaggagaggaggggtttgcgtgcgaagtgcgaacggcgccttgcgttgc

SEQ ID NO: 23547 - DNA, 279 bp, Zea Mays
ctcatagcaatgttattgttttgtttagtcttacatattgaagtatgaggttaacattttaatggcagttacaatactcaatagtttatggtctagaccgtcgactttcttcagaatacttgtgttgatttggtgtttaaaatggaacgtaatttcgtaaattgcagctttgaaagtgattgcacctggtacactaccatggcaatatccattaaatgctataaaaacagcttcataccatttccttcgtttatatatttttattgtcttattcaaaac

SEQ ID NO: 23548 - DNA, 1433 bp, Zea Mays
cgcaccagctgcttcccccctatatatatctatataaaaaaagaaagaaaaaaaatcggacaaacgtgtggcgtcggcagccgggcaggtaggaaaaggtatcagcgtcgccaatctccatggagctcacaggcgccgcgctccggcgatacgcgctgccgtcggcggccccgcggaggaaggcggtggaggccgtggcgagggacctgggaaagctccgggccatggggctcgtcgcgggggacgcagccaaggagaaggtcctctcggacgccacggatcttctgctgcaggagctgagccagatgaaggatgcggaatacaagataaacaaggtggagaaagaacagaatgctgctatgaaagcactgaagaagcaggagaagcgcaccaagaagactgccatcatgatgatgaagtgtgaagaagatgagtcatctgagtcgagcgagagcgattgtgaggacgaggcaaccatgaatgtcgagcagggcttggtgatctcaacagcggttcccgaggttgttgcatcaagcatctcagctgtccccgcgatggagtgtgataaggctgcagtgaaggccatgaagatggagaaggaagcaaagaagatggcaatggctacactgaatggctgcagggatgaagacgattcctcatgctcatcagagtcgagtgaaagtgaatgcgagggccaagttatgaggatgagccgctgcgttacaatcaccgcaccggaaatgccacctccaagcacgggtcttccaatcatagttcctcaaattccagaacctttggcaccacagccgtctcaatctcaaccttcagagccagcaaccgcagtgcaagccaccagagtcagcagcgttgcagtaactgagacatccacaaccagcagaattgaggtctgcatggggggcaaatgcaagaagtcaggcgcggttgctcttctgcaggagttcgagaagactgtgggcaccggaggtgcggtcgtcggctgcaagtgcctggggaagtgcggcctaggtcccaacgtgcggctgaggagcggtgcctctgcggaaggttctgcaaaggggaacccactctgcatcggtgtaggctttgaagatgttggcaccatcgtggctggtctctttggaggcgctgatctgggcatgacacccacctagacctggtggtactacctcgacctagtcgtacttcaagaaatcaagagcacaacttgtaatcacagatgttgcattgaacaaatgtatagtgcagctacggccttgctagtgctactgctaagtttatgtactctctgtctatatagaacacgtatggtaatcttgtttctggtatgtgatccatattggtcagtgattgttttcatggttttcagatttgagcatctgtggcaatatagggatggttaatgctaatgtcct

SEQ ID NO: 23549 - DNA, 880 bp, Zea Mays
ctgatctgttcttggagtggggaggcgaggagaggagaggaggaagatggcggcgcaggagcaggagcacgagaagcagcaggcgaagacgagcaccacgagctcgctcccctccagcagcgagcgctcctccagctccgcccccaacaaccttagggaaggaggcgtggagagcgacgaggagatacggcgggtgccggagctgggcggcgcgtcggcgtcggcgtcggcctcgtcgggcgcgggcaaggaggacggcgcgcgggcggtggccgcgggggcgcaggggcaccctccggcggccgggaagaagcgcggccgcgccccgggggacaaggagcagaaccggctgaagcggctgctgcggaaccgcgtgtcggcgcagcaggcgcgggagcggaagaaggcgtacctgacggagctggaggcgcgggccaaggacctggagctccgcaatgcggagctcgagcagcgggtgtccacgctccagaacgagaacaacacgctccgccagattctgaagaacacgacggcgcacgcgagcaagaggagcggcggcggcggcaagggtggagacggcggcaagaagcaccacttcgccaagagctaatgagaattgagggactgagggagggagctggttcgtgctctgctcgcgctcgcctcacctgaccattgttggtggtggttgatgttgctgttgctgatgaccaaatcccgtctccccggccgctgctgtgctgggactgactactcaccactgctgtagggatgtggttgtttttgggggcgttttgtactggtcttgaaaggagaagcctttatggaatagatagatctttcggcagggtttgaagcgatttttctccatcatttacaa

SEQ ID NO: 23550 - DNA, 1315 bp, Zea Mays
gtcataccgttcaatgaaaatcaggaatctattcgtactgatgagctggtctgttcacaaattgcagctcagcgtacaaccaatcatgaccttgataaactttatattacaaaagaaatcagctcaggtcctgttgatcggctctttatggatactgcagtttactctcgtaatcgttgtttccgtttagttttctcatcaaagtctgggaagaaatcatttcttgtgccgaccaaacgtttcaaatgccaggaactgaatgataaagatgtctttatggagtcacttatttgtagactggatgataactgtgaaaaactgttgatatgcaaactagacttggaatgcaagaaaacattgcattttgactctgaaatcagcatgtctcaaattcaaggaaggagctacaggcaccgcattgctacatatcaaaatgatttttctcatgcatatacttgtggaaaatctccttttccacctttggatggttttatagaatccatcgcttcttttggaaatgtttcagggaaaattcgatcttggttctggttttcacaggagagtttgataatctacaacatgttacgaagcagatactgtgagaatattggaagagagcataagggcaatcatgtgttttacattgttgatttccagagagcagcatactaccaaaagtgtcatgaccctgattgtcgaggttaccgttctcccctgcgtcctgtaccttgggatgtgattcctgagctagtggagtcagaccagatagaataccagggccatgccatggaaaccaacattgaaaacagcagcatgagcggtaaatcaatcacgggggctggtgctgaggatcctgaatggtgggaacaagtggtggaatttgcggacagcatcgagaacatggatcattctttggctaccttggaagtgaaatctgacgccagcatcgagaacatggatcatgctcccagcttgtgtgcctcggaagaaaacggttgttttgaagctgaccctgagtgggtgatgcacgcggaaagagccatggagcagtacgaggaacaaagcggaggatcgcagtcacacgcaacttcccaagtctttgatctcgaggatgtttaacagtagatgctgttctaaacaatttgaacagtgacttgtaaatatacgttttatgatatattttaatctaaaaatatgtagataaataataaaaatggatattatgaatgaagcagtgagaacataatctgtatacgtgttcatgttttaacatcgtgttaacataaacaatataaaacaagaagttttaggaagt

SEQ ID NO: 23551 - DNA, 4674 bp, Zea Mays
ccgccacccccgcccaaaaaagaaaaagaaaaaaaacaccctcccttctccttgcttgtcagctcgcacccatggaaccctcgtcgccggccaccacggccaccttccctgctgccgtagaagaacatgagacgtaccctcccatggtgtcatcctctctattcccacttttccccttcgccgcctccacctcctctgctccccccgccgaatcccaatggctttcaaaccctagcttctccttcgatgcctcctccctgaacatcccggctaccacctcatcgtcgctcccgtcgccgcagagccactcgtccgatgaggacacgccgctgcaggccgctcctgcgaaatacgagctggtgccttcttcgccgtcctccgacgaggagagggggtcgcggaggaagagaagtgggaggaggaaacggaagcgcgagaaggagcgctatgatggggcagcgacatcgcggaaggctgggattcgtgcctgggctggattggagacgaagccagccaaggattactatgtcgacgcgaagggcgaccatgataacctggcttttggatccctctacagaatggatgttgcacgctacagatcccagaatatgatggaggcatttggtttaaatcatctgaggtttggttcatcacatattgatttggattcagacttggatggaatggataacaaagtaagagctggaggccgttactattctgcaaaaaatgcagtttctgaaagaaataaaggtttcaaacatctgaaaatatttaagggaaacacctctgtaatgctcgctgaagattttgtcccatttggtacacaatcacttcctttgaaaagcacaactgtggaacaagagctagaggagtcttgggaagatgaaatacttcgccggactagggaattcaataagatgtctcgtgaacgccctcacgatgaaaaagtttggctggctttcgctcaatttcaggacaaagttgctagcactcagccacaaaaggctgctcgtttacaaactaccgaaaggaaaattagcatattggagaaagctgtggagctcaatccagatagtgaggaattattgctttgccttctgaagtcatatggcaagagggacaacactgagactctattgactaaatgggagcaaatacttacgaagcacccagatagctctacgttgtggaaacagtatctgcttctgtgccaaggggaattctccagattcaaagtttctgaaattcggaagtcctacgtgtatgctgtacaggctctatctgcagcttgcaccaagttatgtaggcaggataataaaagcatggattccaaatcttcatccttagttcaactagaagtggggttggtggatatatttgttaatctgtgccgatttgagtggcagacaggacatcgggaactagcaactgggctatttcaggcgcagatggagtttagcttatttgcccctcctttgtatctgacaacaagcagtaagcaaaggctctttgaacacttctggaacagtggtggtgccagaattggggaagatggagctcttggatggtctgaatggttagcaaaagacgaggagagtagacaaaagttgtctatgcaagaaaattcacaagagactgaaacaggaggctggagtggttggtttgatccttctctgggtaatactgagacaaatgatttatcaaacaaatcactggaaccatcattgaccgatggaaatgatgctgaagaccttgatgctgaggactcaccagcacaagatgatgttgaatccttgctgaaaaagcttggtatcgatgtagatgcagagtccaatagtgaagttaaagacgcagaaacctggaatagatgggcctcaatggagctgtcacgggacaatcagcaatggatgcctcttcatgaaaattatggatcaattcattgtggtgatgctccatctggggaagacaatgaccagctttccagagtaattttgtttgaggatgtaactgagttcttgttttctctatcttcagaggaggcccgcttttctctgatgtgccaatttattgatttttatggtggcaaaatctcaagatggacatcaacaaacagtccaagttggctcgatcgaatattgagcttagagaatattacagatgacatcctggaagatctaggtgctgtatctgacgttgtaaacaagaaccaaagttcatatagttgtaaatataaattggaatcattactgggaagcatgtgtgacctttcacaaaggccgggcctgatgaaatttctcaaaaatgcgatactgcttctgcttggtgttttccctcgtaatcatatcctggaggaagctgttcttgttactacccaaatgtttactcctcaagagaactcttcctccattcaaactaatgcatcacgggctttggccaaaagtatgttgaagaaagaccgacaggattttttgctttgtgggatatatggacgaactgaggcaatgaatgggaacattgaacaagcaaggaagatatttgacatggcactgttatcaactgaagcaacttctgaggaagaaggttcccatcctttatctttggtacgccgagatggagattacagtgtccgcttcaagaaacaactctgactcaatgcatcgtgcagtttacatcctatcctgcttagggagcaatctaaaatattctccttttgttggccctatttcaaggcttcaggtcttgagggctcgccaagggtttaaagagcagattagaagctcacgatctgcattttcctgtggtgctataaacaaagaatcagttgctctgatctgctcagcttctttgttcgaaagcatgacaacaggctgttactcgggtcttgaagtgatagaggagacttttccaatgacattttcagagagcaataatttggagtgtgaggatttgtgggtgtactacatcaaaatgcttcaaaaaaatcttaaccaattgaatctatcaagggtctggccaagcatatcacgcggagtgcacaaatatccctacaatccaaaatcatattcagcgacgttaaccctgagttatctttacagtgtatccaacaatctccgtctcacactcgacaaatgtagtcaaagggacccttctgtaatcaccttgctctttgctttgtcctttgaatggggtaaagctggatctgacaatagaatacacagcctgtttgagagagctctagctgatgataagttgcagaagtctgtcctattgtggcgctgttatctagcctatgaggcagaaatagtctgcaactcttctgcagcacggcgtgtgttcttcagagctatacatgcctgtccatggtctaaaagattatggcttgatggtttccaaaagttgggctctgttctgacattgaaggagttgtcagatctccaggaagtgatgcgtgacaaggaattaaacatccgcactgacatctatgagatactcctagaagaagaaacaaatacatgattctggtttgtgtgaagatcccgaaactgccccgcatgacatgctctgcagttataagtttccaaaggttcatgaaatattggttctgcattgctgttttgtggcctataagcatcgaactctgaagtctcaatcaagaacctgctatctatcatcaaataagatggatgggaagtacaatgggcatgccttggattgacaatcttgccaaatatgaccatgttttactatttttgttctttcaagatggaccttgttggctgccgttctgaatatctcacatgattcattatcggtatatagatagaagtggcttcagtgggcccttcaactgcacgataagatcaatgttaggaaggcctattacaaattcctgtacggaaatcatgccacgaacaaaaccgaaacatcaaaagcagcatatatttttgtttgactatcagtaaagcaactgcagccaggttaggggatcctgcagtgtgcttgagtgtccaaacaaaaaggcttcgaatgtatagcttcacctggcgttttgttgaaggtccccaaagttatggactttaagatgctggtatatactggctgggagcacagataagagaagtagcagcactgacatgacggcctcagtaagtaataatgttagttttcattcgctgaggatgggtattattgctagctgtgttttgtttgtgcatactgtattgactgttcatttctcgaggattcgagccatctgttgttcatgtgtgcagtgtgcttgtgcatactgtattgagtgttcatttctggaggaatcaagccatctgtttatgtgtgctagctggataaagcgctgcttgatgtacctacagggatatggccacatggctatgtacgccataggtcaacctgcattacagggttgttaatgtatctcatcctgggttgcgccttgataatgtgacaggcacgaaatggtagtgtaatttgatttaagtagttgagttttgtagaaacacagttcctggcacgatggtttgttgagtgcatgacagcatgagacaccaagctcagggatgcaggcatcctcatgaaattatgaaaccacgctgctgtggtagctggtatgttggacaaagttccgaggctgcagcttatgtacgtccaatttaa

SEQ ID NO: 23552 - DNA, 1215 bp, Zea Mays
ctcaatctcatccctcaaaatcccccaccaaatctgaacctccaattttattttggccatgtcgtcgtcttcgccttccctcctctcatcgcggctactctccccagccatcctcttcacaaagaagccggcttccctgcgctccatttcctctgcgacagcgagacacggggttcgggtggtggtagccgcggcgtcagcggccgcagcgtcaccagtgtccgcggcgcgggtgcgaccgtcggcggcggaggtagcgcggactgtcgtggagcttgccgcgtccgggactctctccatggtgggcccagacggctggcctctcggcgtcggcgcgcacttcgtcgcggattctgccggtgcacccgcgctctgcctgtctgccgctcgggtcgccgcgcccgatgcgccggccagcttccacgtcgagtttcgacagagtggggctaggacaccacagtgcactatgcttggtgccttaactaagcctagtgatgaatctgtgttgaagaagctttctactaggtggcaaaagaaatttggggaagagattgatcaagatcttttgtatttaatatctgttgaccggatcttgcacatggaagatttcaatgaggatggcatgtgggtagttccatcagactacaccagtgcagaacctgatcctctacgcaattttgctgaaaacatcgtggaggaatttaacaacaaaaatgctgaagacgtccgtaggatatacaacatatatgtcgaatcagatttacagacgtgaagatgatatgggttgacaggctaggtttcgatctccacgctcattctgcggaaggcgttttggctgttcgggtcccttttcctagggaggtctccgacgagaagggggtgaaatcgtcgttcaacatgatgtctcatcatgcgtgggaggtggagaagagctacgcgagcccagagtttgagaaggtgcagttcttgaagaaggtcagatagcattgcgaattctgtttccgtggtggacgatctttcgttattgagaggagtgatagtttgaagttttgtttcctttatcatgaactgtttgtcttgtatattggtcatatttttttgtgcctaatacattggatgcaattggcatcttgaattatctgctagtaatttatttgagaagggcaatgagttttgaccgtaagaataactctgggccatgagatgacaagtaaa

SEQ ID NO: 23553 - DNA, 1613 bp, Zea Mays
atactgaaatttggaacagagcaactcagcgagtataagctaacctgatcgttttcctcatttcaccttccaccctcccccactttctcctcaccgagtcacaaagccaaaccctaattcacggccgccggagatgggacaaggttctcccggcgggatgggcaagcagcccggcctcccgggcgaccgcaagcagggagacggcaagaaagagaagaaatatgaaccacccgctgccccttcccgtgtcggccggaagcagaagcggcagaagggctccgaggcggcggcgcggctccccgccgtggcgccgctctcaaagtgccgccttcgcctactcaagctcgaacgcgtcaaggactaccttctcatggaagaggagttcgttgccagccaggagcgcctgcgccccagcgaggataagacggaggaggaccgatccaaggtcgacgacctccgcggcactcccatgaacgtcggatcgctggaggagatcatcgacgagagccatgccatcgtctcctcgtccgtcggtcccgagtactacgtcgggatactttccttcgttgataaggaccagctcgagcctggatgtgccattctgatgcacaacaaggttctgtcagtggttggtattttgcaagacgaagttgatcctatggtttctgtgatgaaagttgaaaaggcacctttggagtcttatgctgacattggtggcttggatgctcaaattcaagaaatcaaagaagcagttgaacttcccttaacacatcctgagctatatgaggacattgggatcaggcctccgaagggagttatactatatggggaacctggaacagggaaaactctactcgcaaaggctgttgccaattctacttcagcaacgttcttgcgtgttgttgggagtgaattgatccaaaagtaccttggtgatggtcccaagcttgttagagaattgttcagggtggctgatgatctttctccttcaattgtctttattgatgagattgatgctgttgggacaaagaggtcgaattgacagaaagattgaattccctttacctgatgtcaagactaggcggcgcatcttccagatacacacatcgaaaatgacactggctgatgatgtaaacctagaagagtttattatgtcaaaagatgagttttcaggtgctgacatcaaggccatttgtactgaagctggcttgcttgctttgagagagcggcggatgaaggtaacgcatgcagacttcaagaaggccaaagaaaaggttatgttcaagaagaaagaaggcgtgccggagggcctatatatgtgagactcatcagcagcgctattagtctttgtgagagaactggcgtttgtaatctgcttaaatggtccgaaaatgtttgcttacagcatttattttggttggaaacacacaactcaaacaaacagttatcctattatgagtacttggatatatgaaatggcagcatcgagtcaagatgaggttgaatgttggttgtctgtgcaggcgtggacatgtatgacaagcatcctaggtttcaatcctaggttaatatgataattttatttttttatataaattgaagtctattaatga

SEQ ID NO: 23554 - DNA, 235 bp, Zea Mays
atataataacagagtgtatagatataaatgtcacaatataatcagaatacttattacatagcggaggtccttacaaaataaaagataaatatatattgaactaaagtccatccttggcgccataaagtcaactgagagacgccacctagatcaagtcaaactcctcgatacgtggctcctcttgaatcacctgttcttttcctgtgggggtgtgagacagcaagggtgagctcac

SEQ ID NO: 23555 - DNA, 5956 bp, Zea Mays
acacccaagatgccaagacccaatccccatggagtcatggacaaggcaggctccacgtcctttgtccctgtccacgccgaggacaaagtcacgacaccaaatccctcccaggcatcacagaccccattctccccccacatcagcacagctcaggaagcttcccatcctccatggcctaaatcatgtctgacacttgacagttcacaaaaaggtcccgtttcgtggaccaatgtcttgcttcggttgaaaggcgcggtatctgctgctgcttctgtggagttattaggcttcgatttgggggtgggggccggtggtttcagcgtgggaggaccgcgaaaggcgatgctttcagcagcatgatccaggagatgaagggcgagatcggcgccatctcgtcgcgcggcgtgctacggctccggccggggagccacgccggggccgggcgagcgccggcagccgagccggacgaggcgccgcgggagggctgctgggcgcagttgcctctcgagcttctgcgtatggtgctggtcagggtcgaggaccaggagccgcggtggccgggccgcagcgccgtcgtggcgtgcgcctgcgtctgccgctgctggagggccgccgtcaaggagatcgtgcgcgtgctggaggcgtctgggaaactcaccttccccatctctctcaagcagggatgcccctctcaaatgtttcatcaggaggaaccgggctgctcagtcgtattctttgtgccttggagtcactgatgggttagctgatgatgggaaattttctacttgctgcacgcaaatgccgtaggcctgcatgcactgaatacctgatctcgcttgatgcgaagaacacatcagctggttcctacattggcaagctaagatcaaacttcttgggaacaaagtttaccgtctatgatgcccatccaccttgtgccagagctgcggtttcaaaggggtacatgatcggctcagcccatgtttctcctggggtacctgctgggaattatccggtttctcacatttcttactatgcgactttgggttctagggtgccaagaaagatgaagtgtgtcatggacagcatccccgtctcagcgattaaaggaggagggactgctcccacgcagaccgagttcccatccatgagctccagctccttcgcatcggttccattcttcactaggaaaccaggccaccgtccggacagttgtccaggtgttccgccgggtacccagaacgaaaccaagacggtgctgaagaacaagtcccccaggtggcaccagccgctgcagtgctggtgcctcaacttccacgggcgggtcacggtcgcgtctgtgaaagaacttccagctggtggtggcttcgggcgagagtaaggctagctgcagcggcatccgccacactcgcactccttagccctgtagccatttaggatgacgcctgaagctctgtagccatttagggtgacgcctgagctgtaacggcgtgcgctaaacgggtccctacctgctacagccgtaggtgaagacgcgcacgtcccccagataagggaagcactgtagcgcccccacagtgctctcctatttaatagttgaacaaaaatagaaataaaagatgaatagggttagataataatattttatagttgtagtggggtataggggataatatagggagaaccgctgcgggagatgaaaatttagggggtgaaatgttgatgatgtgacacaaaaaagtgatataagaggaaaaatttagagaaagccgctgcggatagcctaaccaggacgacgacgtgatactccagttcgggaaggacctgttcaccatgacttccggtatccgatctccgcgttccaggcattcgccatctgcctgagcagctttgacaccaaaatcactcgcgagtgagtttgtctcccagagagacacgctctagcaccctgctttgacacagaatgtccgtattggcactgatgatctgcgctgtttaccactgtcctccactagtacttttcaggggtatccaagtcatttattacttttgatcctatagtgtcttgtcttttattcgtgggagtgtgttcaagctgcaccatttttgtttacttccacgtctcatttctcagcaggtgaaccagctagcagatacagcaaggaattaatagcctaatatagacttacctgagctttatgccggagagtttggtgatcaagtatacttttgttcagtacaatcgtgatgtaaatagcaatctagctggaccagatcatacttgtatctatctatgcaaccctacagttgtatcctaaagcatttattttgtacagttctttcttaaaatgacccttctgaggcgccagacgagtatatacatacatttgcaagtattttggcactctaaaaaaaatactgagacggctggctaaggtggcatggtggtgatgagttcaaagttgaagcttcaaacggcctcctggcctggctgcagatgattgtgatatagagtaatgaattttgctaacaagtatataatattatttttagggtagaaatttagagtaatatgagtgaggatagtctaagtatcctagatttattatcttcctatttgactacagtcagttatgcacaaatttgaaatcgagatgaaacttggtggtggatcggagctgaatgtgcaagagtagacgacgacaacataggtcagggccagccagccaaggaagccgaatgtactcaacgcagactagtaagtagtacagtgcactacagtacgtcgtggatttatttctgctgcacagagagaggaggacagtgaagtatcgccgtcctcgcgagcgaccggccggcggcaacaacacgtgcgagcagcgaccgacctgcaacaccaaaccaaccaagcaacccacgagacgagacgagaagcacatgctgcgctgtcgccctggtagagcgagcgaggcacgggccacgccacggtccccctactcctccggatcgatcgggggagtagtgtctcagacctcgccggacttggcgaaccgccccttgatccgcatccggccgtcagcgcgggccttgcgcgactcgtaccggatctgcttgccgaacctgtgcgcaagcaagagcagcgagagctagcgacgtgagagcgactgtggtgtcgatcggagctaccactactccggctcgcccgctcacctcctgttcttccgcttctccttgtagcgcgagatcaccgtgccgcggtcggggtgggccacgtcgtagccgcccttcttttccgtcaccggcaccagcgccgtcgtggccaacagctgcggtcgcggggccgtttcctcgtctggcttgttgccgctattgtccacgtcgccgccgctgctgagcgtgacgctggcggggaagatctccgacatgtccacgaacgaggacaggcacggctcgtccggcgccggagcagcctgctcgcgcgcctcctccacctccacctccgcccggcgcgcgtcgacgtcacaggcggtcgcgatccacgcctcctgctcctgtcaccagttcatctgcagcagagaagtgactgaacactgaaccaaacctcgtgggaaggcactgctgcgaaagccatggtcgctgcatcatgccaggcggcgtcagcgtcagcagcgtcgagagccccgaagtctgcggcggctccaatgtcgagctccggcgacgcccatggaggcagctgctcgccgtcacccggctccagctccgcgtaagacgccgccacggccgccgcctccgacttggcgagctcctccagctgccggattaccacgtcagccagctcaccgccggagctccggttctaggtcgccatatcaagacaaccattagagaagaggaaaaagaatcccgttttttttttgtttggtttcatttaacaatggctcttgtagcagggcagcagccgaagcagcaccgtacctttggggacggcggtgcgaggagcggatggaggccatgacaagatgtggtaggaacgaccacgtcctccaagcacaccacctggggctcctcccaggtggaccaccaaccgacgtccccgcccgccgccgccgccttctcgtcgtacccggcgacgccgaggatggccgcgagctcggcgatcgaagggcacccggcgtactcttccaccgcgtcatggtcgtggtggagcggccgcgggtcccggtgctcctcccccttctcctcgtcctccttctccaagcagtagcagtcggcgcagacgaagccgccgccgccgccgcggggggacgcgacggcggtggcggcggctgcgcggcacctggcgcagagcggcgcccgggcgtggcgggtggacaccgtgttggcgccgtgcacgtggcggtcgcacggcaggcacagcctcgcggagtcggcccggcagtacaccacggccggcaggcccatgcagtagtcgcatctcggcgcctccttgctgccggccgcgtccgcgtcggacatggcttccgccacctgcggcggatcacggcagcggacaagacccccgggggatctggttgggacgagcgcgatttgttgcagtgaggacggaggaggcacaggattgatggcgcgaaagggagaggggacgatagaggcctacaactcgcacggtcgtcaccctcactcgtcgctactgtcttgtagttgttgtaggtcgatggtgggtgccagtacaaagacactctgtagtctgtagatggccatgcagcagcagcagcacgccgccccgtagttgagcgcgaagcccgctattttggctcagcgtttaccagagctgtatgtattctacatatatgtctactgttgatatttgattttctaaaggtgtcgaaaacaagttaagtatttggaccttcgtcctttgatttaatgcgtaggatgaaggttcttaaaggagatggaaataaaaacgataacatgccatataagccaaaaagataatatgtcatacaatttaatgaagagagatataagagagtttaacgagagatgtgagagtacgataaaaccctccaataaaaattgccttagaccgtctccagcaggcgagaaaaaatagtgaatacgaaactgtagatgacattgtttacagagtgaagtttaaaataagaaataaaattgtggaggatactgtttacaaagtgaagtttaaaataaggaatgaaatagaaaatctgctggagatatccttagtaacagctattgacagagacgtaggagtgtgcaactgtcagccgaggacccaattatacagtggctaagctaaatagtttagcaggcttttcagctccaactaacaactatacttgggtagacagacccatgtccacacagcctgtctgtccatccgtcgttgaaagagtttatttatatcgaaagaaaggaaatacctcaaatagtccctccattgtgaaaaaaaaaatgtgccggaagaaagagtcgccctgctttcatggtgaaaaagttgatgtcgaaagaaaagaggaagaccgcgaatcgtgttacagtaagtgttaacagttgaaaattgggtcacaggaagtgttgatatttagattgggtctcgaccaattttaaaaagacccatgtttaattttggtcggatctaacaaaaaactctataaacgcctcacagacatggcgtgcggttatgtatagtcatgaactgctgaaacaaggcttgattgcgactagaacaagaatcctcataaattgcaacagaaaccgtagtgtaggggctagtggtcacgactcaccaagggagtgaggcggcatatgcaatgctccaaagtggagacacatcaaattattgcccagccacccagtcccaggaagtaaatcgattctggacaaagaaacaagacaatttagcattgatgttgccagctttcaagtcctgcaa

SEQ ID NO: 23556 - DNA, 186 bp, Zea Mays
ttagtttgctttgatttttgaataaaaaagcccataaccaatgttccacaatcattctttttgaaaacaaatgatttttcagtttctaagcaaggctaagcaatatcagttctctttataaaacagggattaaggagtttccaaggaatggtaatgcatcaattgttcatcacacaactcctatca

SEQ ID NO: 23557 - DNA, 158 bp, Zea Mays
tatttatagtttagcctttaacttctaattagtttaagaataagaagtttcatgttaattaaaaagtgactaggagagcatgggtatctatatgtataatcattttattataaaagatgggtaggttagggcaagaatagcctggggtaagaaagttt

SEQ ID NO: 23558 - DNA, 2122 bp, Zea Mays
cagccagccatcctccacctccactgctctccatttgatcatttggatggatgtctttgctggtttgatctgcgcaccaaagatgcacttttgaccatggaggcagcaaataaaccaatttcttcaatttgctttaaaccaggaaatgaagattttgtgtatatctctgctggaaatgaaatattgtcctttgatgttcgtatgggaactcaatcaaagccattagagacatataactacaatagagatgaaatcaatcagattgctgtcagctctaaaggttttctcgctgctgcagatgatagtggggatgttaagattgtcaataccattcagaaatgcctgtataaaagattaagggaagcccacacaagtatttgcagcagcgtgcaattcattccttggagaccttggacagcaattactgggggccttgactcaaagctcgctgcatgggatttctccaaaggacgaacactgttttctattgattatggatcacctgaattgcaaaacggcagttcttccggtagtgcagggcaatgtttcaaccctgcttttgttcattcagtagcagtttctgaagagggtattttgggagggctctacaaggtttgtgctgttgcaaggggggatggtgctgttgatgtggttgatcttgagtatgaactggcccctgcgaaatcgaagggacctcctcgggcagctattttgacaacgagatcaaaaggcgctgaacttggagatgggagctgcaatcaaagtcgagcgaaaagaatccatcttgactacaccatgggcggccatactgcagctgtgtcttgtgtcatttggtgagaaggggaagttcctcatttcaggtggcaatgatgcatcagtgaagctgtgggattggtcgaaaggattttactctgaaacaaacagcaaagttgatttggttttggatattgatgtaaagaaaaagtctgagactctcagtggctgcaaactcttgttgtacccattggaacaggaggaagaagaggggagttcaaagcttgcctctttaccagcaatagctaagaaagttttatcttacgaggagggtatttatgcaaaactttccaggaagtggatagaagaaggcctcagaaccgtatccattggaagacaggaaccagggggttttgctgctgttctttggaggagaagagaaatgggaggcttgctcttgccgcatcaccgaacctttccaaattctttgcaagcttccatcccgggacctctctctcttcacaaaggcgaccgcaaaaaccttcattactttgcacctgatgtgcacctcttctgttccctgcggcaaggctttccacgctcatcttggtcggccgtcatcagatcagaagccagcggcaacgcggtggcgtcgccaggcacggtcatcaagcgtagcaaggaggagctcatcaccttcttcagagacatacagacatccattgccgagtgctcgcgtaaagcttccaagaggacgaggaagcagccgcctgatctgttccaagaggtccgcaggagggaggaacagtcacacggtggaggagatagcggcaccgacgacgtttcagagggaccgaggaaagtgaagagtcttgaggacatgaacgtggctggattgagagagttggcgagggccagaaggatgaggggttactccaagcttaagaagggcgagctcattgatcggttgagaggggctactacgtaataaactaccatgatgcagagcagcttcgcagttaatagggacacatgttcttttcgaacgtatgatgagattaccgatcaaaaaattgtatgatgatgagattaccgactttccaaacgatctagtcagttcattgataagaactagaacaatgtgtgtagttattatactatagaaccggtggagctgtattgttgtactacgccgaaacttttgtgtaggcatggcaatctcctgttgttacgtaagttactttgttatgtacggaattagtttctctaaatctaccatggattgtgtatttctacaacatctgtttggaatttgatgtacattctaactaggtggcaattggcaaataaagaagtttaaaatggccta

SEQ ID NO: 23559 - DNA, 6382 bp, Zea Mays
cgagaggcgagatcggcggctcccagattcgtacccgggccacagtccctcctcgccctgcgtgtcggcgccgcctccacacgcccgcgcttcaccagccccgacggaatctctcccggaggcgcgcgattcgccgcggggatggtacggtagggccgcagtcgctagggtttccgcgcccggtgccgccatggacgccgagccccgccgggagggttccgatcgggcgcccgccgccgactcctccgcggcgccggacggtgacgaggcgatggcccgtggcgtcgctgctgcggagaagcctacagcggccagtgaggcgggggctggtggagacgtcgcggcggcggagcgtgggcgtgacggggagacgccggctggagatccgggggtggtggctgacgaaggcggtgctgtgggcgaccagtgtcctgcggcgcctcaagcgagcgaggtggacgagggtggcgccgcgggcaaggagcggtctgatggtggtctggcgaatggggcagttgagggcagcagcattgcgggggaagtgccagatgtggctcctgtggtatctgaagcacggatggacgaggacgggggttgctccacaggcaatgagtactctgaaatgaagatggaggtggatggcggctgcgtagcagaacgagagggcgatggtcaggaacaggaacaagagtgcactgcagctgctgtggaaagcgaggttaagacgggggaaggtgacggcggagtggtgaatcaagggactacggcacatgctgggggtcttcaggttaaagaggaggtgggggaaggcttggtgggccgctacattggacgtagcgctccagggcgcacgaggattcttattgggaaggttgtgtcctatgatagcacagctggggtctacagcctggtgtttgaggacggacacgctgaggagctggggcttcctcagctccaggagcttctcatgtcggatgataatggtgcattaggcatgaaggtgagctgccggaagaggaagctagacttgctggtttcatcagggagcgccttggaggtcaaagagccaccaagtactaggcagagggttgatggatgcgagatgtctgccaggcctgatgagctgcagcatagtgcgtctggctcggatatgtctgaggatgttgagtcttcgagcaattcatcagatttcactagagaagaaacatctgagccatgccctcctgtacaggctgtggagttgcctccgtcgtcaggcgacattcctgtgccagaagagtccataagttctctcctctctgtttataacttcttgcggtcgttcagtgtgcagctgttcctgagtccatttggactggacgattttgttgcggccattaattgcagcgtgcagaataacttgttggatgctgtgcacgtctcgctactgcgggctctgaggcggcatcttgaatctagatctgcagaaggatctcgatcggcttcaaattgcctgaagtacctggattggacattactagacgcattgacttggccaaatttcttactagagtacctgtatgtgatgtgttgcattaaaaatctaggggggaagagctttggtagaagccttctagtcgccgaatactataaacttcctgttaccatgaagttgagggtgctgcaaatactctgtgatgatgtcattgaatcagaagaactcaaaactgaactggaaaatcgagtaggctacaatgaggagatggagtatgagatagaatctagtgcatttttggaggctggttcaagatcagtctcaactagagcagcaaaggcctcagcttgcaaaaacacgaatgatttccataatcttctcgaaagtgctccaaatgtaacaaatcccgaaactgctccagcagtcctgtctcaggatggcaatagtgatgattgccgaatatgtgggatggatggaactttggtatgctgtgatggctgcccgtgggcatatcattcaagatgtattggtcaaaacaaagctttccttcctcagggtgactggttctgtccagaatgtatggttaacaagcttggcccaacttcctcaagaattgagcgtggtgcaagaggagctcaaatgtttggcattgatatgtgtgggagactattcttaggaacttgcaactatttgctggtgatcgaaacagcttcagatgcagagtcttatgcaagatattacaatcagtatgatgttgccaaggtcctccaaagccttgctgtctcagatgcatatgtggacatatgcaagcaaataaaggactactggaaacatttacttggtataattcataacgagagatcaacaacaggtaaagaagttggtgcgaaagtagcacttcctcaaacaaacgcgcagcagaaatttgtggctaatcagagcgcaatgtgctcagtcgaatgcctggaggaacaaaaatgcaagtcaagcttaggtgttgtcactgagaaaaatgctgaagttttcaagcaaactgtgtcagctcagaacaacatacataatgcacacagaaatggagcttttggaccatctgtggtatcctcagtttctcatcagaatggatccattgtaacaggtgggtctaacatagcacaggcgcagccagctcagagtattttccatccagacccatccaccgtttctgtgacgtcaggatcattttgtccatcttctctaggtaaacaccaccttcagatgtttccggaaagatctggaaacatgagtggtgtcaaggcagcaaaattgtcttcttttaaaccacaagcttacatgaacctctacaatcatggcaatattgcagcatctgctgctgccaatatagctgttattacatccgatgacagtaaagtttcagcatcccaactgactgcgaaacaccggaagaaaatggctgcagacaatgctctacaattgaaagcattttcttcagcagccacacaatttctttggccgagtaccgaaaagaagcttatggaagtcccaagagatagatgtggttggtgccttgcttgtagaagttcagcaattggaactaaaaaggcttgttttcttaacatggccacttcaaatgctgttaaatgctctgctcgaattcttagtgtaatgcgtgtaataaaaaattctgatagccactttcctagtattgttgcttatttagccaacatggaggaaagtttgcgtggcctcttggttggttcactacaagatatgcagcagaaagaaaggtggcatcagcaactacaagaagcttcgaactgcagaactgtaatacccctcttgcttgagttggaaagcaatatccgtggagtagcattttctgcaagttggttgaagccaatagacgattggcctttggaatctcctggtccatcaacgggcgcatctcgtcctgcacaataccaaaaacgtggggttggtggaaggcgtggcagaagacgttcggttgcatctgaatctggtactgctactgctactgatgaggacaacagctggacttggtggactggaggaaatatttcaaaacgtactttgcagaggggggctcttctacattcaaccagaagaaaagctgctcgccaaggtggtaaacagtggatagcaggtttatcttaccatgaaggttccaaatttccaaggcgatctcggcagtttgtctggagaggatgtgttggaataagccagacttcatctcaacttgctttacaggttagatatcttgatgcccacatcagatggaaggatttcatccctccagatcatattccctcagatggaaaaagttatgatgctgatttttctgctctcagaaatgctgtagtctgtgataaaaaaataattgataataagataagatacgcacttaagtttcgcaaccaaaagcatcttcctgtgcgtgtgacaaaaaatatcttggaatcagaaggtgatcaggatgaaaatagcaaattgtggttttctgaaaaccatgtgccattgtacatgctgcgagaatttgagctgcacgctggggataactccttgcctactccaggaatttcagactctaactgttttaccaatttgtacccacgacgagtaaaagcatatgctggagatgtcttttcctatctttttcacaagggagaagtctatccctgcacctcatgcaagaaggatgtcatctacagggatattgttaaatgcaacacttgtcaaggtaattgtcataaagagtgtacatcaagttctgttgttagcaaaggaagcagtgctacttccagtttgatatgcaagttatgccttcagaagcggaatcttatgcttactagctacaatacaaatgcaagctatatccagcctcaacaaaagggtaatggccaacaaccagtgaccgctctcagagttaagtttaaggttagttcttcccattctggtgaacctgctcccaaagtcgaagcccagctagtcgcaagcgttaaagcacagccatctgcgaaggtggaagctcagtcgagtatgaatgtgaaagcccggccagttgtaaacgtgaaaacacaaccatttgcaaaggtggaagctcagccaattatgaatgagaaagtccagccaactgcgaagatggaggtgcagccactcgcgaagatggtaactcagaacatcactggtgtccaagctctgccaaagacaaaagctaaaaagtcaaagtcagaaaaagaaaagaaacctaaaaaagttcaagcgatcacatattttggtctcgtatggaagaaaaataagactgacaaggatgatggaagtgagttcagggcaaatgatgtaatccttaaaagcaaggatagtataggttcatcaataagaccaacatgctgtctctgtgacaaagcttattctccggatttcttattggtttcatggtgatgccttgcaacttgaagaagaaaggattggtgagttggttgcataccggtgctgtaggtgccgaagaagagccataccacattgtcctcattctgatggttatacaaagcctgaaccagaattaagtgaacaaacagttgctgcatcatctcagtcaactatgctatctagtgaggacacttatgctttagcagatcaggacccactgcttgcttcttacgggatagttgaaccgattggtgatgatacaatggatgttggtttgtcaatgaacatgtcaagctttgcccctggaagtaaccagaaactgtctataagaagagcacaagcaaaaagtactgaatacattgaccaaggtggaagacctgtgagtgagtataatatccaaaatcaacctccagggattggaaacatcaatctcagccacacgaatgaaatttctttttcagaggtagacagtgttgatgcttcagagctattggggtgggatttaccccaaggagctgcatatgctacacctcttgatttcactgctaatcaccagtcgaatgacacttgctgtggcagctttggaatggacgagtatgagccccagacttatttctcgttcaccgagttacttgaagctgatgatacacagcttgacaatgcctttgggatgtctgctggtctgcaaggtgattgcaatggcacaggaagctttgttcaacaaggagatggtttgtctttcatggtagaagatggagcttcaaatatgaacttcccaacaaatgatcccacccccgatgaggtagcgtgcagcaagtgcatgcatactcagccaccacctgatctcaaatgtgctgtctgtgacctgcacatacacaggcagtgctcaccgtgggatcaaggtgaagaacctgttgacagcagcaattggagctgtggtggttgccgggagtggcgatgattgacttctgaacttcattgcatctgttaatagtgccagctgccggctgttatcacaaggtgggaggtacatcgcgaagtgcgacgtggatctgtaggaaaaatctccaccaagctgttacgcagtgctaattgttgttcggatgctggggttggttatttgaccaaagtttaaccatcatacagttacaatagcaatgactcctgcgatatttacactgtacatactaaagaatgggtcgacgaagaccttttgtcattctttaggctgcttgtgtgtgtgttggtggggggggggggggggggggcgtagagataagggaggatgttgttatcaccatgtgtgtggttctgaaaaccatattcatgaagctgtgttaccttgaattctcgtgctgtctttcagatagaagtgtcttggtcagaggccatttctacgcatatgcatctttgttcgatatattttctccagctttgaaatcattatctcaatatgtgagaaat

SEQ ID NO: 23560 - DNA, 3943 bp, Zea Mays
aaatcctcgcaaaacccttgcttccacttccgccattctttccccccaatgcggcagtagcctccccgcagcacccgcgaagcgatggccctctccgctgcgcttcgcctcccgctcccgctccctcgccttctcggtccctccgccgtcatcttcggcgccgcctcccgccgccgcgctgccgccgccgccgccaacgcggccgccctccgcctcctctcggcctcgtctcccagtcccgcgtccttctcttcgcggcccacgcgtcccctccgctcgcgccgccgcaaccgcggcgacgatgggagggcggcggcggccggcggggccggcggtggggagggcggcggagctggactggtggtcaaggagcggattctgcccgtcgagctgcacaaggaggccacggaggcctacatgtcgtacgccatgtccgtgctgctcggccgtgcgctccccgacgtccgtgacggtctcaagcccgtccaccgcaggatactctatgccatgcatgagatgggccttgcgtctcgtaggccattcagaaaatgtgccagagttgttggtgaggtactaggtaagtttcatccacatggagatactgctgtatatgaaagcttggttagaatggctcaggatttttccatgaggtacccgcttgttcaaggacatggaaactttggctctgtagatgcagaccctcctgctgctatgcgatacacggagtgccgcttggattcgttagcagaagccatgttcttgactgatctggagctgaacacagttgactttgtgccaaactttgataactcacagaaggagccatctctactgccatcccgtgtcccatctttgttgttgaatggttcttctgggattgcggttggaatggcaacaaatattcctcctcataatctgggagagcttgttgatgtgctttctgtaattattgaaaaccgtgaagctacactccaagaactactggaacgcatgcctggtcctgacttccctacaggagggacaatcctgggaaatcaaggtattttggaagcatataaatctggacgtggccgcattgttgtgaggggaaagactgacatcgaaacaattgacgagaaaagcaagcgcacagctattattattaaagagattccataccaaactaacaaagctactcttgtacaaaagatagctgagcttgttgaagataaggtattggaaggtataagtgatattagggatgaaagtgaccgcactggaatgcgtgtagtaattgagctgaaaagaagtgcagatcctgctgttgtcctgaacaacttgtatcgtcatacagctctgcagtctagctttagctgcaacatggtggctatacttgatgggcagccaaaattgatgggactgaaagaaattcttcaggcatttcttgacttccgatgctctgttatcgaaaggcgtgcaagatataagctttcacaagctctagaaaggaaacatattgtggagggaattgttattggcctcgacaatttggatgctgtgattcaaataatacgagaaacatcaaatcacactgcggcaacaagagctcttgtcaatgaatttgatctatctgagaaacaagctgaagcgctgttggatatcacactaaagaagcttacttcccttgagcggaagaaatttgtggatgaagctaaaaccatgtcagaggaaatttctaagttaaatgagcttctgtcaagcaagaaacttatcttccagcttatacaacaagaagccgccgatttgaaaagcaagttttctacaccgaggcgttctgtgatagatgattcaataagcagtgaagttgatgacatcgatattatccctaacgaggaaatgcttttgattcttagtgagaaaggctatgctaagcgaatgaaccccgacacattcagtttacaacatcggggaaccataggaaagtctgttggaaagatgcgaatgaatgacagcacgtcagatttcattgtttgccagacgcatgaccatgttctttatttcagtgacaagggaattgtatactcagcacgtgcttataagataccagaatgtactagaactgctactgggactccgttggtacagttgctacctttatctgatggagagcggataacctccatcattcctgtgagtgaatttggtgagaaccaatatctagtgatgctcaccgttaatggctatatcaagaaagtaccccttaatgccttttcatcaatcagatctactggtatcatatcaattcaactggttcctggtgatgagcttaagtgggtccgtcattgtggcaatgatgacctggttgcattggcttcacagaaaggaagggtaatagtcaactcatgtgataagcttcgtgcccttggaaggaataccaggggtgtctgtgccatgaagttaaaagagggcgatatgatggcagccatggacataattccagcaacggtgcacaaaatgcccgaaagatgcaacagcaggctcagagattcgagtcctccatggttgcttttcatagctgaaagcggtattgggaaacgggtgcccttaaatgctttccggcaatcaaatttcaatgctgtaggcttgcaaggctacaagcttccagcagattgtcgtttggccgctgtatttgttgctggtctttcgctcactgaagacggtgaaagtgacgagcaggttgttttggttagccagagtggcactgtaaacagaatcaaagttaaagatatatccatccagtctcgacgctcgaggggagtgattctgatgaggctggagcatgccggaaagatccagtcagcatcactgatatccgcagcggcagcagaagtaactgaagattagtcttgcacccaagatgcaagtagtttagtctgaatttaatccctggcgtacgctgcagcatgaaatttgtctgctttcctgtggctagtaagcgtcaggagtatatctaaacgcccgtaagggaaaaaaagtaggaaaatggagtgcatctaagggatgcttttatatgactgtattgtggaaactcggctctgtaaaagaagtggtgatcaaagatttttcatgggactgttttactgcggaggttttcggtaatcccaaacagaaaggtaaagacccaagtcaattcctggcacaaaaacaggcatctttctgatgtggtgttgaacatatggagcatcaaagaatctcataatgtaataatggcaaccagttaactcaactgaactcttttagctgtttggttcagaaacatctcaaggcccaaattacataaaacaatttaactgtgagaatcttaagcagagctcaaaaactgccgagctcaggggcatacatcttacatacggaaataccaacccaaccctaaatatccagcaccatcatcatcatcatcatccaaaataggtgacataattggggagcttaccttggttgcaatgttgctggacagccagtccaggccttcatacaatccctcacccgttgtagcacaagtgctttgaatgtacctgccgccaaaatccaataaatcaagcaccagctgactgctagctaaataatatactacattaccaagcagaagagcagaactacgacactatgactacatagagcaatataatgaggaaagaagaaatctgttgatagtgtatgataccaatgacgttggcgaagtgaatgcagtccaagcttatcagtgatctcagcggcattcatagcatttggaagatcttgcttgttagcaaaaacaagcaacacagcatcacgtaactcatcctgcaacagcattcggtggagctcatcccttgcttcaacaacacggtccctatcattgctgtccacaacaaagatgagaccctgcgtgttctggaagtaatgcctccacagtggcctgatc

SEQ ID NO: 23561 - DNA, 1717 bp, Zea Mays
cctcactgtccgcatctcgagcgctctattccgccctgtgttctcgaacggtcccaaaccctaggcctaggcgcgaccagagtccatgtcggggtcttacggatccgacgactaccgcggcggcggcggcggcggcgtggtggtggaggcgggggcagaggaggatacaatcaaagtggtggtagtgaccgtggttttgatgaccaccgtggtggcagaggtggcagctatggaggacgagaccaggagaaccaaaagggtagtgaaggtggctacaatgctggtggttatggacaaactcctcaaggtcctccttcctacggtggtcctgcaggctcatacccaccaagctatggtgccccgcctccacaccaatatggtggtgccccaggcgggcaaggcggcctgcctcctacatatgctggtggatatggtggtcagtccatgcctgggggtggaggatctgggggtgcaccgccaccttatcgtggcggcgctagtgtttatactggtagtgctggtcctgaaccagctggaaaagtcaagcaatgtgatgaaaattgtgacgagacatgtgacaacgcaaggatttacatatcaaatttgcctcctgatgtcactgttgaggaattacaggagctatttggaggaatcggccaggttgggaggatcaagcaaaaacgtggttacaaagaccagtggccctggaacataaaaatctacactgatgactctggaaaagccaaaggagatgcttgccttgcctatgaagatccttctgctgctcattcagctggtggattttacaataattatgacatgagaggctacaaaatcagcgttacgatggctgaaaaatcagcacccagagcagcaccttcttatggtcatggcggtggccgcggtggtggatatggtggaggtggacgcagggataattacagagatggtgggggccatggacccaatagaaaccagggtggtggttcgcgttcccgaccatactgaaagcaactaatattcttactgtgattgttgcctgtgagaaaccatttctattcctgttctacggatttgtactcattcaggcgcataagaggcagatggggatataagctccaaatgctggtaggtttgtgatactatttcagccggtggatcactcctgtaagctttggattttgctgcaaagaacaggtagcgtggtttatcatgtgataggtttattagatttcgtctatattagatgacatatcaaacaacattcatagaatgttccacacccatttttgtttgaatgcacagagggtttgtagcatgtacttagcttaggttgccacaaacatttggcttcatatagatggtgaattgtgcctctgggtaataagcttgttttggtaaagagcctactcttggataaaggctgcagctccacttgtgccccaactaaacatccttagcaacacaatttgactttttttgtgctaaagtgatgatttataaatagaaaaggaacaagaattgggtggattattgcttcatttgccatttgaggcctctcgggagtatgggactgggtcactgggagctcatgcctttggttaattgacctggagactttgacaacttcatagtgcacaatccttgcaccgatcagacatatcagtcgcctgtgcgtgcagatggcgaaccagcattggtattttcgtgtgctgag

SEQ ID NO: 23562 - DNA, 975 bp, Zea Mays
aaaacaaaaaaagctgcatttttgtgtaggcaactttcctcagaaatgagaggccatcaatcaagaggataaacaaccatctaaaatccagtctggatgctgcaagccaccgacgtcatgtgcgttcagctacatgaatgagacgtactggacacaaaaccccagcgtcccgacggtgaccaacgacccagactgcaaaaggtggagcaacgaccagcagacgctgtgcttccagtgcgactcgtgcaaggctggcgtcctcgcgggcatcaagaagagctggcgcaaggtggccgtcctgaacatcgtggtgctgattatccttgtgatcgtctacgtcgcgggctgcgccgcgttccgcaacgcgaagaggatcgagaacggcgaggcggtcggcatggcgcggatgaccaagtcccatccgagcaggttccagttctaggccgctgctccgctgccactgcgggttcgaaagctcttgccttgtacaaatggcctgtggggtgtggtcctaaggcttgggcttcgctatgtcttgctgaattgcggattctactgcatttggtggtggaaatggaaagtccagtgtagtttggggttgtgtttgtttgagtgtttagggtaggcctattatgtggggttggctggggtacaatatgagatctgcaagaaacaagagaagttgaatcatctaggagttgttttgtaaggggagatctttaaattctagggggatagttgtatgatggtgccagccatgatgcagtgttttctgaatttctcagattgtatggcaatactagaggtatgatgatatggctgtactgcagcttccaggactgtaggggtgcttcagctctgtgaagtgtgaactgtgtggtatggggagaattctgatgcctgttgcaatttgtcaatggccaagtcctaggtgattgttgtgggccctcattgcagcctacaaaacccttttct

SEQ ID NO: 23563 - DNA, 1700 bp, Zea Mays
cacgtttcgtctccctgcaccgctcctcctcatcgtcgtctccccacctgacctgacccgaccgaaccgacccgaccactcctcccctgctcttccgccccaagcaagacccattaaaccccctcgccctctcctttcggggctcatctcgcctctcccccgtcccctgcctggaccctcccgatccgcctctcctcggattccgggtggttcccattccatcgacgtaccccctagtattcactgcttcggtgttgtgggctccgtagatcgacgtggcaccagaactatccgcgctagctgttgatttatgtcgcctgctctgctgccgctccatggttctgagctcacgtcgtcagcatcctcttcttgctcctttctccagcctgggcaggggggcgccagagactgcgggtttcgcttcaggatctcaggatttggatttggggtgaagtactctgggtttctacatttaggccctcgcttcctactttgccgcacctgagatagtaaaagagttcaagaatcccccccaaatcacagtcagtcttgggtctggtttgggtggatttcattacgtttcctccaagttcaaacagccagcaggatttccgattcttgcgcagttcaagagactgccccaactttatccaaaaagtttcctccgtctcatttgtggtcaatctggaagcggtgtgtcaagatgcggccctcggtgcagaaggtccgcattttctgttctgatcctgatgctactgactcatctgatgatgaagatggccagatcatcgcagtgaagaaaatggttatggagatactagtcccagtgacaaactcgaagacatctaatagtctgaagacccttgtgccgtgtggagcaaaggacctggaggtttcagagaagaagggtaaatcaagcaggttccgtggcgtgcgcaggcgacgctggggtcgatgggcagccgagattcgtgatcctgtgagaaaaaccaggaagtggattggctcgtatgactctgaggaggctgctgctgcggcatatcaggcgtatgcaaaacagatccgtgaagagttgctagccatcaagaaccaacggtctgtatcagaacgtgcagctctatcaagttcatcctcggtttcttgcgtatcttcgtctcccccatgtgagcagacagggcatgaaccgcagactagagtgctcgtggagaaagatcctgagcctgtagatgaagtctttctgaacttctctctcacacccaaggggatttcaatggacgatttgttaggacggatagatgagattcctgtttgtgacgaccctgtcagcccaactgatgagcttccacttgacaatttcacgagcctggaagatgcattcccgatcagcgatttcatcggttcaagagatgagcatctgtatgagcactatattggcctggctgacattagccacctgcctcttccaatggatgatccagctttcaatctggatgcagagcttgattggagtgggtttgacttcgctgcgattgaaggtgaacttgatgtcctttgaggctgcaatcagtgatgtgttatactgaaacctgcacttgcttatgttgtattcagctgaaagctcctctctatgttttttatatttgtcagaatacaacaatgaatacggattcaggtttcaaaaaaaaaaaaaaaaaaaaaaa

SEQ ID NO: 23564 - DNA, 1413 bp, Zea Mays
tgacaacacccctcgtattctcaactaaaaccctagccccacagccccgactcccgacagttccttcggtctcatcgcaactgcgaagctccccccagttcccacggtttcccccacgacgccggcgatgggcaagcggaaacagcgcggcggcggcgacggagaacccgccgcggaaggcggtgctggcggaggacacagcccctccaccctcgaggcggtgtttagcgaggtcggcccagtgcggcgctgctttatggtcgcggagaaagggtcggagaagagtcgaggcttcgggttcgtgcaatttgcaactgttcaagatgctgatcgagctcttcaacaaaagaatggatctcctgttgctggtaggaaaatcagagttaagctagcaatgaatcgtgctccactgaaggaacgtttgcaaaaggggaatatgcaagtgaaggactctgatgcaaaagatgaagcagacgaaatttctcctgctgaaaagcataaggggaaatctcataaaacagatccagagcaactgcatttgttgtcaaatgatgctaaggtatcaaaggaagctcccattggcgactccgaaaaagtgaaaaattctgaaaagcaaagggttgcaaagacggtgatttttggtggcctgcaagactccgccatggcaaccgaggttttccgtcaagctcgagagattggttcagttgtatctgtaaactatccacttcccaaagaggaaatgagattcaatggacttgctcgagatggatgcacatcagatatggcagctgtactctttgcaagtgtcaaatcagcttgggattctgttgtccaactgcataataaggaagtcaagggagctactgtttgggctcgtcaacttggcggagagggctcaaagatcagaaaatggagagcgattgtcaggaacctgccattcaagattacagagaaggagatcgtggatatgtttagttcagcagggtttgtctgggatgtgacaattccacataagtctgatgaggggatatcaaaaggctttgcttttgtatctttcacacggaagcaagatgcagaaaatgctataaaaaatattaatggaaaagatgttgcaaagagaccagtggctgttgattgggctgttccgaaaaaagtctacactgttgctgcaaaagttgatgctaaggataatgggaacagggttatcttctgttaatttaaaaataatttagtcttattcctgattgtctaaacagatgttcggtgtaggattttttgtgtcattttgttagactacccgtctagggtttgtgctattccccgtgtaatgaccgttatacccctgtgtaatgggccttggcccagttactctctctatttaataccactcccaacccctgattagggtatggg

SEQ ID NO: 23565 - DNA, 880 bp, Zea Mays
  misc_feature (1)..(1): n is a, c, g, or t
nccttccccacatggtcgctagctggcggcgttctgctctgtccctgtggttgttgtctgccctcgcatgagacgcctcgcagcgccttcctctccttcaaggctctcccggcgccggcgccgtatcccttgccaggtccgacataggcccctgcccggctggacccgccccgtcgccctccccttcatcgccgccatcgttggttttatcgttgtcgcggtcggatccatgttgttgtggccttcccggctggatccgttgtccctttggccggatcgtcgtcttaatggctggatccgtcactatgtggccttcccgaccggatccgtattctaccgcgggcgcggccaccctgaccgacgtagacgcatgcgctaccgccggtctccttggcggggctcctcgacgatcggacgagaagaagcaagaaggtccttggcctgctggtgttcttttgttgcgtcgccccgattgttgacgcttgaacgtcgacccctaagaagaacgaggctgccactgtgtgtctcccgactttggctacctcgacatccaggggctatcatccacatggagtgcacaccggtccctactccagccgcaacactcgcaccctcacgacgctgcgactgcgtcgggggggaggggggtcaacccgtcgggtcctactttcggcttctgctccagtctcatcgttagtgactgcgggagatgttagagtgtgtgttcctatatgtatccgtagatgggctagcaccgctgttgggctgccgacccattagggttagggttccgtaggtctctctatatatgtaaccttctcctatgcaatacatcaagcacttcacaatcttacaagaagaaccaattgcataactaacg

SEQ ID NO: 23566 - DNA, 1738 bp, Zea Mays
gggaagctgtaattcatacgtattttagatgattggggtccaggaggtatttggtgtgatgttgatgttgttgagttttcgtactacggtgctccagctcaaactccaaaagtgcaaatattcacagagctcgtggataagttgtgtggcagtgatgaatgtattggctccggctctcaggttgcaagtcaggacacttttggaactttgggcgccattgtaaaacggagaactggcaacaagctggtaggtttcgtcaccaaccgacatgttgctgttgacttggactacccaaaccagaagatgtatcacccattgccacccaaccttgggcctggtgtttatcttggagctgtcgaaagggcaacatcttttatcacggatgatgtttggtatggaatctatgctggaacaaacccagagacatttgtacgtgctgatggggcattcatcccatttgctcatgactttgacatctccacagtcacaactacagttaggggtgttggtgatattggggatgttaaggttatagatctgcagtgtccacttaatagattaatagggaggcgagtatgcaaaatcggcagaagttctggccacacgactggaactgtgatggcttatgcccttgagtacaacgacgagaaaggaataagctttttcactgacctccttgtcgtcggtgagaaccgccaaacatttgatctagaaggtgacagtggaagcctcattatcctgactggccaggacagcgagaagccgcgtcccatcgggataatatggggtggcacagcaaaccgtgggaggctaaagcttaggtgtgaccatggccctcaaaattggaccagtggagttgatcttggccgccttctggatcgtcttgaacttgatcttatcataaccagcgaatcactcaaagatgccgtgcagcagcaaaggcgcgcgttggcggctgcagctaattctgctgctggggagtcgtcgacagcagcagctcccgtcctagaagagaaagtggaggagatcttcgagcctctggggatcaagattgagcagctgcgtcggcacgacgtttcggcctctgaagcggaggaggcagctgggatcaatgtggaagagcgccagttcatctcaaactttgtgggcaggtcccctgtgcgtgatgaccagggtgctccaaggcaaattgcgaacctgaacaatccgtcagaggaagagctcgccatgttgctgcacctaggcgaccagtagcccaagcggcttcgcagacagaatccgacctcgacgggaaacggcgaagcgctcatttcagtgtctctacatcgaagagtcgcaagtagtccgaagaaggtcacctggagttcagcaaactgaacctgcatcagtagcttagaccagcagcttcctggcacaaacattataatgaactatgctgaaacttgattcagcacttacatgatttgggtggtattcccttcagttttgctgtgctcgtgaagactttaatatgtacaatgctgagtccctgtatcaaaacaatgcaggtagtgataaaatcgtattgatcaccttctcttttctaccattatcggtggagttgtctcaagatgactagatcagcttctggcaggcctgtctagtgcccaatgcaactagggcgatggtacaggcccccaattttttgagttttctgaaatagataatataagaaggcaaatattgtttgatgttttgt

SEQ ID NO: 23567 - DNA, 1679 bp, Zea Mays
cccgcggtacgtgccctccttctcgcgctcctaaacaatcgcccggcctcctccccttccattctaggctccgcgtctcgctgtccccactccgtctcctccggctccgtctcatcccgatgccgctccttctcatcgtcgtcgtcccagtcccggagtcgctcccctcctctggctaagcgcagccttgatgtgtcggcaactggagtatttgttacaattggtccttgtggccctcaacagtttggatgctgtcattcagcattgaacagagccagagtctggtaacagtttttaatcatgttcttgataggatggatacatctgttaaatgtgtgaccctgcattcagaattcagatcgacacctttgattggttccaattccctgctgctggcttattatttaactttcctttttgcagtttctataatagcagagacatgcgctaaccagcatttgctaacccaatcaatttgttggcatcattttattgatcgaatccatcccgcctcatgcttttgcttcgccctgttaacatgtttttattgctgccgtgggctcttcgcaatttaaagttctctcgtatatgaagtcacatagttacatgacgtacattctacttgaacatggttgtttggtatttttctcatgaattgtaatgtttcttatgctggttctctttatcctgggtgcatttacttctggataatgttgtatgcctctgattacatatcgtccgactaatcgtgattagtcgcgattagtcggtctgatcggttgttagaactcgataaggtgtaacgattcgatcagggtagctgatcgtccttatcgtccgcctaatcgcgatttatagcgattaatcaccgcgttggtccatcagcggataggcctgatagtccaaaagccattttaggcttaaatgatgtctgggggaggccaaaggacgcccaatcccttcagatacagcctgggtagacgtgagcagtcagcagtcctttaaatgctgtttgggaggccaaaagccattttagacgtgagcagtcagcagcaccagccttctcccccattttagacgtgagcagtcagcagcagccttctccgccattttagtcgcgaaaaacagcagctgagcagtccaaccaaagatgagcagctcttctgaaggtatggatgttgtgctgcttttgcctgttctttactctttgttctctgctatcttcccccctctgttcttcattcctctttgttcagcaaggtctggactttggaggcagagctgctactaagatgtttgacgtcgcagatatgcatggacatcatggtgatggacgttgtgctgctgctgttcaagtcatcttcccgcagacgaccagggggacgattagggtcgatcaggggcgactaatcgccttgatcgatgcctaatcgcgactaatcgcctgatcgcccagtggcttcgatcaggcgatcagacgatctgaaaactatgttgtatgcccagttcgcctggagcacggaaagacgatcaccttcacccccccctaaaaagggttcaccttcaaaaaaagtttgttcgccatcaccaccccctaaaaaggcttcaccccctaggtatataaaagttttcatacaaattgcatatgtttctctggctatgtttattgataattatgt

SEQ ID NO: 23568 - DNA, 1202 bp, Zea Mays
acgaaatgtcggattgttaatggtgcaaacgctaccgtgatatggaaggggatggttgttattttaccaatcttgtgaattgaggatttgaaccttttgaagacatctctcaatcaccagttcacttgcaacagccaatctgtacaaaggataagaacacctcatccaagccaaccctaaagcacataggtaaaaatttcagtgaagaagaagatagacacaagggactaatcaaacaagaggcacgttttggaaaagaatatatttgttctctgaggcgaatagagaaaattgtcccaaacgtactgaaaattctttgctgcatcgttggagttgtatccaagatgctgtaagttatgtggatgttgcaatagtattgagactagaaatcaaagcggtttggctgttcatgatagggtggagcaagctgagaagctttttaaagaacaagatccccacaacaagtcttttcaattcaagcattgctggctgttgttgaggaaccaaccaaaatggcatgacaagctaaatcaattagttaccacaaaaaactagtaacaagaagcagaaaacaaccagaaaaatcaagtctaggccttgttgacctatcaatgaaggaggttaatgatgctgctcctaatgcaattgagattccagagatagaaccatcacaaagacctttgggtaagaagaaggcaaaagaggcggcacgtcagggtggcaatgatgcttgcaaagaagcattgaagtttctgtaggcaaaaaagattgaggatgatgcagagaaggagatgaagagagaagaaagacatgcaaagtcatttgctctggacaaagagatgcttgaactagaaaaggagaggattgcgctaaagaaggagaaggttgccaacgaggcaaacaataatttcttgaagaggattgcagaagaagatagaataatgaccattgatctcagtgccatgaatgagatgcagcagcaatattacctgagcattcaagctgagattatggctcgtcgcatgaattagatcatagctcactgctagccttgttcttaatttagtttctagaggcattctattgtacgaactattgtcattgttaattttaattgcatgaactatgtgtcttgagttatcagcattgtaagaactatttcggttgtgatgttaatttaaagaatattaagttcctaattc

SEQ ID NO: 23569 - DNA, 2368 bp, Zea Mays
ctcaggctctcagcaaaccctacacccgtctgttctcgtcgtggcggccgccccccattccccatccttgtcgccgtgacgcctgacgccttctccccggaccccgatccggctccggcaatcccacgcccaggctgtccagctccaggctccaccgctccagcacgacagcaccaccagcgccgccctgcccctgtccctactccctaatcccacgcggccacacccaggtcccaggaaccagcactaggaaccagccggcgtccactccgtccagcggaaattcgaaaccagcgtccagcactagggtgaactggctgtttggacccgttctttatcttgcgtcgttcagccggcgtcctctctctctctctcgtggcgacgactgggcgacctccccgcccccgctgctctacgccaggtgcccaggtcttcgtcgggcccttcgccgaagagcagccaacagcttaggttaaaatcaaaaaaatttgtcgggcggataatacaaggcctacaccagaaggaataccctttgtgcgacaggcgaacagctgtctctctctctgcagtgttatttggtttattatatgcagttgcaggggagaaaactaaggcatgttcactgcagctagaagcacagccgcagcagatgcagcaggcttcttatacagtatttgcagcttagaagttggagtggcagctgcagctagctgcagcaaacactcctaacaataatagtggagagagactttcatgctgtttaaatttaggtgatttttgggaattaacttgcagatttattaattattatataggtaaaaagtgtagtatcagttactaggagcaagaacttgccctgatgacacagttattttggtttttctcctaatatttaaccttttgagtaagtgtgcagattaggtcttaaaaagggattgcgattaagattttattgccagagcctgagctgtagaattttccatttacacacgtgactgtacagggggtaaacttgcaggaatattacttggtgttcctataagatacacatgctgtgaaccctgatttgttttagctgcttttgttcgtttttgtctacttagccttgcacactgaggacctttattgaggtattccttgatccccatggttctagataacaaaccatgagtttacatcattatcccctctatctcaccttatattgaacatggtttttgatactattcttctttgtgcttgaaggttgccggtctgcgagttgaatcatggcggagcacttggcttcgatcttcggcactgagaaggacagggtcaactgccctttttacttcaagattggggcctgtcgtcatggggatcgctgctctcgtctgcacaacaggccaactatatcaccaactcttgtgcttgctaacatgtatcagcgccccgatatgataacccctggagttgatgctcaaggccaacctattgaccctgagaagatgcaggagcattttgaggacttctatgaggacatctatgaggagttggggaagtttgttcagggaggaagagcaagcagccgcagcatacaatgctcttcaggggcgcttttactctggccgccctataattgttgagtattctcctgtgaccgacttccgtgaagcaacctgtaggcagtttgaggagaacagctgcaaccgtggtggctactgtaatttcatgcatgtgaagcaaattggcagggatctcaggaggaagctgtatgggcgttctgcttccaggaggtaccatgggagaagccgaagccgaagcccgccaccacaaaggaggggccaccgtgaccgtgatgactaccgtggtggcggcggtggtggaaggggaagaggtagcaggtatgacaggtatgatgatggaggaaggcgcaggcatggtagccccccaaggcgtgcaaggagcccagtcagggaaagcagcgaggagcgaagggccaagattgagcagtggaaccgtgaacgagagggaaaacagtgagggctactgttcgccggactctctcatccctatattctaagtatgcttgtgtggatgacattctgcctggctaagtaaaacctttttaagatcaggattcctcggttcattttatggttaaaccagacatcatttgtttccatctgtgttgtgtcggatcctttgctattatgttattttgacaattggtgtcaaatcttttgaggtgtgctattagcttatgatgatgtcagttgtggtttgtcactagatttgccatttggctttcagtcgtgtgttgcggatttcttgttttccctctcatttttgctcattgtagtatgtgcagtagcatggagcaggttcg

SEQ ID NO: 23570 - DNA, 1870 bp, Zea Mays
gagaaaggcgcaaatggggaaataaatgggtggaggcacaaataaagcctctatcaggattcgaactcgagacttctgctctgatatcatgttagagtggacgcattaaccagttcaacccaaaagcttattaagttgcatacaccaaccaattcaacccaaacgcttaagctgatgggaagaggatgctgcaaacaggaacagttccagatgaagaatcctacaatttggttgtaggcctgcttattagacagaaccttgttgactcatctctgaagtatttggatctgatgcttaaatcgggctacacgccatcactaactgttttcactgattatatccaagcatgtgtcagatctgggaggttggacacgttgacatcaattatacagaaatgcaagacagctgataagatcaaagttttgtgtccacaatgggcctggtgcattgacatatcagaagctgcatttgaagctaacaatagcaaattagctctttttgctctggaatttcttgcaagatggattgttcgtggtgagaatgttaaacctcctgttcagctgtcagttaatgaaggtcttgtaatatcagctctgagtgctgctggcagaacttttagtactgacctcttgaatgctgcttggtcgctactacggaagtccctgcgccagaaaagggcacccaccccagagacatatcttgccaagatctatgctcattcatcaattggccagcttcaaagggcttttggtacattgcatgaatttgaaaatgcctatgggaactccaaggacgttgatttagagctcttctcaccatttacgtccttgcatcctcttgttgttgcttgctgcaaagatggctttagcacattggatttggtgtatgttcagttggagaatctgagtcatgcagatccaccttacaaatctgttgcggctctcaactgtgttatattagggtgtgcaaacatttgggacattaatcgagcttatgaaacttttgtggctattaaggaaaaatttgaactcagtcctgacatccattcatacaatgcccttctgtgtgcatttgggaagttgaaacagacaggagaagcatgtaatgtgttccagcatgtattaactcttggtgttaagccaaatgcaacaacatactcccggcttgtcgatgcccatcttgcaaacaaagatccaaaagctgctcttgccataattgatgagatggttgatgctggcttcactccttccaaggataccctcaggaaggttcgaagacggtgctctcgtgagtcagactttgacagtgacgagaaagtccaatccctggctaagcagttcaactaccgaatgggtggtgagaatcgaagagagatgctttatagcatagaatacaatcctgtgtactgaagcggcagtttctactgagtttgctggtcgttgggagagcacggacattgtagcttgtaaattacttgaacgcaccaggattcttaagcaatattcagtttctcaatcattatttttgctcgcagggttgatgttaggacttgctaataagctgcatactatttgtttgcttgagaatccgaaaatgtcagttctttttcataaattgtagcatctgcgtggccccacttcttacgtgactcctaggtgttttcggctttgtttacacttgtaactaacgaagaagtcctgggatgactgggtcgcagcttcttcaaaagatgctattcttattatggaaatttaatggagactgacaatttaaagtcacctcagatccttttttttgctacttctgtttcatgtcataaatacacttattttagaacagggaaaaaaattcagatggctttagttttgtc

SEQ ID NO: 23571 - DNA, 680 bp, Zea Mays
cttgattgtagggcacaactgtcagctacaggtggccgtgtggcacggccgggatccagctcgtcgtctcaccctcttctcctcttccaccgacggcgaccgcccccaattttctcctacccctccgccttcactgaggtccccgagatccgagtttccttgccctggtaaaccataatatcatcacgcctcgtgcccaaatcggacgcacgcactcccggtcgaattccctcgagcggagcagatttggatccggctcggccagatggatcccgaggacaccaccccaccggcgccgagccaaggtgatgcggagacaactccgccgccggtgttggaagtggcggcgggggaggacagcctagctagcgggggcgaggcggccgagcgggcccacgaggaggaggagctcgcgcgggaggtcatggagctcggcctccagaacgagtaccttaggtcccagattgctggcgtccgcccggcgggtgacgcggacgaggtccccgggcttgtgaggggctggaaggagcaggtggagaggatgagcagggaggtgcaggaacagcggctgacgcgggaggccacggagaaggccctggagcacgtcaacgtggcctatgctgaggctgacggcaaggtgcaggagcttacggccaagctggcacaagttccatgcatgt

SEQ ID NO: 23572 - DNA, 1303 bp, Zea Mays
gctgtgacttcatgaggacaggtcgaggaccgtctgctcactagtcactacgtctacgcattgaagctagaggattcatctttgggccagccattgcgctagccataggagcaaagttcataccactacgtaaacctaagaagcttccaggtgaggtattttctgaaagttatgtacttgagtatgggatggattgtttggagatgcatgttggagctattgaacccggggagcgcgtagtggttgtcgatgatttggttgcaactggtggaactctttctgctgcaataagacttctcgagcgcgcaggagctaacgtggttgagtgtgcatgcctcattgggcttcccaagtttaagttagctaaaggaaattgaggaagtattccatctcggtctgagggaggaaagacgcaatagaacaaggccagtgtaaaaaaaaactagtctgcctgtaactattcctgtacatgtgactgcagatttttaataaatgaaatggtatcatctagccgatatcttttcctcctacgagtaaaaccgagagcaacctcagcgtgtgtttgaaaacaaagtattttaaaaaccatggtgttttgaggtaaagtatctcaaaccatggtattggtatgcatgtgcaagaagctagttattcaccaaaactttgggttggagcaaagtttcaaatacttcaaaaatacatgctcagagttttttacaagtaggcaaacaaccactgtattctccaataacatgattttatcttaaaacaataaaactccaaaaacattttgcttcttaacaccctccttaaggtaaaaaaacttgtggatatcttttgtatgtaacttcagtgacagataggtgcatgtggttagggtaaattattttttgttataagaattatatgcctagtgtgcaatggtgagagctcaccgggacgtggggttcaaagcagcctcttcacatttgcggatgaaggtttgcctcagtttatttcttctccaaatgtcatttgggttttttctttcctaaatcacacatatggaagcgtctggcactggttatgtccttttacgtaggtgataagaatagcctaccttaatttataactttaaataccacgcgaccatgtattttttcctatggatgagatagctgataaccattagccacaacaaaagggatatggctaggttgaactctttggaatctagcatatgtagcaggacttgatatttccagatatgatgatagagagagggttgggaaactacgctagtgccatagtccactcaagtctg
